(19) United States
(12) Patent Application Publication
(10) Pub. No.: US 2015/0267249 A1
(43) Pub. Date: Sep. 24, 2015

(54) DETERMINATION OF REDUCED GUT BACTERIAL DIVERSITY

(71) Applicants: INSTITUT NATIONAL DE LA RECHERCHE AGRONOMIQUE, PARIS (FR); NOVO NORDISK A/S, BAGSVAERD (DK)

(72) Inventors: Emmanuelle Le Chatelier, Magny Les Hameaux (FR); Stanislav Ehrlich, Orsay (FR); Oluf Borbye Pederson, Lyngby (DK); Torben Hansen, Hellerup (DK)

(21) Appl. No.: 14/436,149

(22) PCT Filed: Oct. 17, 2013
(86) PCT No.: PCT/EP2013/071765

§ 371 Date: Apr. 16, 2015

(30) Foreign Application Priority Data
Oct. 17, 2012 (EP) 12306282.0

(51) Int. Cl. C12Q 1/68

(52) U.S. Cl. CPC C12Q 1/689; C12Q 2600/16; C12Q 2600/158; C12Q 2600/118

(57) ABSTRACT

The present invention relates to a method for determining whether a subject has a reduced gut bacterial diversity. This method comprises the step of determining the presence or absence in a gut DNA sample of at least one gene from at least one bacterial species from Table 1 or Table 2, respectively.

[0001] Most human diseases and syndromes have long been thought to be solely due to an alteration of the human genome. However, while mutations in human genes may correlate with some pathology, they only explain a small fraction of the clinical cases. One explanation is that a genetic predisposition requires epigenetic stimuli in order to result in an abnormal phenotype. Recent research however points toward another explanation, which is that the human microbiota plays a crucial role in the predispositions of different diseases (Clemente et al., Cell.,148(6):1258-70, 2012).

[0002] The human microbiota comprises thousands of bacterial species, among which commensal, beneficial or pathogen bacteria. Humans host microbiota in multiple locations such as skin, lung, vagina, mouth, and gut. These microbiota are different in their location and in their bacterial composition. The gut microbiota is the largest in its composition. It is generally considered that it comprises thousands of bacterial species, weighs about 1.5 kg and constitutes a rich gene repertoire on its own, also called gut microbiome, 100 times larger than the human nuclear genome.

[0003] All of them are known to play a role in maturation of the immune system and to impact immune response. The skin microbiota has for example been shown to play a role in the development of immune diseases such as asthma or atopic dermatitis (Hanski et al., Proc Natl Acad Sci USA.,109(21):8334-9, 2012).

[0004] The gut microbiota has been shown to play a role in the development of allergies, inflammatory bowel diseases, irritable bowel syndrome and possibly metabolic and degenerative disorders such as obesity, metabolic syndrome, diabetes and cancer. While normbiosis, qualifying the normal state of the microbiota, seems to guaranty homeostasis, disbiosis, which is the distortion from normbiosis, correlates with a long list of diseases.

[0005] It has been shown for example that reduced bacterial diversity in the gut microbiota is associated with metabolic diseases such as obesity (Ley et al., Nature., 444(7122):1022-3, 2006), type I diabetes (Wen et al., Nature., 455(7216): 1109-1113, 2008; Giongo et al, ISME J., 5(1):82-91, 2011), metabolic syndrome, hepatic steatosis, necroinflammation and fibrosis nonalcoholic steatohepatitis (Machado et al., Ann Hepatol., 11(4):440-9, 2012). Altered gut microbiota is also observed in inflammatory-related pathologies such as ulcerative colitis (Sasaki et al., J Signal Transduct., 2012:704953, 2012) and paediatric inflammatory bowel diseases (Comito et al., Int J Inflam., 2012:687143, 2012). Moreover, gut microbiota is at least locally affected in colorectal cancer (Sobhani et al., PLoS One., 6(1):e16393), 2011).

[0006] As growing evidence points toward the role of reduced bacterial diversity of the gut microbiota in a broad range of diseases, it is becoming critical to be technically able to assess it precisely.

[0007] However, assessing gut bacterial diversity proves complex. Indeed, only a small proportion of the bacteria species of the gut microbiota have been identified and sequenced, mostly because most gut bacteria cannot be cultured. In addition, most bacterial species are only present at a low copy number in the gut microbiota, which makes them difficult to detect (Hamady and Knight, Genome Res., 19: 1141-1152, 2009). Therefore, most of the gut bacteria have not been taxonomically assigned yet, which restrains the use as biomarkers to taxonomically known species and genes.

[0008] The determination of reduced bacterial diversity has thus been so far generally limited to measuring the relative abundance of known bacterial species or phyla, rather than determining the abundance of all of the species of the gut microbiota. For instance, with respect to type I diabetes, it is known that the proportion of Bacteroidetes bacteria increase over time in unhealthy (i.e., autoantibody positive, “autoimmune”) subjects, while the proportion of the Firmicutes bacteria increases in healthy non-type I diabetes prone subjects (Wen et al., Nature., 455(7216): 1109-1113, 2008). However, the evolution of the proportion of the non-taxonomically assigned species in connection with this disease, as well as many other, remains difficult to assess.

[0009] The current methods can therefore only report differences in the proportion of known bacteria. For this reason, they are not sensitive enough and most probably underestimate the actual population of people presenting reduced gut bacterial diversity.

[0010] There is therefore still a need for a comprehensive method to accurately determine reduced gut bacterial diversity in a subject that would rely on specific markers. Such a method would then not be limited to specific techniques or equipment and could therefore be implemented broadly.

### FIGURE LEGEND

[0011] FIG. 1: Distribution of low and high gene count individuals in the total population of 292 individuals. Top: Gene counts from all uniquely matched reads. Middle: Gene counts adjusted to 11 million uniquely matched reads per individual. Bottom: Gene count distributions in different enterotypes. Inset: Enterotypes of low (LGC) and high gene (HGC) individuals; B, P and R stand for Bacteroides-, Prevotella-, and Ruminococcus/Methanobrevibacter-driven enterotypes, respectively.

[0012] FIG. 2. Bacterial species have different distribution among 292 high and low gene individuals. Top: Presence and abundance of 50 ‘tracer’ genes nine most abundant known species and 7 unknown bacterial species. Rows correspond to genes and the relative abundance of each gene is indicated by color, increasing from light grey to intense grey; white denotes that a gene has not been detected. Columns correspond to individuals, who are ordered by increasing gene number. Values on the right side of the figure give the Wilcoxon probability (q) that a species is differentially abundant among the low and high gene individuals; the abundance of a species in an individual was computed as the mean of abundances of the tracer genes. Bottom left: AUC values obtained for the best combinations of 1 to 19 species in a ROC analysis. Bottom right: AUC for the best combination of 4 species (the 4 taxonomically unknown species with the lowest q probabilities displayed in the top part were used).

[0013] FIG. 3: Presence and abundance of 50 ‘tracer’ genes for the species significantly different in LGC and HGS individuals. Rows correspond to genes and the relative abundance of each gene is indicated by color, increasing from light grey to intense grey; white denotes undetected genes. Columns correspond to the 292 individuals of the cohort, who are ordered by increasing gene number. On the right is illustrated the fraction of individuals that have a given proportion of the tracer genes for each species; the fraction is represented in the y-axis as a percentage from 0 to 1 and the number of genes on the x-axis. Taken together 70% of individuals have none or all genes of a species; 87 have <10% or >90%.

### DESCRIPTION

[0014] The present invention is directed to a method for determining whether a subject has reduced gut bacterial diversity. Such a determination is useful, in particular for assessing whether the said subject is at risk of developing a pathology, such as e.g. type II diabetes, hyperglycemic syndrome, heart diseases, insulin resistance and hepatic stasis. The inventors have shown that it is possible to discriminate between individuals having reduced gut bacterial diversity and those having normal gut bacterial diversity by simply assessing the presence of a small number of those bacterial species in the gut.

[0015] The inventors have found a set of specific bacterial species, which presence or absence in the bacterial DNA of the faeces of a subject significantly correlates with reduced gut bacterial diversity.

[0016] By “reduced gut bacterial diversity”, it is herein referred to a gut microbiota in which the number of bacterial species is reduced compared to the average normal gut microbiota.

[0017] For example, the comparison between a test microbiota and a normal gut microbiota can be achieved by the genotyping of sequences obtained from the biological samples for example with massively parallel DNA sequencing. In that case, a subject with reduced bacterial diversity can have a microbiome comprising less than 480 000 bacterial gene counts, wherein said counts were obtained by sequencing gut microbial DNA obtained from a sample of 200 mg of faeces with Illumina-based high throughput sequencing, mapping the sequences obtained onto a reference set of bacterial genome (as described in Arumugam et al., Nature., 473(7346):174-80, 2011), removing human contamination, discarding reads mapping at multiple positions, and based on the total amount of remaining matched reads.

[0018] According to the invention, a subject has either a reduced gut bacterial diversity, or a normal bacterial diversity. The skilled person would then understand easily that when the method of the invention does not determine that the overweight subject has a reduced gut bacterial diversity, said subject obviously has a normal gut bacterial diversity. By “normal gut bacterial diversity”, it is herein referred to a gut microbiota in which the number of bacterial species is around the number found in the average normal gut microbiota, that is to say between 10% inferior and 10% superior to the the number of bacterial species found in the average normal gut microbiota.

[0019] By “microbiota”, it is herein referred to microflora and microfauna in an ecosystem such as intestines, mouth, vagina, or lungs. In microbiology, flora (plural: floras or floræ) refers to the collective bacteria and other microorganisms in an ecosystem (e.g., some part of the body of an animal host). The “gut microbiota” consists of all the bacterial species constituting the microbiota present in the gut of an individual.

[0020] A bacterial species according to the invention encompasses not only known bacterial species but also species which have not yet been taxonomically described. Indeed, whether they already have been taxonomically described or not, bacterial species can be characterized by their genome. For example, methods for characterizing bacteria using genetic information have been described in Vandamme et al. (Microbiol. Rev. 1996, 60(2):407).

[0021] It will be obvious to the person skilled in the art that the genes of a bacterial species are physically linked as a unit rather than being independently distributed between individuals, i.e. the genome of said bacterial species comprises gene sequences which are always present or absent together among individuals. Bacterial species can therefore be defined by parts of their genome, and sequencing the entire genome of bacterial species is not necessary for proper bacterial species identification.

[0022] For instance, a method for the identification of bacterial species in a microbial composition, based on bacterial DNA sequencing and using marker genes as taxonomic references has been described in Liu et al. (BMC genomics, 12(S2):S4, 2011). The person skilled in the art may further refer to Arumugam et al. (Nature, 473(7346):174-80, 2011) or Qin et al. (Nature, 490(7418):55-60, 2012) for detailed methods for the identification of bacterial species based on bacterial DNA sequencing.

[0023] According to the present invention a “bacterial species” is a group of bacterial genes from the gut microbiome, which abundance level varies in the same proportion among different individual samples. In other words, a bacterial species according to the invention is a cluster of bacterial gene sequences which abundance levels in samples from distinct subjects are statistically linked rather than being randomly distributed. It will be immediately apparent to the skilled person that such a cluster thus corresponds to a bacterial species.

[0024] Genes of the microbiome can be ascribed to a bacterial species by several statistical methods known to the person skilled in the art. Preferably, a statistical method for testing covariance is used for testing whether two genes belong to the same cluster. To this end, the skilled person may use non-parametrical measures of statistical dependence, such as the Spearman's rank correlation coefficient for example. Most preferably, a bacterial species according to the invention is a cluster that comprises gut bacterial genes and that is determined by the method used in Qin et al. (Nature, 490(7418): 55-60, 2012) for identifying metagenomic linkage groups.

[0025] By “subject”, it is herein referred to a vertebrate, preferably a mammal, and most preferably a human. There are several ways to obtain samples of the said subject's gut microbial DNA (Sokol et al., Inflamm Bowel Dis., 14(6): 858-867, 2008). For example, it is possible to prepare mucosal specimens, or biopsies, obtained by coloscopy. However, coloscopy is an invasive procedure which is ill-defined in terms of collection procedure from study to study. Likewise, it is possible to obtain biopies through surgery. However, even more than coloscopy, surgery is an invasive procedure, which effects on the microbial population are not known. Preferred is the fecal analysis, a procedure which has been reliably been used in the art (Bullock et al., Curr Issues Intest Microbiol.; 5(2): 59-64, 2004; Manichanh et al., Gut, 55: 205-211, 2006; Bakir et al., Int J Syst Evol Microbiol, 56(5): 931-935, 2006; Manichanh et al., Nucl. Acids Res., 36(16): 5180-5188, 2008; Sokol et al., Inflamm. Bowel Dis., 14(6): 858-867, 2008). An example of this procedure is described in the Methods section of the Experimental Examples. Feces contain about 1011 bacterial cells per gram (wet weight) and bacterial cells comprise about 50% of fecal mass. The microbiota of the feces represents primarily the microbiology of the distal large bowel. It is thus possible to isolate and analyze large quantities of microbial DNA from the feces of an individual. By “gut microbial DNA”, it is herein understood the DNA from any of the resident bacterial communities of the human gut. The term “gut microbial DNA” encompasses both coding and non-coding sequences; it is in particular not restricted to complete genes, but also comprises fragments of coding sequences. Fecal analysis is thus a non-invasive procedure, which yields consistent and directly-comparable results from patient to patient.

[0026] As explained above, “gut microbiome”, as used herein, refers to the set of bacterial genes from the species constituting the microbiota present in the gut of said subject. The sequences of the microbiome of the invention comprise at least gene sequences from the bacterial gene catalogue published by Qin et al. (Nature, 464: 59-65, 2010). The gene sequences from the catalogue are available from the EMBL (http:///www.bork.embl.de/˜arumugam/Qin_et_al_{—}2010/) and BGI (http://gutmeta.genomics.org.cn) websites.

[0027] The bacterial species listed in Table 1 are absent from the gut microbiome of a significant proportion of subjects with a reduced bacterial diversity, while the bacterial species listed in Table 2 are present in the gut microbiome of a significant proportion of subjects with a reduced bacterial diversity.

[0028] These species are not limited to the ones which have already been known from prior art. Importantly, these specific bacterial species show a high correlation coefficient with reduced gut bacterial diversity. It is thus possible to determine whether a subject has reduced gut bacterial diversity with a high sensitivity. The sensitivity of a method is the proportion of actual positives which are correctly identified as such, and can be estimated by the area under the ROC (Receiver Operating Characteristic) curve, also called AUC. A receiver operating characteristic (ROC), or simply ROC curve, is a graphical plot which illustrates the performance of a binary classifier system as its discrimination threshold is varied. It is created by plotting the fraction of true positives out of the positives (TPR=true positive rate) vs. the fraction of false positives out of the negatives (FPR=false positive rate), at various threshold settings. TPR is also known as sensitivity, and FPR is one minus the specificity or true negative rate. Area Under the Curve (AUC) is a measure of a classifier/test performance across all possible values of the thresholds. The higher the AUC, the better the performance of the test.

[0029] The inventors have found that it is not necessary to determine the presence or the absence of every single species in order to assess the diversity of the gut bacterial population. Rather, said diversity can be evaluated with a high degree of confidence and accuracy by examining a very small subset of bacterial species. As shown in the experimental part, a very small number of species is a good marker of the said diversity. Indeed, even when the presence or absence of only one bacterial species is assessed, the method of the invention enables the detection of reduced bacterial diversity in a subject with an AUC of at least 0.69, and can be up to 0.936, depending of the bacterial species chosen for the test.

[0030] In comparison, a random method usually has an AUC of 0.5. Moreover, when inflammatory bowel disease, one of the pathologies associated with reduced bacterial diversity, is assessed by 16S rRNA sequencing of fecal samples, the AUC is of only 0.83 (Papa et al; PLoS One. 2012; 7(6):e39242. 2012).

[0031] In a first embodiment, the method of the invention is based on the determination of the presence or the absence of at least one bacterial species. Thus, according to this embodiment, the invention is directed to a method for determining whether a subject has reduced gut bacterial diversity, the said method comprising the step of detecting the presence or the absence of at least one bacterial species, preferably among the 58 bacterial species from table 1 and table 2, in the gut of the said subject. By “at least one bacterial species”, it is herein meant that the presence or absence of one unique species or of more than one species is assessed. In a preferred embodiment, the method of the invention includes the detection of the presence or absence of 1, 2, 2, 4, or 5 species. Even more preferably, the said method includes the detection of the presence or absence of more than 5 species. Most preferably, the said method includes detection of the presence or absence of 58 species.

[0032] The bacterial species of the invention are chosen from the list consisting in the bacterial species of table 1 and table 2. More precisely, the bacterial species of the invention are chosen from the list consisting in HL-1, HL-2, HL-3, HL-4, HL-5, HL-6, HL-7, HL-8, HL-9, HL-10, HL-11, HL-12, HL-13, HL-14, HL-15, HL-16, HL-17, HL-18, HL-19, HL-20, HL-21, HL-22, HL-23, HL-24, HL-25, HL-26, HL-27, HL-28, HL-29, HL-30, HL-31, HL-32, HL-33, HL-34, HL-35, HL-36, HL-37, HL-38, HL-39, HL-40, HL-41, HL-42, HL-43, HL-44, HL-45, HL-46, HL-47, HL-48, HL-49, HL-50, HL-51, HL-52, HL-53, HL-54, HL-55, HL-56, HL-57, HL-58.

[0033] Most intestinal commensals cannot be cultured. Genomic strategies have been developed to overcome this limitation (Hamady and Knight, Genome Res, 19: 1141-1152, 2009). These strategies have allowed the definition of the microbiome as the collection of the genes comprised in the genomes of the microbiota (Turnbaugh et al., Nature, 449: 804-8010, 2007; Hamady and Knight, Genome Res., 19: 1141-1152, 2009). The existence of a small number of species shared by all individuals constituting the human intestinal microbiota phylogenetic core has been demonstrated (Tap et al., Environ Microbiol., 11(10): 2574-2584, 2009). Recently, a metagenomic analysis has led to the identification of an extensive catalogue of 3.3 million non-redundant microbial genes of the human gut, corresponding to 576.7 gigabases of sequence (Qin et al., Nature, 464(7285): 59-65, 2010).

[0034] It will be immediately apparent to the person of skills in the art that the presence of a bacterial species can be easily determined by detecting a nucleic acid sequence specific of the said species. The presence of gut bacterial species is usually determined by detecting 16S rRNA gene sequences. However, this method is limited to known bacterial species.

[0035] By contrast, in the method of the invention, no prior identification of the bacterial species the said gene belongs to is required. The inventors have determined a minimum set of 50 bacterial gene sequences that are non-redundant sequences for each bacterial species of table 1 and table 2, and that can be used as tracer genes.

TABLE 1
bacterial species absent in subjects
with reduced bacterial gut diversity

| Bacterial species | Bacterial gene sequence |
|---|---|
| HL-1 | SEQ ID NO. 1 to 50 |
| HL-2 | SEQ ID NO. 51 to 100 |
| HL-3 | SEQ ID NO. 101 to 150 |
| HL-4 | SEQ ID NO. 151 to 200 |
| HL-5 | SEQ ID NO. 201 to 250 |
| HL-6 | SEQ ID NO. 251 to 300 |
| HL-8 | SEQ ID NO. 351 to 400 |
| HL-9 | SEQ ID NO. 401 to 450 |
| HL-10 | SEQ ID NO. 451 to 500 |
| HL-11 | SEQ ID NO. 501 to 550 |
| HL-12 | SEQ ID NO. 551 to 600 |
| HL-13 | SEQ ID NO. 601 to 650 |
| HL-14 | SEQ ID NO. 651 to 700 |
| HL-16 | SEQ ID NO. 751 to 800 |
| HL-17 | SEQ ID NO. 801 to 850 |
| HL-18 | SEQ ID NO. 851 to 900 |
| HL-19 | SEQ ID NO. 901 to 950 |
| HL-21 | SEQ ID NO. 1001 to 1050 |
| HL-22 | SEQ ID NO. 1051 to 1100 |
| HL-23 | SEQ ID NO. 1101 to 1150 |
| HL-24 | SEQ ID NO. 1151 to 1200 |
| HL-25 | SEQ ID NO. 1201 to 1250 |
| HL-26 | SEQ ID NO. 1251 to 1300 |
| HL-27 | SEQ ID NO. 1301 to 1350 |
| HL-28 | SEQ ID NO. 1351 to 1400 |
| HL-29 | SEQ ID NO. 1401 to 1450 |
| HL-30 | SEQ ID NO. 1451 to 1500 |
| HL-31 | SEQ ID NO. 1501 to 1550 |
| HL-32 | SEQ ID NO. 1551 to 1600 |
| HL-33 | SEQ ID NO. 1601 to 1650 |
| HL-34 | SEQ ID NO. 1651 to 1700 |
| HL-35 | SEQ ID NO. 1701 to 1750 |
| HL-36 | SEQ ID NO. 1751 to 1800 |
| HL-37 | SEQ ID NO. 1801 to 1850 |
| HL-40 | SEQ ID NO. 1951 to 2000 |
| HL-41 | SEQ ID NO. 2001 to 2050 |
| HL-42 | SEQ ID NO. 2051 to 2100 |
| HL-43 | SEQ ID NO. 2101 to 2150 |
| HL-44 | SEQ ID NO. 2151 to 2200 |
| HL-45 | SEQ ID NO. 2201 to 2250 |
| HL-46 | SEQ ID NO. 2251 to 2300 |
| HL-47 | SEQ ID NO. 2301 to 2350 |
| HL-48 | SEQ ID NO. 2351 to 2400 |
| HL-50 | SEQ ID NO. 2451 to 2500 |
| HL-51 | SEQ ID NO. 2501 to 2550 |
| HL-52 | SEQ ID NO. 2551 to 2600 |
| HL-53 | SEQ ID NO. 2601 to 2650 |
| HL-54 | SEQ ID NO. 2651 to 2700 |
| HL-55 | SEQ ID NO. 2701 to 2750 |
| HL-57 | SEQ ID NO. 2801 to 2850 |
| HL-58 | SEQ ID NO. 2851 to 2900 |

TABLE 2
bacterial species present in subjects
with reduced bacterial gut diversity

| Bacterial species | Bacterial gene sequence |
|---|---|
| HL-7 | SEQ ID NO. 301 to 350 |
| HL-15 | SEQ ID NO. 701 to 750 |
| HL-20 | SEQ ID NO. 951 to 1000 |
| HL-38 | SEQ ID NO. 1851 to 1900 |
| HL-39 | SEQ ID NO. 1901 to 1950 |
| HL-49 | SEQ ID NO. 2401 to 2450 |
| HL-56 | SEQ ID NO. 2751 to 2800 |

[0036] It will be obvious to the person skilled in the art that the number of bacteria from a given bacterial species in a sample directly correlate with the number of copies of at least one gene sequence detected in said sample. It is thereby possible to determine the presence of at least one of the bacterial species from table 1, or the absence of at least one of the bacterial species from table 2, simply by detecting the absence of at least one bacterial gene from said species.

[0037] The invention therefore enables assessing reduced gut bacterial diversity in a subject, without the need for complex and tedious statistical analysis. Moreover, because the method of the invention can rely on as little as one bacterial gene as a marker, it may be implemented by any known technique of DNA amplification or sequencing, and is not limited to a specific method or apparatus.

[0038] According to a preferred embodiment of the invention, the method for determining whether a subject has a reduced gut bacterial diversity comprises a step of detecting from a gut microbial DNA sample obtained from said subject whether at least one gene from at least one bacterial species from Table 1 is absent in said sample. Alternatively, the said method comprises a step of detecting from a gut microbial DNA sample obtained from said subject whether at least one gene from at least one bacterial species from Table 2 is present in said sample. Preferably, the method of the invention comprises a step of detecting from a gut microbial DNA sample obtained from said subject if at least one gene from at least one bacterial species from Table 1 is absent in said sample and at least one gene from at least one bacterial species from Table 2 is present in said sample.

[0039] Another preferred embodiment of the invention is a method for determining whether a subject has a reduced gut bacterial diversity, said method comprising:
[0040] a) detecting from a gut microbial DNA sample obtained from said subject whether at least one gene from at least one bacterial species from Table 1 is absent in said sample, and
[0041] b) determining that the subject has a reduced gut bacterial diversity, if at least one gene from at least one bacterial species from Table 1 is absent in said sample.

[0042] Yet another preferred embodiment of the invention is a method for determining whether a subject has a reduced gut bacterial diversity, said method comprising:
[0043] a) detecting from a gut microbial DNA sample obtained from said subject whether at least one gene from at least one bacterial species from Table 2 is present in said sample, and
[0044] b) determining that the subject has a reduced gut bacterial diversity, if at least one gene from at least one bacterial species from Table 2 is present in said sample.

[0045] In a preferred embodiment, the bacterial genes sequences of the bacterial cluster according to the invention are chosen in the list consisting of sequence SEQ ID NO.1 to sequence SEQ ID NO. 2900.

[0046] Depending on the size of the sample and of the occurrence of the bacterial genes of interest, certain bacterial genes may be difficult to detect in a sample. The skilled person would thus easily conceive that, to increase the confidence of the results, it is advantageous to determine the absence of a bacterial species by detecting the average abundance of several bacterial genes from a bacterial species.

[0047] In an embodiment, detecting whether at least one bacterial gene from at least a bacterial species from table 1 is absent in said sample comprises determining the number of copies of at least 1, 2, 3, 4 or 5 bacterial gene from said bacterial species in the sample. In a preferred embodiment, detecting whether at least one bacterial gene from at least one bacterial species from table 1 is absent in said sample comprises determining the number of copies of at least 10, 20, 30, 40 or at least 50 bacterial genes from said bacterial species in the sample.

[0048] Moreover, among all of the bacterial genes, some bacterial species are more significantly correlated with reduced gut bacterial diversity than others. The detection of the presence or absence of the more correlated bacterial species can advantageously enable determining reduced gut bacterial diversity with a much better sensitivity than the methods of the prior art. For example, as shown in the experimental part, the detection of the presence or absence of one of the bacterial species HL-1, HL-57, HL-53, HL-4, HL-54, HL-2, HL-3, HL-8, HL-10, HL-45, HL-22, HL-26, HL-9, HL-5, HL-11, HL-14, HL-13, HL-18, HL-12 or HL-21 enables the detection of reduced bacterial diversity in a subject with an AUC superior to 0.83. It is thereby possible to increase the sensitivity of the method of the invention, simply by assessing the presence or absence of those specific bacterial species, or of a least one gene from the specific bacterial species they belong to.

[0049] In an advantageous embodiment, the method of the invention comprises a step of detecting from a gut microbial DNA sample obtained from said subject whether at least one gene from a bacterial species chosen from the list consisting in HL-1, HL-57, HL-53, HL-4, HL-54, HL-2, HL-3, HL-8, HL-10, HL-45, HL-22, HL-26, HL-9, HL-5, HL-11, HL-14, HL-13, HL-18, HL-12 HL-21 from table 1 is absent in said sample.

[0050] In a particularly advantageous embodiment, the method of the invention comprises a step of detecting from a gut microbial DNA sample obtained from said subject whether at least one gene from the bacterial species HL-1 from table 1 is absent in said sample. The person skilled in the art knows that the more distinct bacterial species from Table 1 are present in the bacterial DNA from the feces of the subject, and the more distinct bacterial species from Table 2 are absent from the bacterial DNA from the feces of the subject the higher the probability that the subjects has a reduced gut bacterial diversity. It would then be obvious to the skilled person that the sensitivity of the method of the invention can be increased by assessing the presence or absence of bacterial genes from several different bacterial species from Table 1 and/or table 2. It is then possible to increase the sensitivity of the method by using bacterial genes from a linear combination of 2, 3, 4, 5 or more different bacterial species. For exemple, the combinations of 2 bacterial species from Table 1 and/or 2 enable AUC between around 0.736 and 0.955, the combinations of 3 bacterial species from Table 1 and/or 2 enable AUC between around 0.734 and 0.966, and the combinations of 4 bacterial species from Table 1 and/or 2 enable AUC between around 0.734 and 0.975. However, the inventors have surprisingly discovered that the detection of specific combinations of 2, 3 or 4 bacterial species enables for very high AUC. The more advantageous combinations of 2, 3 and 4 bacterial species are indicated in table 7, 8 and 9 respectively.

[0051] In a prefered embodiment, the method of the invention comprises a step of detecting from a gut microbial DNA sample obtained from said subject whether at least one gene from each of the bacterial species of any of the bacterial species combinations indicated in table 7, 8 and/or 9 is absent and/or present in said sample.

[0052] The person skilled in the art will notice that the bacterial species combinations indicated in table 7, 8 and/or 9 are combinations of bacterial species indicated in tables 1 and 2. Therefore, the person skilled in the art will obviously understand that, detecting whether at least one gene from each of the bacterial species of a bacterial species combination indicated in table 7, 8 and/or 9 is absent and/or present in said sample corresponds to detecting wether
[0053] at least one gene from each of the bacterial species of said combination, wherein said bacterial species is also indicated in table 1, is absent and
[0054] at least one gene from each of the bacterial species of said combination, wherein said bacterial species is also indicated in table 2, is present,

[0055] in said sample.

[0056] The inventors have additionally selected bacterial species combinations of 2 to 20 bacterial species that enables for particularly important AUC, indicated in table 10, ranging from 0.955 to 0.982. Therefore, it is possible to achieve a great sensitivity by simply assessing the presence or absence of at least one bacterial gene from each of the bacterial species from a specific combination.

[0057] In an advantageous embodiment, the method of the invention comprises a step of detecting from a gut microbial DNA sample obtained from said subject whether:
[0058] at least one gene from each of the bacterial species HL-1 and HL-5 from table 1 are absent in said sample, or;
[0059] at least one gene from each of the bacterial species HL-10, HL-1 and HL-5 from table 1 are absent in said sample, or;
[0060] at least one gene from each of the bacterial species HL-8, HL-3, HL-53 and HL-26 from table 1 are absent in said sample, or;
[0061] at least one gene from each of the bacterial species HL-10, HL-26, HL-8, HL-53 and HL-3 from table 1 are absent in said sample, or;
[0062] at least one gene from each of the bacterial species HL-53, HL-8, HL-13, HL-3, HL-26 and HL-37 from table 1 are absent in said sample, or;
[0063] at least one gene from each of the bacterial species HL-37, HL-26, HL-10, HL-8, HL-21, HL-53 and HL-11 from table 1 are absent in said sample, or;
[0064] at least one gene from each of the bacterial species HL-10, HL-5, HL-26, HL-25, HL-53, HL-22, HL-8 and HL-17 from table 1 are absent in said sample, or;
[0065] at least one gene from each of the bacterial species HL-26, HL-37, HL-21, HL-10, HL-5, HL-17, HL-16, HL-8 and HL-3 from table 1 are absent in said sample, or;
[0066] at least one gene from each of the bacterial species HL-11, HL-27, HL-35, HL-8, HL-22, HL-47, HL-26, HL-10 and HL-37 from table 1 are absent, and at least one gene from the bacterial species HL-15 from table 2 is present, in said sample;
[0067] at least one gene from each of the bacterial species HL-28, HL-21, HL-5, HL-27, HL-26, HL-17, HL-3, HL-40, HL-37 and HL-25 from table 1 are absent, and at least one gene from the bacterial species HL-38 from table 2 is present, in said sample;
[0068] at least one gene from each of the bacterial species HL-8, HL-45, HL-35, HL-53, HL-17, HL-26, HL-3, HL-18, HL-10, HL-37 and HL-40 from table 1 are absent, and at least one gene from the bacterial species HL-15 from table 2 is present, in said sample;
[0069] at least one gene from each of the bacterial species HL-33, HL-13, HL-10, HL-28, HL-36, HL-17, HL-8, HL-3, HL-22, HL-53, HL-35, HL-5 and HL-27 from table 1 are absent in said sample, or;
[0070] at least one gene from each of the bacterial species HL-56, HL-17, HL-21, HL-35, HL-40, HL-26, HL-12, HL-13, HL-45, HL-3, HL-5, HL-10, HL-8 and HL-27 from table 1 are absent in said sample, or;
[0071] at least one gene from each of the bacterial species HL-31, HL-11, HL-25, HL-10, HL-35, HL-12, HL-28, HL-37, HL-5, HL-33, HL-17, HL-51, HL-27 and HL-40 from table 1 are absent, and at least one gene from the bacterial species HL-15 from table 2 is present, in said sample;
[0072] at least one gene from each of the bacterial species L-33, HL-51, HL-39, HL-27, HL-56, HL-31, HL-23, HL-10, HL-18, HL-4, HL-11, HL-8, HL-21, HL-45, HL-5 and HL-17 from table 1 are absent in said sample, or;
[0073] at least one gene from each of the bacterial species HL-45, HL-27, HL-47, HL-5, HL-51, HL-8, HL-26, HL-3, HL-53, HL-37, HL-13, HL-11, HL-17, HL-23, HL-1 and HL-28 from table 1 are absent, and at least one gene from the bacterial species HL-38 from table 2 is present, in said sample;
[0074] at least one gene from each of the bacterial species HL-31, HL-11, HL-33, HL-28, HL-36, HL-21, HL-22, HL-4, HL-37, HL-45, HL-27, HL-15, HL-51, HL-8 and HL-17 from table 1 are absent, and at least one gene from each of the bacterial species HL-49, HL-38 and HL-56 from table 2 are present, in said sample;
[0075] at least one gene from each of the bacterial species, HL-18, HL-56, HL-28, HL-36, HL-45, HL-17, HL-35, HL-33, HL-11, HL-5, HL-8, HL-10, HL-12, HL-25 and HL-22 from table 1 are absent, and at least one gene from each of the bacterial species HL-39, HL-49, HL-7 and HL-15 from table 2 are present, in said sample;
[0076] at least one gene from each of the bacterial species HL-47, HL-5, HL-36, HL-37, HL-35, HL-44, HL-11, HL-8, HL-17, HL-31, HL-18, HL-13, HL-21, HL-51, HL-4, HL-28, HL-45, HL-33 and HL-3 from table 1 are absent, and at least one gene from the bacterial species HL-15 from table 2 is present, in said sample.

[0077] A bacterial gene is absent from the sample when its number of copies in the sample is inferior to a certain threshold value. Accordingly, a bacterial gene is present in the sample when its number of copies in the sample is inferior to a certain threshold value.

[0078] According to the present invention, a “threshold value” is intended to mean a value that permits to discriminate samples in which the number of copies of the bacterial gene of interest is low or high.

[0079] In particular, if a number of copies of a bacterial gene of interest is inferior or equal to the threshold value, then the number of copies of this bacterial gene in the sample is considered low, whereas if the number of copies is superior to the threshold value, then the number of copies of this bacterial gene in the sample is considered high. A low copy number means that the bacterial gene is absent from the sample, whereas a high number of copies means that the bacterial gene is present in the sample.

[0080] For each gene, and depending on the method used for measuring the number of copies of the bacterial gene, the optimal threshold value may vary. However, it may be easily determined by a skilled person based on the analysis of the microbiome of several individuals in which the number of copies (low or high) is known for this particular bacterial gene, and on the comparison thereof with the number of copies of a control gene. Such a comparison may be facilitated by using the same amount of bacterial DNA for each of the analyzed samples, or by dividing the number of copies of the bacterial gene obtained, by the initial amount of bacterial DNA used in the test. Indeed, it is well known from the skilled person that the total amount of bacteria in the gut of a subject, and consequently in its feces, remains the same even in the case of reduced bacterial diversity. It is also possible to use a reference such as a gut bacterial species whose abundance is known not to vary between individuals with reduced and normal bacterial diversity.

[0081] According to the invention, determining the number of copies of at least one bacterial gene in a sample obtained from the subject can be achieved by any technique capable of detecting and quantifying nucleic acids sequences, and include inter alia hybridization with a labelled probe, PCR amplification, sequencing, and all other methods known to the person of skills in the art.

[0082] In a first embodiment, determining the number of copies of at least one bacterial gene in a sample obtained from the subject is performed using sequencing. Optionally, DNA is be fragmented, for example by restriction nuclease prior to sequencing. Sequencing is done using any technique known in the state of the art, including sequencing by ligation, pyrosequencing, sequencing-by-synthesis or single-molecule sequencing. Sequencing also includes PCR-Based techniques, such as for example quantitative PCR or emulsion PCR.

[0083] Sequencing is performed on the entire DNA contained in the biological sample, or on portions of the DNA contained in the biological sample. It will be immediately clear to the skilled person that the said sample contains at least a mixture of bacterial DNA and of human DNA from the host subject. However, though the overall bacterial DNA is likely to represent the major fraction of the total DNA present in the sample, each bacterial species may only represent a small fraction of the total DNA present in the sample.

[0084] To overcome this difficulty, the skilled person can use a method that allows the quantitative genotyping of sequences obtained from the biological sample with high precision. In one embodiment of this approach, the precision is achieved by analysis of a large number (for example, millions or billions) of polynucleotides. Furthermore, the precision can be enhanced by the use of massively parallel DNA sequencing, such as, but not limited to that performed by the Illumina Genome Analyzer platform (Bentley et al. Nature; 456: 53-59, 2008), the Roche 454 platform (Margulies et al. Nature; 437: 376-380, 2005), the ABI SOLiD platform (McKernan et al., Genome Res; 19: 1527-1541, 2009), the Helicos single molecule sequencing platform (Harris et al. Science; 320: 106-109, 2008), real-time sequencing using single polymerase molecules (Science; 323: 133-138, 2009), Ion Torrent sequencing (WO 2010/008480; Rothberg et al., Nature, 475: 348-352, 2011) and nanopore sequencing (Clarke J et al. Nat Nanotechnol.; 4: 265-270, 2009).

[0085] When the skilled person relies on sequencing methods to detect the presence or absence of certain bacterial genes, the information collected from sequencing is used to determine the number of copies of nucleic acid sequences of interest via bioinformatics procedures. For example, in an embodiment, the nucleic acid sequences of said bacterial species in the gut bacterial DNA sample are identified in the global sequencing data by comparison with the nucleic acid sequences SEQ ID NO.1 to SEQ ID NO. 2900. This comparison is advantageously based on the level of sequence identity with the sequences SEQ ID NO.1 to SEQ ID NO. 2900.

[0086] Thus, a nucleic acid sequence displaying at least 90%, at least 95%, at least 96%, at least 97%, at least 98%, at least 99%, or 100% identity with at least one of the nucleic acid sequences SEQ ID NO. 1 to SEQ ID NO. 2900 is identified as a sequence comprised in one of the bacterial species of the invention.

[0087] Thus, in a preferred embodiment, detecting whether at least one bacterial species from table 1 is absent and/or at least one species from table 2 is present in said sample comprises determining the number of nucleic acid sequences in the gut bacterial DNA sample having at least 90%, at least 95%, at least 96%, at least 97%, at least 98%, at least 99%, or 100% identity with at least one of the nucleic acid sequences SEQ ID NO. 1 to SEQ ID NO. 2900.

[0088] The term “sequence identity” herein refers to the identity between two nucleic acids sequences. Identity between sequences can be determined by comparing a position in each of the sequences which may be aligned for the purposes of comparison. When a position in the compared sequences is occupied by the same base, then the sequences are identical at that position. A degree of sequence identity between nucleic acid sequences is a function of the number of identical nucleotides at positions shared by these sequences.

[0089] To determine the percent identity of two amino acids sequences, the sequences are aligned for optimal comparison. For example, gaps can be introduced in the sequence of a first nucleic acid sequence for optimal alignment with the second nucleic acid sequence. The nucleotides at corresponding nucleotide positions are then compared. When a position in the first sequence is occupied by the same nucleotide as the corresponding position in the second sequence, the molecules are identical at that position. The percent identity between the two sequences is a function of the number of identical positions shared by the sequences. Hence % identity=number of identical positions/total number of overlapping positions×100.

[0090] In this comparison the sequences can be the same length or can be different in length. Optimal alignment of sequences for determining a comparison window may be conducted by the local homology algorithm of Smith and Waterman (J. Theor. Biol., 91(2): 370-380, 1981), by the homology alignment algorithm of Needleman and Wunsch (J. Mol. Biol, 48(3): 443-453, 1972), by the search for similarity via the method of Pearson and Lipman (Proc. Natl. Acad. Sci. U.S.A., 85(5): 2444-2448, 1988), by computerized implementations of these algorithms (GAP, BESTFIT, FASTA and TFASTA in the Wisconsin Genetics Software Package Release 7.0, Genetic Computer Group, 575, Science Drive, Madison, Wis.) or by inspection. The best alignment (i.e. resulting in the highest percentage of identity over the comparison window) generated by the various methods is selected.

[0091] The term “sequence identity” thus means that two polynucleotide sequences are identical (i.e. on a nucleotide by nucleotide basis) over the window of comparison. The term “percentage of sequence identity” is calculated by comparing two optimally aligned sequences over the window of comparison, determining the number of positions at which the identical nucleic acid base (e.g. A, T, C, G, U, or I) occurs in both sequences to yield the number of matched positions, dividing the number of matched positions by the total number of positions in the window of comparison (i.e. the window size) and multiplying the result by 100 to yield the percentage of sequence identity. The same process can be applied to polypeptide sequences. The percentage of sequence identity of a nucleic acid sequence or an amino acid sequence can also be calculated using BLAST software (Version 2.06 of September 1998) with the default or user defined parameter.

[0092] In another preferred embodiment, PCR-based techniques are used to determine the number of copies of at least one bacterial gene. Preferably, the PCR technique used quantitatively measures starting amounts of DNA, cDNA, or RNA. Examples of PCR-based techniques according to the invention include techniques such as, but not limited to, quantitative PCR (Q-PCR), reverse-transcriptase polymerase chain reaction (RT-PCR), quantitative reverse-transcriptase PCR (QRT-PCR), rolling circle amplification (RCA) or digital PCR. These techniques are well known and easily available technologies for those skilled in the art and do not need a precise description. In a preferred embodiment, the determination of the copy number of the bacterial genes of the invention is performed by quantitative PCR.

[0093] Amplification primers specific for the genes to be tested are thus also very useful for performing the methods according to the invention. The present invention thus also encompasses primers for amplifying at least one gene selected from the genes of sequence SEQ ID NO. 1-2900.

[0094] In another preferred embodiment, the presence or absence of the bacterial genes according to the invention is detected by the use of a nucleic microarray.

[0095] According to the invention, a “nucleic microarray” consists of different nucleic acid probes that are attached to a substrate, which can be a microchip, a glass slide or a microsphere-sized bead. A microchip may be constituted of polymers, plastics, resins, polysaccharides, silica or silica-based materials, carbon, metals, inorganic glasses, or nitrocellulose. Probes can be nucleic acids such as cDNAs (“cDNA microarray”) or oligonucleotides (“oligonucleotide microarray”), and the oligonucleotides may be about 25 to about 60 base pairs or less in length.

[0096] To determine the copy number of a target nucleic sample, said sample is labelled, contacted with the microarray in hybridization conditions, leading to the formation of complexes between target nucleic acids that are complementary to probe sequences attached to the microarray surface. The presence of labelled hybridized complexes is then detected. Many variants of the microarray hybridization technology are available to the man skilled in the art.

[0097] In a specific embodiment, the nucleic microarray is an oligonucleotide microarray comprising at least one oligonucleotide specific for at least one gene having a sequence selected from SEQ ID NOs 1-2900. Preferably, the said microarray comprises at least 58 oligonucleotides, each oligonucleotide being specific for one gene of a distinct cluster of the invention. More preferably, the microarray of the invention consists of 2900 oligonucleotides specific for each of the genes of sequences SEQ ID NOs. 1-2900.

[0098] In another embodiment, the nucleic microarray is an oligonucleotide microarray comprising at least one oligonucleotide specific for at least one gene of each of the bacterial species HL-10, HL-1 and HL-5. Preferably, the nucleic microarray is an oligonucleotide microarray comprising or consisting in oligonucleotides specific for at least 2, 3, 4, 5, 10, 20, 30 or 40 genes of each of the bacterial species HL-10, HL-1 and HL-5.

[0099] In another embodiment, the nucleic microarray is an oligonucleotide microarray comprising at least one oligonucleotide specific for at least one gene of each of the bacterial species HL-8, HL-3, HL-53 and HL-26. Preferably, the nucleic microarray is an oligonucleotide microarray comprising or consisting in oligonucleotides specific for at least 2, 3, 4, 5, 10, 20, 30 or 40 genes of each of the bacterial species HL-8, HL-3, HL-53 and HL-26.

[0100] In another embodiment, the nucleic microarray is an oligonucleotide microarray comprising at least one oligonucleotide specific for at least one gene of each of the bacterial species HL-10, HL-26, HL-8, HL-53 and HL-3. Preferably, the nucleic microarray is an oligonucleotide microarray comprising or consisting in oligonucleotides specific for at least 2, 3, 4, 5, 10, 20, 30 or 40 genes of each of the bacterial species HL-10, HL-26, HL-8, HL-53 and HL-3.

[0101] In another embodiment, the nucleic microarray is an oligonucleotide microarray comprising at least one oligonucleotide specific for at least one gene of each of the bacterial species HL-53, HL-8, HL-13, HL-3, HL-26 and HL-37. Preferably, the nucleic microarray is an oligonucleotide microarray comprising or consisting in oligonucleotides specific for at least 2, 3, 4, 5, 10, 20, 30 or 40 genes of each of the bacterial species HL-53, HL-8, HL-13, HL-3, HL-26 and HL-37.

[0102] In another embodiment, the nucleic microarray is an oligonucleotide microarray comprising at least one oligonucleotide specific for at least one gene of each of the bacterial species HL-37, HL-26, HL-10, HL-8, HL-21, HL-53 and HL-11. Preferably, the nucleic microarray is an oligonucleotide microarray comprising or consisting in oligonucleotides specific for at least 2, 3, 4, 5, 10, 20, 30 or 40 genes of each of the bacterial species HL-37, HL-26, HL-10, HL-8, HL-21, HL-53 and HL-11.

[0103] In another embodiment, the nucleic microarray is an oligonucleotide microarray comprising at least one oligonucleotide specific for at least one gene of each of the bacterial species HL-10, HL-5, HL-26, HL-25, HL-53, HL-22, HL-8 and HL-17. Preferably, the nucleic microarray is an oligonucleotide microarray comprising or consisting in oligonucleotides specific for at least 2, 3, 4, 5, 10, 20, 30 or 40 genes of each of the bacterial species HL-10, HL-5, HL-26, HL-25, HL-53, HL-22, HL-8 and HL-17.

[0104] In another embodiment, the nucleic microarray is an oligonucleotide microarray comprising at least one oligonucleotide specific for at least one gene of each of the bacterial species HL-26, HL-37, HL-21, HL-10, HL-5, HL-17, HL-16, HL-8 and HL-3 Preferably, the nucleic microarray is an oligonucleotide microarray comprising or consisting in oligonucleotides specific for at least 2, 3, 4, 5, 10, 20, 30 or 40 genes of each of the bacterial species HL-26, HL-37, HL-21, HL-10, HL-5, HL-17, HL-16, HL-8 and HL-3.

[0105] In another embodiment, the nucleic microarray is an oligonucleotide microarray comprising at least one oligonucleotide specific for at least one gene of each of the bacterial species HL-11, HL-15 HL-27, HL-35, HL-8, HL-22, HL-47, HL-26, HL-10 and HL-37. Preferably, the nucleic microarray is an oligonucleotide microarray comprising or consisting in oligonucleotides specific for at least 2, 3, 4, 5, 10, 20, 30 or 40 genes of each of the bacterial species HL-11, HL-15, HL-27, HL-35, HL-8, HL-22, HL-47, HL-26, HL-10 and HL-37.

[0106] In another embodiment, the nucleic microarray is an oligonucleotide microarray comprising at least one oligonucleotide specific for at least one gene of each of the bacterial species HL-28, HL-21, HL-5, HL-27, HL-26, HL-17, HL-3, HL-40, HL-37 HL-25 and HL-38. Preferably, the nucleic microarray is an oligonucleotide microarray comprising or consisting in oligonucleotides specific for at least 2, 3, 4, 5, 10, 20, 30 or 40 genes of each of the bacterial species HL-28, HL-21, HL-5, HL-27, HL-26, HL-17, HL-3, HL-40, HL-37 HL-25 and HL-38.

[0107] In another embodiment, the nucleic microarray is an oligonucleotide microarray comprising at least one oligonucleotide specific for at least one gene of each of the bacterial species HL-8, HL-45, HL-35, HL-53, HL-17, HL-26, HL-3, HL-18, HL-10, HL-37, HL-40 and HL-15. Preferably, the nucleic microarray is an oligonucleotide microarray comprising or consisting in oligonucleotides specific for at least 2, 3, 4, 5, 10, 20, 30 or 40 genes of each of the bacterial species HL-8, HL-45, HL-35, HL-53, HL-17, HL-26, HL-3, HL-18, HL-10, HL-37, HL-40 and HL-15.

[0108] In another embodiment, the nucleic microarray is an oligonucleotide microarray comprising at least one oligonucleotide specific for at least one gene of each of the bacterial species HL-33, HL-13, HL-10, HL-28, HL-36, HL-17, HL-8, HL-3, HL-22, HL-53, HL-35, HL-5 and HL-27. Preferably, the nucleic microarray is an oligonucleotide microarray comprising or consisting in oligonucleotides specific for at least 2, 3, 4, 5, 10, 20, 30 or 40 genes of each of the bacterial species HL-33, HL-13, HL-10, HL-28, HL-36, HL-17, HL-8, HL-3, HL-22, HL-53, HL-35, HL-5 and HL-27.

[0109] In another embodiment, the nucleic microarray is an oligonucleotide microarray comprising at least one oligonucleotide specific for at least one gene of each of the bacterial species HL-56, HL-17, HL-21, HL-35, HL-40, HL-26, HL-12, HL-13, HL-45, HL-3, HL-5, HL-10, HL-8 and HL-27. Preferably, the nucleic microarray is an oligonucleotide microarray comprising or consisting in oligonucleotides specific for at least 2, 3, 4, 5, 10, 20, 30 or 40 genes of each of the bacterial species HL-56, HL-17, HL-21, HL-35, HL-40, HL-26, HL-12, HL-13, HL-45, HL-3, HL-5, HL-10, HL-8 and HL-27.

[0110] In another embodiment, the nucleic microarray is an oligonucleotide microarray comprising at least one oligonucleotide specific for at least one gene of each of the bacterial species HL-31, HL-11, HL-25, HL-10, HL-35, HL-12, HL-28, HL-37, HL-5, HL-33, HL-17, HL-51, HL-27, HL-40 and HL-15. Preferably, the nucleic microarray is an oligonucleotide microarray comprising or consisting in oligonucleotides specific for at least 2, 3, 4, 5, 10, 20, 30 or 40 genes of each of the bacterial species HL-31, HL-11, HL-25, HL-10, HL-35, HL-12, HL-28, HL-37, HL-5, HL-33, HL-17, HL-51, HL-27, HL-40 and HL-15.

[0111] In another embodiment, the nucleic microarray is an oligonucleotide microarray comprising at least one oligonucleotide specific for at least one gene of each of the bacterial species L-33, HL-51, HL-39, HL-27, HL-56, HL-31, HL-23, HL-10, HL-18, HL-4, HL-11, HL-8, HL-21, HL-45, HL-5 and HL-17. Preferably, the nucleic microarray is an oligonucleotide microarray comprising or consisting in oligonucleotides specific for at least 2, 3, 4, 5, 10, 20, 30 or 40 genes of each of the bacterial species L-33, HL-51, HL-39, HL-27, HL-56, HL-31, HL-23, HL-10, HL-18, HL-4, HL-11, HL-8, HL-21, HL-45, HL-5 and HL-17.

[0112] In another embodiment, the nucleic microarray is an oligonucleotide microarray comprising at least one oligonucleotide specific for at least one gene of each of the bacterial species HL-45, HL-27, HL-47, HL-5, HL-51, HL-8, HL-26, HL-3, HL-53, HL-37, HL-13, HL-11, HL-17, HL-23, HL-1 and HL-28. Preferably, the nucleic microarray is an oligonucleotide microarray comprising or consisting in oligonucleotides specific for at least 2, 3, 4, 5, 10, 20, 30 or 40 genes of each of the bacterial species HL-45, HL-27, HL-47, HL-5, HL-51, HL-8, HL-26, HL-3, HL-53, HL-37, HL-13, HL-11, HL-17, HL-23, HL-1 and HL-28.

[0113] In another embodiment, the nucleic microarray is an oligonucleotide microarray comprising at least one oligonucleotide specific for at least one gene of each of the bacterial species HL-31, HL-11, HL-33, HL-28, HL-36, HL-21, HL-22, HL-4, HL-37, HL-45, HL-27, HL-15, HL-51, HL-8 and HL-17. Preferably, the nucleic microarray is an oligonucleotide microarray comprising or consisting in oligonucleotides specific for at least 2, 3, 4, 5, 10, 20, 30 or 40 genes of each of the bacterial species HL-31, HL-11, HL-33, HL-28, HL-36, HL-21, HL-22, HL-4, HL-37, HL-45, HL-27, HL-15, HL-51, HL-8 and HL-17.

[0114] In another embodiment, the nucleic microarray is an oligonucleotide microarray comprising at least one oligonucleotide specific for at least one gene of each of the bacterial species HL-18, HL-56, HL-28, HL-36, HL-45, HL-17, HL-35, HL-33, HL-11, HL-5, HL-8, HL-10, HL-12, HL-25, HL-22, HL-39, HL-49, HL-7 and HL-15. Preferably, the nucleic microarray is an oligonucleotide microarray comprising or consisting in oligonucleotides specific for at least 2, 3, 4, 5, 10, 20, 30 or 40 genes of each of the bacterial species HL-18, HL-56, HL-28, HL-36, HL-45, HL-17, HL-35, HL-33, HL-11, HL-5, HL-8, HL-10, HL-12, HL-25, HL-22, HL-39, HL-49, HL-7 and HL-15.

[0115] In another embodiment, the nucleic microarray is an oligonucleotide microarray comprising at least one oligonucleotide specific for at least one gene of each of the bacterial species HL-47, HL-5, HL-36, HL-37, HL-35, HL-44, HL-11, HL-8, HL-17, HL-31, HL-18, HL-13, HL-21, HL-51, HL-4, HL-28, HL-45, HL-33, HL-3 and HL-15. Preferably, the nucleic microarray is an oligonucleotide microarray comprising or consisting in oligonucleotides specific for at least 2, 3, 4, 5, 10, 20, 30 or 40 genes of each of the bacterial species HL-47, HL-5, HL-36, HL-37, HL-35, HL-44, HL-11, HL-8, HL-17, HL-31, HL-18, HL-13, HL-21, HL-51, HL-4, HL-28, HL-45, HL-33, HL-3 and HL-15.

[0116] Said microarray may further comprise at least one oligonucleotide for detecting at least one gene of at least one control bacterial species. A convenient bacterial species may be e.g. a bacterial species whose abundance does not vary between individuals with a reduced bacterial diversity and individuals with normal bacterial diversity. Preferably, the oligonucleotides are about 50 bases in length.

[0117] Suitable microarray oligonucleotides specific for any gene of SEQ ID NOs. 1-2900 may be designed, based on the genomic sequence of each gene, using any method of microarray oligonucleotide design known in the art. In particular, any available software developed for the design of microarray oligonucleotides may be used, such as, for instance, the OligoArray software (available at http://berry.engin.umich.edu/oligoarray/), the GoArrays software (available at http://www.isima.fr/bioinfo/goarrays/), the Array Designer software (available at http://www.premierbiosoft.com/dnamicroarray/index.html), the Primer3 software (available at http://frodo.wi.mit.edu/primer3/primer3_code.html), or the Promide software (available at http://oligos.molgen.mpg.de/).

[0118] The invention further concerns a kit for the in vitro determination of the reduced gut bacterial diversity phenotype, comprising at least one reagent for the determination of the copy number of at least one gene having a sequence selected from SEQ ID NOs. 1-2900. By “a reagent for the determination of the copy number of at least one gene”, it is meant a reagent which specifically allows for the determination of the copy number of the said gene, i.e. a reagent specifically intended for the specific determination of the copy number of at least one gene having a sequence selected from SEQ ID NOs. 1-2900. This definition excludes generic reagents useful for the determination of the expression level of any gene, such as Taq polymerase or an amplification buffer, although such reagents may also be included in a kit according to the invention. Such a reagent for the determination of the copy number of at least one gene can be for example a dedicated microarray as described above or amplification primers specific for at least one gene having a sequence selected from SEQ ID NOs. 1-2900. The present invention thus also relates to a kit for the in vitro determination of the reduced gut bacterial diversity phenotype, said kit comprising a dedicated microarray as described above or amplification primers specific for at least one gene having a sequence selected from SEQ ID NOs. 1-2900. Here also, when the kit comprises amplification primers, while said kit may comprise amplification primers specific for other genes, said kit preferably comprises at most 100, at most 75, 50, at most 40, at most 30, preferably at most 25, at most 20, at most 15, more preferably at most 10, at most 8, at most 6, even more preferably at most 5, at most 4, at most 3 or even 2 or one or even zero couples of amplification primers specific for other genes than the genes of sequences SEQ ID NOs 1-2900. For example, said kit may comprise at least a couple of amplification primers for at least one gene in addition to the primers for at least one gene having a sequence selected from SEQ ID NOs. 1-2900.

[0119] Such a kit for the in vitro determination of the reduced gut bacterial diversity phenotype may further comprise instructions for detection of the presence or absence of a responsive phenotype.

[0120] The inventors have also discovered that a low gut microbiome profile is associated with traits underlying metabolic disorders.

[0121] The inventors have compared the features of normal subjects, having a high gene count, and subjects with a reduced gut bacterial diversity, having a low gene count, and identified that the low gene count individuals, who accounted for 23% of the total study population, included a significantly higher proportion of the obese and were characterized by a more marked adiposity, as reflected by an increase in body mass index (BMI) and fat percentage. The inventors have discovered that the adiposity phenotype of low gene count individuals was associated with elevated serum leptin, decreased serum adiponectin, insulin resistance, hyperinsulinaemia, elevated levels of triglycerides and free fatty acids and a more marked inflammatory phenotype (increased C reactive protein (CRP) and elevated white blood cell count) than seen in high gene count individuals. Circulating fasting induced adipose factor (FIAF) was significantly elevated in the low gene count group—also when adjusting for BMI. These analyses indicate that the phenotypic differences of low gene count and high gene count individuals are consistent with a series of risk markers for metabolic disorders such as type II diabetes, hyperglycemic syndrome, heart diseases, insulin resistance or hepatic stasis.

[0122] The invention therefore also relates to a method to assess the risk of a subject of developing metabolic disorders, preferentially type II diabetes, hyperglycemic syndrome, heart diseases, insulin resistance or hepatic stasis, and comprising the steps of:
[0123] a) Determining whether said subject has a reduced gut bacterial diversity with a method of the invention;
[0124] b) If the subject has a reduced gut bacterial diversity, assessing the risk for said subject to develop said metabolic disorders.

[0125] Moreover, it is known from the art that a reduced gut bacterial diversity is correlated to immune disorders. In particular, it has been shown that a reduced gut bacterial diversity is associated with sensitivity to nosocomial pathogens in elderly, allergic asthma in neonatal subjects, atopic dermatitis and type I diabetes.

[0126] The invention therefore also relates to a method to assess the risk of a subject of developing immune disorders, preferentially sensitivity to nosocomial pathogens in elderly, allergic asthma in neonatal subjects, atopic dermatitis or type I diabetes, and comprising the steps of:
[0127] a) Determining whether said subject has a reduced gut bacterial diversity with a method of the invention;
[0128] b) If the subject has a reduced gut bacterial diversity, assessing the risk for said subject to develop said immune disorders.

[0129] The practice of the invention employs, unless other otherwise indicated, conventional techniques or protein chemistry, molecular virology, microbiology, recombinant DNA technology, and pharmacology, which are within the skill of the art. Such techniques are explained fully in the literature. (See Ausubel et al., Current Protocols in Molecular Biology, Eds., John Wiley & Sons, Inc. New York, 1995; Remington's Pharmaceutical Sciences, 17th ed., Mack Publishing Co., Easton, Pa., 1985; and Sambrook et al., Molecular cloning: A laboratory manual 2nd edition, Cold Spring Harbor Laboratory Press—Cold Spring Harbor, N.Y., USA, 1989). The nomenclatures used in connection with, and the laboratory procedures and techniques of, molecular and cellular biology, protein biochemistry, enzymology and medicinal and pharmaceutical chemistry described herein are those well known and commonly used in the art.

[0130] Having generally described this invention, a further understanding of characteristics and advantages of the invention can be obtained by reference to certain specific examples and figures which are provided herein for purposes of illustration only and are not intended to be limiting unless otherwise specified.

### EXAMPLES

[0131] The abundance of known intestinal bacteria was assessed by mapping of a large number of sequencing reads from total fecal DNA onto a reference set of their genomes. The abundance of genes from the reference catalog of 292 non-obese and obese individuals was assessed.

### Study Population

[0132] Study participants were recruited from the Inter99 study population. The Inter99 study is a randomized, non-pharmacological intervention study for the prevention of ischemic heart disease, and was conducted at the Research Centre for Prevention and Health in Glostrup, Denmark between 1999-2006 (clinicalTrials.gov: NCT00289237)¹. The participants in the Inter99 study were examined at baseline, after 1, 3 and 5 years depending on the type of intervention.

[0133] For the study individuals with body mass index (BMI) below 25 kg/m2 or BMI above 30 kg/m2 at year 5 in the Inter99 study were randomly selected from track records. They had no known gastro-intestinal disease, no previously bariatric surgery, no medications known to affect the immune system and no antibiotics two months prior to fecal sample collection. Individuals with type 2 diabetes at the day of examination where excluded. All together 292 non-diabetic individuals were included in the protocol. All had North European ethnicity. At the time of the current physical examination 96 (33%) of study volunteers were lean with BMI <25 kg/m2, 27 (9%) were overweight with BMI between 25 and 30 kg/m2, and 169 (58%) were obese with BMI >30 kg/m2 according to World Health Organisation (WHO) definition². The study was approved by the local Ethical Committees of the Capital Region of Denmark (HC-2008-017), and was in accordance with the principals of the Declaration of Helsinki. All individuals gave written informed consent before participation in the study.

### Phenotyping

[0134] The participants were examined on two different days approximately 14 days apart. On the first day participants were examined in the morning after an over-night fast. Height was measured without shoes to the nearest 0.5 cm, and weight was measured without shoes and wearing light clothes to the nearest 0.1 kg. Hip and waist circumference were recorded using a non-expandable measuring tape to the nearest 0.5 cm. Waist circumference was measured midway between the lower rib margin and the iliac crest. Hip circumference was measured as the largest circumference between the waist and the thighs. On the second day of examination all participants delivered a stool sample collected at home and Dual-emission X-ray Absorptiometry (DXA) was performed. Analyses of data from DXA scan were conducted with the integrated software (Hologic Discovery A, Santax, USA). Sagittal height was measured at the time of the DXA scan with the use of the Holtain-Kahn abdominal Caliper at the highest point of the abdomen with the participant supine and while breathing out. Participant receiving statins, fibrates and/or ezetimibe were reported as receiving lipid lowering medication.

### Derived Anthropometrical Measure and Indices of Insulin Resistance and Pancreatic Beta-Cell Function

[0135] Intra-abdominal adipose tissue (IAAT, cm²) was calculated using data from DXA scans and anthropometry using the equation³: y=−208.2+4.62 (sagittal diameter, cm)+0.75 (age, years)+1.73 (waist, cm)+0.78 (trunk fat, %)³. Homeostatic model assessment of insulin resistance (HOMA-IR) was calculated as: (fasting plasma glucose (mmol/l)*fasting serum insulin (mU/l))/22.5⁴.

### Biochemical Measurements

[0136] All analyses were performed on blood samples drawn in the morning after an over-night fast from at least 10.00 p.m. the previous evening.

[0137] Plasma glucose was analyzed by a glucose oxidase method (Granutest, Merck, Darmstadt, Germany) with a detection limit of 0.11 mmol/l and intra- and interassay coefficients of variation (CV) of <0.8 and <1.4%, respectively. HbAlc was measured on TOSOH G7 by ion-exchange high performance liquid chromatography.

[0138] Serum insulin (excluding intact proinsulin) was measured using the AutoDELFIA insulin kit (Perkin-Elmer, Wallac, Turku, Finland) with a detection limit of 3 pmol/l and with intra- and interassay CV of <3.2% and <4.5%, respectively. Plasma total cholesterol, plasma HDL-cholesterol and plasma triglycerides were all measured on Vitros 5600 using reflect-spectrophotometrics. Blood leucocytes and white blood cell differential count were measured on Sysmex XS 1000i using flow cytometrics. Plasma alanin aminotransferase (ALT) and plasma total free fatty acids were analyzed using standard biochemical methods (Modular Evo). Plasma high sensitive C− reactive protein (hs-CRP) was analyzed by a particle-enhanced immunoturbidmetric assay on MODULAR Evo using CRPL3 kit (Roche, Mannheim, Germany) with a detection limit of 0.3 mg/l and intra- and inter CV of <4.0% and 6.2%, respectively

[0139] Plasma adiponectin was analyzed using a two-site-sandwich ELISA kit for measuring total human adiponectin (TECO, Sissach, Switzerland). Detection limit was 0.6 ng/ml and interassay and intraassay CV were <6.72% and <4.66%, respectively. Fasting induced adipose factor (FIAF), also termed human angiopoietin like 4 (ANGPLT4) was measured using a quantitative sandwich ELISA (Adipo Bioscience, Santa Clara, USA). Detection limit was 0.6 μg/l and the inter-assay and intra-assay CV were 8% and 4%, respectively. Lipopolysaccharide binding protein was analyzed by a solid phase sandwich ELISA kit (Abnova) with an interassay CV of <17.8% and an intraassay CV of <6.1%. Serum IL-6 and serum TNF-alfa were analysed by Luminex using the Bio-Plex Pro cytokine assay (Bio-Rad), whereas serum leptin was measured using the Bio-Plex Pro diabetes assay.

### Fecal Sampling

[0140] Stool samples were obtained at the homes of each participant and samples were immediately frozen by storing them in their home freezer. Frozen samples were delivered to Steno Diabetes Center using insulating polystyrene foam containers, and stored at −80° C. until analysis. The time span from sampling to delivery at the Steno Diabetes Center was aimed to be as short as possible and no more than 48 hours.

### DNA Extraction

[0141] A frozen aliquot (200 mg) of each fecal sample was suspended in 250 μl of guanidine thiocyanate, 0.1 M Tris (pH 7.5) and 40 μl of 10% N-lauroyl sarcosine. Then, DNA extraction was conducted as previously described^{4,5} . The DNA concentration and its molecular size were estimated by nanodrop (Thermo Scientific) and on agarose gel electrophoresis.

### Illumina Sequencing

[0142] DNA library preparation followed the manufacturer's instruction (Illumina) The workflow indicated by the provider was used to perform cluster generation, template hybridization, isothermal amplification, linearization, blocking and denaturing and hybridization of the sequencing primers. The base-calling pipeline (version IlluminaPipeline-0.3) was used to process the raw fluorescent images and call sequences.

[0143] One library (clone insert size 200 bp) was constructed for each of the first batch of 15 samples; two libraries with different clone insert sizes (135 by and 400 bp) for each of the second batch of 70 samples, and one library (350 bp) for each of the third batch of 207 samples.

[0144] After sequencing, quality control was performed and human genome contaminant was screened. Finally, 26.0-186.1 million high-quality reads were generated for the 292 samples, with an average of 68.2 million high-quality reads. Sequencing read length of the first batch of 15 samples was 44 bp, the second batch was 75 bp, and the third batch was 75 by and 90 bp.

### Sequence Read Mapping on Catalogue Genes

[0145] The high-quality short reads were aligned against the gene catalog using SOAP2.21⁶ by allowing at most two mismatches in the first 35-bp region and 90% identity over the read sequence. The alignment result was filtered and the uniquely -mapped pairs (paired-end reads) were counted for each gene for each sample. To reasonably and sufficiently utilize the alignment result, some of paired-end reads, one end of which was mapped on the end of a gene and the other end was missed but expected to locate on the unassembled gene region or no coding region, would be treated as correct paired-end alignment.

### Gene Counting

[0146] Based on the pair-oriented counting result of each samples, the threshold of 1 read was selected for gene identification, to include the rare genes into the analysis. 91,032-1,005,488 genes were identified for the 292 samples, with an average of 670,528 genes.

### Read Downsizing

[0147] To eliminate the influence of sequencing fluctuation, the alignment results were sampled and the number of mapped pairs was downsized to 11 million for each sample. After that, 59,147-878,816 genes were found for the 292 samples, with an average of 578,512 genes.

### Diversity Estimate by Single Copy Gene Scoring

[0148] Genes belonging to the orthologous groups COG0085, COG0525, and COG0090 from 3,515 prokaryotic genomes were clustered to operational taxonomic units (OTUs) at 95% identity using UCLUST (Edgar, 2010) and used as a reference database. Paired-end Illumina reads from 292 metagenomic samples were mapped at 95% identity cut-off using soap2.21⁶. The numbers of fragments that were assigned to the reference sequences were counted so that each fragment's weight equals 1, i.e. a fragment assigned to N different reference sequences contributes 1/N to each reference sequence. Fragment counts of reference sequences were grouped to yield OTU counts. Samples with low sampling effort, i.e., with less than 3,000 fragments mapped to reference genes were removed leaving 229 samples for comparative analyses. OTU counts were normalized by gene length, scaled by the maximum count across all marker genes, and down-sampled using the vegan package⁷ to the minimum sum of OTU counts across all samples in order to compare species richness between high gene and low gene content groups.

### Phylogenetic Microarray Analysis

[0149] HITChip microarray analyses were performed as described previously⁸. In short, 16S rRNA genes were amplified the T7prom-Bact-27-for and Uni-1492-rev primers from 10 ng from fecal DNA extracts. On these amplicons an in vitro transcription and subsequent labeling with Cy3 and Cy5 dyes were performed. Labeled RNA was fragmented and hybridized on the arrays at 62.5° C. for 16 h in a rotation oven (Agilent Technologies, Amstelveen, The Netherlands). The arrays were washed, dried, scanned, and the signal intensity data was extracted as described (http://www.agilent.com). Microarray data normalization and analysis were carried out with a set of R-based scripts (http://r-project.org), while making use of a custom designed database, which operates under the MySQL database management system (http://www.mysgl.com).

[0150] From the 3,699 unique HITChip probes, the probes that accounted for the top 99.9% of the total signal were selected. These probes were counted for each sample to measure richness, which was between 713 and 1,597 probes per sample. The probes that accounted for the lowest 0.1% of the total signal were regarded as background noise and were not taken into account for further analysis. Probe signal values were used to calculate the inverse Simpson's Diversity index for each sample.

[0151] HITChip probes specificity can be assigned to three phylogenetic levels based on 16S rRNA gene sequence similarity: order-like groups, genus-like groups (sequence similarity >90%), and phylotype-like groups (sequence similarity >98%)⁸. Relative abundances were calculated for each specificity level by summing all signal values of the probes targeting a group and dividing by the total of all probe signals for the corresponding sample. All comparisons between the HGC and LGC individuals were assessed with dependent 2-group Wilcoxon signed rank tests. When statistical tests were performed on a large number of variables the obtained p-values were adjusted by a Bonferroni correction. To place the gene count and BMI marker species (HL and oble, respectively) in HITChip phylogeny, Spearman correlation coefficients were calculated between the metagenomic profiling frequencies and relative abundances of the phylotype-like across 251 samples. A threshold of 0.7 was used to associate 16S to a species.

### Metagenomic Microarray Analysis

[0152] A 2.1 million-feature custom Roche NimbleGen microarray targeting a 700,000 genes subset of the MetaHit human gut gene catalog⁹ was designed and manufactured. The subset of genes was prioritized for genes that were observed in more than 20 of the 124 gene catalog samples. DNA extracted from fecal samples were labeled and hybridized according to standard NimbleGen protocols. Data was preprocessed and Shannon diversity index calculated using the RMA implementation under the “oligo” package and the “vegan”⁷ package, respectively, both available in the statistical programming environment R.

[0153] In order to validate the observed biomarkers for low/high gene counts found by sequencing, the data was compared to DNA microarray signals for the same samples and individuals. Thus, the tracer genes for known and unknown species indicated in FIG. 2 were compared to a microarray gene set comprising more than 700,000 gut-associated genes selected from the MetaHit Gene Catalog⁹ in addition to reference genomes. Perfect matches were found for 129 tracer genes on the DNA microarray. In order to test whether a similar discrimination could be obtained from the microarray data, the samples were divided into low and high diversity sets using the Shannon diversity index. Using this index, 90 samples were categorized as low diversity, while 70 were categorized as high. Differences in DNA abundance signals between low and high diversity samples were tested for the 129 matching genes (t-test). Summarized, in terms of species the following groups were associated to high diversity, Clostridium clostridioforme, Clostridium bolteae, HL-7, HL-39, Ruminococcus gnavus, HL-15, HL-20, and Bacteroides, while HL-53 and Methanobrevibacter smithii were associated to low diversity. These DNA microarray observations support the Quantitative metagenomics results (FIG. 2, Table 7 and table 7b).

### Enterotyping

[0154] For each gut microbial sample, Illumina reads were mapped to a set of 1,506 reference genomes to record genus abundances based on Bergey's taxonomy. A principal coordinate analysis was performed using JSD distance and enterotypes were assigned to each sample as described in¹⁰.

### Phylogenetic Annotation

[0155] Taxonomic assignment of predicted genes for global analysis was carried out using BLASTN to assign reads to a reference genome database at a cut-off of 95% sequence identity and >100 by overlap, unless indicated otherwise. This assignment was used as high confidence assignment on species level. As reference database we used 1,869 available reference genomes from NCBI and the set of draft gastrointestinal genomes from the DACC (http://hmpdacc.org/), both as of the 15.7.2011. The assigned reads to each taxonomic group per sample were rarefied to 5.5 million genes (the size of the smallest sample), on this rarefied matrix taxonomic groups were tested for significant differences in abundance using a Wilcoxon Ranks-Sum test. Multiple testing correction was done by controlling the False Discovery Rate (q<0.05) using the Benjamini-Hochberg method¹¹.

### Functional Annotation

[0156] BLASTP was used to search the protein sequences of the predicted genes in the eggNOG database¹² and KEGG database¹³ with e-value≦1×10−5 as described in⁹, and the NOG/KEGG OG of the best hit was assigned to each gene. The genes annotated by COG were classified into the 25 COG categories, and genes that were annotated by KEGG were assigned to a set of manually determined gut metabolic modules [Falony et al, in prep]. The relative pathway/module abundance of higher order functional categories were calculated from rarefied KO abundances. Modules were deemed present when >=30% of the enzymes were recovered, after manual removing of overly “promiscuous” enzymes (i.e. present in multiple modules) prior to abundance calculation. For higher-level functional assignments, KO abundances were summed and distributed evenly when KOs appeared in multiple categories. Functional differences were calculated with a Wilcoxon Ranks-Sum test and multiple testing correction was done by controlling the False Discovery Rate (q<0.05) using the Benjamini-Hochberg method¹¹.

### Genes Significantly Different in Groups of Individuals

[0157] Genes significantly different in groups of individuals were identified by the Wilcoxon rank sum test coupled to a bootstrapping approach.

[0158] 70% of the whole cohort (204 individuals) were randomly chosen and genes differentially abundant between LGC and HGC individuals were identified at p=<0.0001 as threshold. This test was repeated 30 times. 30 groups of randomly chosen “extreme” individuals that had <400,000 genes or >600,000 genes were composed and the same test was applied thereto. Genes common to all 60 tests were analyzed further.

[0159] For lean and obese individuals of the whole population or stratified by enterotypes, asimilar approach was used by randomly choosing 70% of individuals 30 times and using Wilcoxon rank sum test at p=<0.05.

### Gene Clustering and Species Abundances

[0160] As only a small part (<10%) of the genes recovered as significantly different in two groups of individuals could be assigned taxonomically by sequence similarity to known reference genomes, an alternative strategy was used to cluster genes of the same species. Such genes are expected to be present at a similar abundance in an individual but at very different abundances in different individuals. The genes that vary in abundance in a coordinated way are thus likely to be from the same species. The genes were clustered according to a profile based binning strategy, using the covariance of their count profiles among the 292 individuals of the cohort. Spearman correlations coefficients were determined pairwise and all the genes that correlated above a given threshold were assigned to the same cluster.

[0161] Abundance of a given species in each individual was estimated as a mean abundance of 50 ‘tracer’ genes of each cluster. The values were very close to the mean frequency of all the genes of a cluster.

### Receiver-Operator Characteristic (ROC) Analysis

[0162] The analyses were carried out to distinguish between HGC and LGC individuals or lean and obese individuals by a combination of bacterial species. For each combination, only a single decision model was considered. In this very specific regression model weights are only allowed to take the values in. More precisely, the weight of each species in a given combination that belong to the set of the species more frequent in one group is equal to 1 while that of the species that belong to the set of species more frequent in the other group is equal to −1. The weight of each species that is outside of the combination is 0. For each individual, this model yields a score that is called the decisive-bacterial-abundance score. As opposed to the infinite number of regression models, such ternary models are finite and can be exhaustively explored. To select the best models, the cross-validated area under the ROC curve (CV-AUC) criterion¹⁴ was used, for it is well adapted to classification models for binary outcome data.

Species Correlated with the BMI Change

[0163] For the entire cohort of 292 individuals, 40 individuals (14%) having the highest abundance of a species were compared with at least 125 individuals (42%) having the lowest abundance (all individuals lacking a species were included, when more numerous than 125); these numbers were chosen to allow contrasting the extremes of the distribution while keeping the sample size high enough to reduce the probability of a fortuitous difference in BMI change. For the 169 obese individuals, 30 (18%) having the highest abundance of a species were compared with at least 60 individuals (36%) having the lowest abundance (all individuals lacking a species were included, when more numerous than 60). The differences were calculated with a Student t test, the BMI changes being normally distributed, and multiple testing correction was done by controlling the False Discovery Rate (q<0.05) using the Benjamini-Hochberg method¹¹.

### Association of Microbial Composition and Metabolic Traits

[0164] We analyzed the association of 1) the high gene and low gene group and 2) gene count as a continuous trait to quantitative traits applying a linear model adjusting for age and sex.

[0165] Correlations between the quantitative traits are shown in FIG. 15. P-triglycerides, P-HDL cholesterol, S-insulin, P-ALT, P-leptin and P-adiponectin and HOMA-IR were log transformed, whereas B-leucocytes, B-lymphocytes, B-monocytes, B-neutrophilocytes, P-hsCRP, S-FIAF, P-Free fatty acids, S-TNF-alfa, S-IL-6, S-lipopolysaccharide binding protein and BMI were rank normalized before analyses in the linear model. In the analyses of triglycerides, treatment with lipid lowering medications was added as a covariate to the linear model.

[0166] The data was corrected for multiple testing by the Benjamini-Hochberg method¹¹ setting the false discovery rate (FDR) at 10%. The results are displayed in Table 14.

[0167] For pair-wise analyses of the enterotype with phenotypes a linear model adjusting for age and sex was applied. The Benjamini-Hochberg method¹¹ was used to correct for multiple testing applied to the three pair-wise comparisons, again setting the false discovery rate (FDR) at10%. The results are displayed in Table 15.

### Microbial Gene Abundance Profiling by Quantitative Metagenomics

[0168] The intestinal bacterial gene content of the enrolled individuals was determined by high throughput Illumina-based sequencing of total fecal DNA. An average of 34.1 million paired-end reads were produced for each sample and, after removing human contamination (˜0.1%, on average), 19.9±6.7 (s.d.) million reads were mapped at a unique position of the reference catalog of 3.3 million genes, requiring >90% identity²²; reads mapping at multiple positions (13.4%, on average) were discarded. The abundance of a gene in a sample was estimated by dividing the number of reads that uniquely mapped to that gene by the gene length and by the total number of reads from the sample that uniquely mapped to any gene in the catalog. The resulting set of gene abundances, termed a microbial gene profile of an individual, was used for further analyses.

### A Bimodal Distribution of Microbial Genes

[0169] Comparison of gene profiles across the total study sample of 292 individuals showed a bimodal distribution of bacterial genes (FIG. 1, a and b, and Table 4). 27% of individuals had <590 K genes while the remainder had more. This was even more striking among the obese individuals, whereas a broad, possibly multi-modal, distribution was observed for the non-obese (i.e. overweight and lean) individuals. We anticipate that a better insight into the fine structure of the gene distribution for the latter might be obtained when a higher number of individuals are analyzed. Nevertheless, non-obese individuals also showed a “shoulder” at <590 K genes, encompassing 20% of this group. A similar distribution was detected in obese French individuals using a different sequencing technology (Cotillard et al., accompanying paper). As the number of genes detected appeared to have some dependence on the number of matched reads (FIG. 4), we compared individuals at the same number of reads. A downsizing to 11 million reads was used, and 15 individuals (5.1%) with fewer mapped reads were excluded. The bimodal distribution was again observed, both for all and for the obese individuals (FIG. 1 Table 4). We term hereafter the individuals with <480 K genes “low gene count” (LGC) and others “high gene count” (HGC). They had, on average, 380 K and 640 K genes, a difference of some 40% and harbored less or more rich microbiota, respectively, as shown by scoring several single copy marker genes. HITChip analysis24, based on the widely accepted 16S rDNA phylogenetic marker, confirmed both the bimodal distribution and the difference of richness of microbial communities between the LGC and HGC individuals (FIG. 5).

[0170] Low richness of gut microbiota has been reported in patients with inflammatory bowel disorder (IBD) 22,25,26 and in obese individuals¹⁷, but the differences of richness within these groups or among non-obese individuals was not previously detected. As the composition of gut microbiota appears to be rather stable over long periods of adulthood²⁷ its richness may well be a characteristic feature of an individual. In mice, the richness appears to be affected by repeated antibiotic treatments (M. J. Blaser, personal communication); host genetics could also play a role, as exemplified by the knockout of the toll-like receptor 5 resulting in altered gut microbiota and the metabolic syndrome, a phenotype transmissible by fecal transplantation of the altered microbiota²⁸. Further studies, focusing specifically on the richness of the gut microbiota across broad cohorts as function of behavior, including food intake, exercise, smoking habits, other pollutants and medication over sufficiently long periods of time might help to elucidate the causes for its variation.

[0171] We determined the enterotype of the individuals in our cohort and found that enterotype distribution greatly varies with the gene count (FIG. 1). Strikingly, 81.3% of the LGC individuals belonged to the Bacteroides-driven enterotype 1 while 63.4% of the HGC individuals belonged to enterotype 3 in which Ruminococcus was shown to be over-represented but which correlates even better with Methanobrevibacter in the present, larger, dataset. This distribution is significantly different (χ2=5×10−22) from that expected from the distribution of enterotypes in the total study sample (29.2% of Bacteroides and 51% of Methanobrevibacter-driven enterotypes).

### HGC and LGC Individuals Differ by Known Bacterial Species

[0172] Both the difference in gene number and the stratification by enterotypes indicate that the LGC and HGC individuals harbor different microbial communities. In order to assess the difference in phylogenetic composition between the two, we combined reference genome mapping with gene abundance data at phylum, genus and species level.

[0173] We first examined the general phylogenetic composition at higher taxonomic levels based upon genome size-normalized read abundances that were mapped on publicly available reference genomes and binned at genus and phylum level. 39 genera differed significantly in abundance between the HGC and LGC individuals. While Bacteroides, Parabacteroides, Ruminococcus (specifically R. torques and R. gnavus, of the Clostridium cluster XIV), Campylobacter, and Anaerostipes were more dominant in LGC, 31 genera, including Butyrivibrio, Alistipes, Akkermansia, Coprococcus, and Methanobrevibacter, were significantly linked to HGC. At the phylum level, this phylogenetic shift resulted in a higher abundance of Proteobacteria and Bacteroidetes in LGC individuals versus increased populations of Verrucomicrobia and Euryarchaeota in HGC individuals. An increased abundance of Bacteroides in the LGC individuals is congruent with the dominance of the Bacteroides-driven enterotype in this group. For clarity, it should be mentioned that the prevalent Ruminococcus in the HGC individuals and Ruminococcus/Methanobrevibacter smithii enterotype appears to be of the R.bromii-like group of the Clostridium cluster IV (HITChip results, data not shown).

[0174] Next, we studied the specific species that were differentially abundant between LGC and HGC individuals. To this aim, we used a novel, gene-centric approach that enables the visualization of individual-based patterns and avoids artifacts from incomplete genome coverage. In this approach, we identified the genes that were significantly different between the LGC and HGC individuals by the Wilcoxon rank sum test, comparing 204 (70% of total) randomly chosen individuals 30 times. We similarly compared 126 “extreme” individuals, harboring <400 K genes or >600 K genes. 120,723 genes were found in all 60 tests at p<0.0001 and were analyzed further.

[0175] We searched for genes that could belong to the same species, by comparing them to all sequenced genomes. At a threshold of 95% identity over at least 90% of the gene length, 10,225 genes (8.5%) were assigned to a total of 97 genomes representing some 73 species (Table 5). However, a vast majority (93.4%) belonged to only 9 species, which were all Firmicutes with a single exception of the main human methanogen, M. smithii. The corresponding species varied significantly in abundance between the LGC and HGC individuals, as illustrated in FIG. 2, where the presence and abundance of 50 arbitrarily chosen genes from each of the 9 species in the individuals of the cohort is displayed. We suggest that such genes can be used as “tracers” of a species in any individual, as they have a sharply bi-modal distribution—70% of individuals had either all or none of the genes from a species and thus harbored or lacked that species. The first 5 species were more frequent in LGC individuals whereas the last 4 species were more frequent in the HGC group (FIG. 2).

[0176] Taken together, the analyses highlight the contrast between the distribution of anti-inflammatory species, such as Faecalibacterium prausnitzii, which are more prevalent in HGC individuals and potentially pro-inflammatory, Bacteroides and R. gnavus, associated with IBD and found to be more frequent in LGC individuals.

[0177] However, a vast majority (>90%) of the 120,723 genes with significantly differing abundances in the LGC and HGC gene individuals could not be assigned to a sequenced bacterial genome, as the reference gut genome database is not yet complete. These genes must also belong to bacterial species that are present at different abundances in the two types of individuals. We thus attempted to cluster the genes from the same species by a gene abundance-based approach.

### HGC and LGC Individuals Differ by Unknown Bacterial Species

[0178] We hypothesized that the genes of a given bacterial species should be present at a similar abundance in an individual but should display large variations across a cohort, as species abundance is known to vary immensely among individuals (10- to 10,000-fold)²². The genes that vary in abundance in a coordinated way are thus likely to be from the same species. We tested this hypothesis for the 10,225 taxonomically assigned genes that differ significantly between LGC and HGC individuals, by computing the Spearman correlation coefficients for each gene with all the other genes and grouping those that were correlated above a given threshold. Ninety-two clusters containing at least 2 genes and including collectively 8,594 genes (84% of the total) were found at a Spearman threshold of 0.75. A vast majority of these (8,125; 94.5%) clustered into only 8 groups that included the 9 most highly represented species shown in FIG. 2 (genes assigned to Clostridium bolteae and C. clostridioforme genomes were in the same cluster). The specificity (proportion of the genes from the same species) and the sensitivity (proportion of the genes of a species included in a cluster) of clustering were very high (average of 97.8% and 91.8%, respectively) for 7 of the clusters. The specificity for the best 7 clusters increased to 99.5% at a higher threshold (Spearman of 0.85), with the concomitant decrease of sensitivity, to 55.9%. We concluded that covariance analysis groups efficiently genes for most of the highly represented, taxonomically characterized species, and used it to cluster all the significantly different genes revealed by our rank sum analysis.

[0179] 76,564 genes (63% of 120,723) were grouped into 1,440 clusters of 2 genes or more at a threshold of 0.85, used to favor the specificity of clustering, but a vast majority (68,952, 90%) was found in only 58 clusters that contained >75 genes. They included 6 of the 9 taxonomically characterized species shown in FIG. 2, which grouped a total of 2,530 genes (3.7%) and clustered with an average specificity of 92% (ranging from 85.9% to 99.1%). This is somewhat lower than the values observed when 10,225 taxonomically assigned genes were clustered; possibly, some of the genes of these species were not carried on the sequenced reference genomes and were thus not taxonomically assigned. A majority of other clusters that grouped >75 genes with no clear taxonomic assignment should contain genes from previously unknown species, at a similar high specificity. To test this assumption we correlated the 16S rRNA gene sequences represented on the HITChip to these clusters. For this purpose, the abundance of each cluster, computed as the average abundance of 50 arbitrarily chosen tracer genes was compared with the hybridization signal for each of the probes contained on the HITChip across the individuals of our cohort. The 16S rRNA gene sequences correlated to 3 of the 6 clusters of known taxonomy in a congruent way and to 24 of the 52 clusters of unknown taxonomy; all of the latter were from unknown species. For the remaining 28 clusters, it is possible that the HITChip resolution of closely related genomes may have been insufficient or that the corresponding 16S sequences were lacking. We conclude that the clustering procedure grouped the genes of the same species.

[0180] Distribution of unknown species across LGC and HGC individuals of the cohort was clearly biased, as illustrated for 7 of them with 50 tracer genes (FIG. 2). Genes for 10 of the species and the Bacteroides were present on the metagenomic arrays; in all cases the HGC/LGC bias found by sequencing was also detected by the arrays (FIG. 2). Characterization of the unknown species will be required in order to more fully assess the impact of the gut microbial communities on the HGC and LGC individuals.

### A Small Number of Bacterial Species Allow Distinguishing Between HGC and LGC Individuals

[0181] To test whether LGC and HGC individuals could be distinguished by bacterial species they harbour we performed a receiver-operator characteristic (ROC) analysis. First, we estimated the abundance of 58 species that were significantly different between LGC and HGC individuals (Table 4a and Table 4b). For each individual, we used these values to compute a score, named Decisive-Bacterial-Abundance (DBA) score, equal to the sum of abundances of the species more frequent in HGC individuals subtracted by the sum of the abundances of species more frequent in LGC individuals. The DBA scores were calculated exhaustively for all combinations of up to 23 species and were used in the ROC analysis; the area under curve (AUC) values for the best combinations are shown in FIG. 2. The best combination of 4 species gave an AUC value of 0.98 (FIG. 2); in a ten-fold cross-validation test with 90% of randomly chosen individuals the AUC value of 0.976±0.02 (s.d.) was obtained for the groups of the remaining 10%, indicating the robustness of the analysis. We concluded that LGC and HGC individuals can be accurately differentiated using only a few bacterial species.

### Phenotypes of the HGC and LGC Individuals

[0182] Characteristics of study materials are given in Table 10. We performed an anthropometric and biochemical phenotyping of multiple interrelated features of LGC and HGC individuals, and identified significant differences between them at a false discovery rate³⁴ of up to 10% (Table 3). This value was used to avoid missing significant associations; a less stringent level, up to 25%, was chosen in a recent and comparable study design. The LGC individuals, who represented 23% of the total study population, included a significantly higher proportion of obese participants and were as a group characterized by a more marked adiposity, as reflected by an increase in fat mass percentage and body weight (Table 3). The adiposity phenotype of LGC people was associated with elevated serum leptin, decreased serum adiponectin, insulin resistance, hyperinsulinaemia, elevated levels of triglycerides and free fatty acids (FFA), decreased HDL-cholesterol and a more marked inflammatory phenotype (increased hsCRP and higher white blood cell counts) than seen in HGC individuals (Table 3). We further tested the significance of our observations by treating the gene counts as a continuous variable and examining its correlation with the anthropometric and biochemical variables. All but two (BMI and weight) of the observed differences between LGC and HGC individuals were found significantly associated with the gene counts (Table 3). Together, these analyses suggest that the LGC individuals are featured by metabolic disturbances known to bring them at increased risk of prediabetes, type 2 diabetes and ischaemic cardiovascular disorders. Similar abnormalities were found in the accompanying paper (Cotillard et al.).

[0183] Based upon these results we hypothesize that an imbalance of potentially pro- and anti-inflammatory bacterial species triggers low-grade inflammation and insulin resistance. In parallel, we suggest that an altered gut microbiota of LGC individuals induces the noted increase in serum FIAF levels, eliciting an elevated release of triglycerides and FFA (Table 3), as evidenced by studies in rodent models.

[0184] An almost perfect stratification of LGC and HGC individuals can be achieved with a very few bacterial species, suggesting that simple molecular diagnostic tests, based on our other genome, can be developed to identify individuals at risk of common morbidities. Therefore focus on our other genome, which in some respects appears to be more informative than our own, may spearhead development of stratified approaches for treatment and prevention of widespread chronic disorders.

[0185] Beyond metabolic dysfunctions, low-grade inflammation as seen in LGC individuals with and without obesity is associated with a plethora of other chronic diseases, which are steadily rising (Bach, 2002). Whether a low gut bacterial richness is common to many or even all of those, as already reported for IBD, could be revealed by exploring gut microbiota at a deep metagenomic level in a broad variety of these afflictions.

TABLE 3a
Phenotypic characteristics of 292 study participants when stratified by low and high
gene counts or Bacteroides/Ruminoccocus enterotypes

| | | | | | Gene | Gene |
|---|---|---|---|---|---|---|
| | | | | | counts | counts |
| | LGC | HGC | p | q | p | q |
| N | 68 (23/45) | 224 (113/111) | | | 277 (133/144) | |
| (men/women) | | | | | | |
| Age Yrs | 56 ± 7.5 | 57 ± 7.3 | 0.73 | 0.76 | 0.11 | 0.30 |
| BMI (kg/m²) | 32 (29-34) | 30 (23-33) | 0.035 | 0.065 | 0.06 | 0.20 |
| Weight (kg) | 91 ± 21 | 87 ± 19 | 0.019 | 0.041 | 0.15 | 0.34 |
| Fat % | 36 ± 7.8 | 31 ± 9.2 | 0.0069 | 0.024 | 0.0012 | 0.017 |
| S-Insulin | 50 (35-91) | 44 (26-66) | 0.0095 | 0.03 | 0.0052 | 0.04 |
| (pmol/l) | | | | | | |
| HOMA-IR | 1.9 (1.2-3.3) | 1.6 (0.9-2.6) | 0.012 | 0.033 | 0.0059 | 0.04 |
| p-Triglycerides | 1.3 (0.97-1.8) | 1.1 (0.82- | 0.0014 | 0.013 | 0.0007 | 0.01 |
| mmol/l | | 1.6) | | | | |
| P-Free fatty | 0.55 (0.39-0.7) | 0.48 (0.35- | 0.014 | 0.033 | 0.0013 | 0.017 |
| acids (mmol/l) | | 0.6) | | | | |
| S-Leptin (μ/l) | 17 (6.7-33) | 8.3 (3.4-26) | 0.0036 | 0.02 | 0.00057 | 0.010 |
| S-Adiponectin | 7.5 (5.5-13) | 9.6 (6.7-14) | 0.006 | 0.024 | 0.015 | 0.079 |
| (mg/l) | | | | | | |
| P-ALT (U/l) | 20 (14-30) | 19 (15-26) | 0.22 | 0.22 | 0.029 | 0.12 |
| B-leucocytes | 6.4 (5.2-7.8) | 5.6 (4.8-6.9) | 0.0019 | 0.013 | 0.0023 | 0.027 |
| (10⁹/l) | | | | | | |
| B- | 2.1 (1.6-2.3) | 1.8 (1.5-2.1) | 0.001 | 0.013 | 0.0044 | 0.0378 |
| Lymphocytes | | | | | | |
| (10⁹/l) | | | | | | |
| P-CRP (mg/l) | 2.3 (1.1-5.7) | 1.4 (0.6-2.7) | 0.00088 | 0.013 | 0.0033 | 0.033 |
| S-FIAF (μg/l) | 88 (72-120) | 78 (60-100) | 0.0047 | 0.022 | 0.011 | 0.061 |

TABLE 3b
Phenotypic characteristics of 292 study
participants when stratified by low and
high gene counts or Bacteroides/Ruminoccocus enterotypes

| | Bacteroides | | Ruminococcus | | p | q |
|---|---|---|---|---|---|---|
| N (men/ | 84 | (37/47) | 148 | (64/84) | | |
| women) | | | | | | |
| Age Yrs | 56 | ± 7.2 | 57 | ± 7.6 | 0.33 | 0.4 |
| BMI (kg/m²) | 31 | (24-34) | 30 | (23-33) | 0.18 | 0.3 |
| Weight (kg) | 90 | ± 21 | 85 | ± 19 | 0.032 | 0.1 |
| Fat % | 34 | ± 8.8 | 32 | ± 9.2 | 0.058 | 0.16 |
| S-Insulin | 50 | (36-5) | 38 | (23-64) | 0.0019 | 0.016 |
| (pmol/l) | | | | | | |
| HOMA-IR | 1.8 | (1.2-2.8) | 1.4 | (0.9-2.3) | 0.0019 | 0.016 |
| p- | 1.2 | (0.92-1.6) | 1.2 | (0.83-1.6) | 0.08 | 0.19 |
| Triglycerides | | | | | | |
| mmol/l | | | | | | |
| P-Free fatty | 0.51 | (0.4-0.65) | 0.48 | (0.34-0.6) | 0.022 | 0.088 |
| acids | | | | | | |
| (mmol/l) | | | | | | |
| S-Leptin (μ/l) | 11.0 | (5.7-30) | 9.5 | (3.4-28) | 0.08 | 0.19 |
| S- | 8.0 | (5.7-13) | 9.9 | (6.7-15) | 0.1 | 0.2 |
| Adiponectin | | | | | | |
| (mg/l) | | | | | | |
| P-ALT (U/1) | 22 | (14-1) | 18 | (15-24) | 0.0028 | 0.016 |
| B-leucocytes | 6.0 | (4.9-7.4) | 5.8 | (4.9-7) | 0.26 | 0.36 |
| (10⁹/l) | | | | | | |
| B- | 2.0 | (1.6-2.3) | 1.7 | (1.5-2) | 0.0029 | 0.016 |
| Lymphocytes | | | | | | |
| (10⁹/l) | | | | | | |
| P-CRP (mg/l) | 1.8 | (0.8-3.7) | 1.3 | (0.67-2.6) | 0.03 | 0.1 |
| S-FIAF (μg/l) | 85 | (68-110) | 76 | (59-100) | 0.098 | 0.2 |

TABLE 4a

| | | | | Genes | | |
|---|---|---|---|---|---|---|
| | | | | of | Hit Chip | |
| Cluster | Number | | Known | known | Correlation | Phylotype (98% 16S sequence |
| id | of genes | Prevalence | species | taxonomy | (Spearman) | identity) |
| HL-1 | 14902 | HGC | | | 0.737 | Uncultured bacterium UC7-1 |
| HL-2 | 5398 | HGC | | | 0.826 | uncultured bacterium LD59 |
| HL-3 | 3807 | HGC | | | 0.940 | uncultured bacterium OLDB-C2 |
| HL-4 | 3752 | HGC | | | 0.904 | uncultured bacterium LN56 |
| HL-5 | 3237 | HGC | | | 0.933 | uncultured bacterium HuCA6 |
| HL-6 | 2784 | HGC | | | 0.819 | uncultured bacterium OLDB-H1 |
| HL-7 | 2743 | LGC | | | | |
| HL-8 | 2443 | HGC | | | | |
| HL-9 | 2105 | HGC | | | 0.895 | uncultured bacterium D726 |
| HL-10 | 1921 | HGC | | | 0.734 | bacterium adhufec101 |
| HL-11 | 1735 | HGC | | | | |
| HL-12 | 1732 | HGC | | | | |
| HL-13 | 1656 | HGC | | | 0.937 | uncultured bacterium C747 |
| HL-14 | 1642 | HGC | | | 0.932 | uncultured bacterium C736 |
| HL-15 | 1413 | LGC | | | | |
| HL-16 | 1216 | HGC | | | | |
| HL-17 | 1205 | HGC | | | 0.872 | Uncultured bacterium clone |
| | | | | | | Eldhufec048 |
| HL-18 | 1118 | HGC | | | | |
| HL-19 | 1090 | HGC | | | 0.786 | bacterium adhufec269 |
| HL-20 | 1023 | LGC | Ruminococcus | 963 | 0.815 | Ruminococcus gnavus |
| | | | gnavus | | | |
| HL-21 | 938 | HGC | | | | |
| HL-22 | 902 | HGC | | | | |
| HL-23 | 894 | HGC | | | | |
| HL-24 | 867 | HGC | | | | |
| HL-25 | 744 | HGC | Methanobrevibacter | 639 | | |
| | | | smithii | | | |
| HL-26 | 733 | HGC | | | | |
| HL-27 | 513 | HGC | | | | |
| HL-28 | 454 | HGC | | | | |
| HL-29 | 403 | HGC | | | 0.850 | uncultured bacterium HuCB40 |
| HL-30 | 370 | HGC | | | 0.888 | bacterium adhufec57 |
| HL -31 | 366 | HGC | | | 0.905 | uncultured bacterium OLDB-F4 |
| HL-32 | 329 | HGC | | | 0.863 | Uncultured bacterium clone |
| | | | | | | Eldhufec334 |
| HL-33 | 324 | HGC | | | | |
| HL-34 | 322 | HGC | Coprococcus | 300 | 0.878 | Coprococcus eutactus |
| | | | eutactus | | | |
| HL-35 | 286 | HGC | | | | |
| HL-36 | 277 | HGC | | | | |
| HL-37 | 260 | HGC | | | | |
| HL -38 | 235 | LGC | Clostridium | 233 | | |
| | | | symbiosum | | | |
| HL-39 | 234 | LGC | | | | |
| HL-40 | 230 | HGC | | | | |
| HL-41 | 214 | HGC | | | 0.804 | uncultured bacterium OLDC-E8 |
| HL-42 | 192 | HGC | | | 0.869 | uncultured bacterium OLDB-E4 |
| HL-43 | 191 | HGC | | | 0.711 | uncultured bacterium |
| | | | | | | adhufec30.25 |
| HL-44 | 158 | HGC | | | 0.919 | uncultured bacterium D692 |
| HL-45 | 156 | HGC | | | | |
| HL-46 | 135 | HGC | | | | |
| HL-47 | 134 | HGC | | | 0.772 | uncultured bacterium OLDB-A9 |
| HL-48 | 126 | HGC | | | | |
| HL-49 | 125 | LGC | Clostridium | 109 | 0.816 | Clostridium clostridioforme |
| | | | clostridioforme | | | |
| HL-50 | 123 | HGC | | | | |
| HL-51 | 122 | HGC | | | | |
| HL-52 | 121 | HGC | | | | |
| HL-53 | 119 | HGC | | | | |
| HL-54 | 102 | HGC | | | 0.757 | uncultured bacterium C352 |
| HL-55 | 98 | HGC | | | | |
| HL-56 | 81 | LGC | Clostridium | 75 | | |
| | | | ramosum | | | |
| HL-57 | 77 | HGC | | | 0.719 | uncultured bacterium C352 |
| HL-58 | 75 | HGC | | | 0.862 | uncultured bacterium OLDA-H9 |

TABLE 4b

| | | | | Metagenomic |
|---|---|---|---|---|
| Cluster | Genus-like group (90% 16S | | | arrays |
| id | sequence identity) | Order-like group | Phylum | median p |
| HL-1 | Sporobacter termitidis et rel. | Clostridium cluster IV | Firmicutes | |
| HL-2 | Oscillospira guillermondii et rel. | Clostridium cluster IV | Firmicutes | |
| HL-3 | Uncultured Clostridiales II | Uncultured Clostridiales | Firmicutes | |
| HL-4 | Anaerovorax odorimutans et rel. | Clostridium cluster XI | Firmicutes | |
| HL-5 | Uncultured Clostridiales II | Uncultured Clostridiales | Firmicutes | |
| HL-6 | Uncultured Clostridiales II | Uncultured Clostridiales | Firmicutes | |
| HL-7 | | | | 2.5E−10 |
| HL-8 | | | | |
| HL-9 | Butyrivibrio crossotus et rel. | Clostridium cluster XIVa | Firmicutes | |
| HL-10 | Anaerotruncus colihominis et rel. | Clostridium cluster IV | Firmicutes | |
| HL-11 | | | | |
| HL-12 | | | | |
| HL-13 | Sporobacter termitidis et rel. | Clostridium cluster IV | Firmicutes | |
| HL-14 | Uncultured Clostridiales II | Uncultured Clostridiales | Firmicutes | |
| HL-15 | | | | 7.8E−06 |
| HL-16 | | | | |
| HL-17 | Bacteroides splachnicus et rel. | Bacteroidetes | Bacteroidetes | |
| HL-18 | | | | |
| HL-19 | Oscillospira guillermondii et rel. | Clostridium cluster IV | Firmicutes | |
| HL-20 | Ruminococcus gnavus et rel. | Clostridium cluster XIVa | Firmicutes | 4.0E−08 |
| HL-21 | | | | |
| HL-22 | | | | |
| HL-23 | | | | |
| HL-24 | | | | |
| HL-25 | | | | 8.9E−03 |
| HL-26 | | | | |
| HL-27 | | | | |
| HL-28 | | | | |
| HL-29 | Butyrivibrio crossotus et rel. | Clostridium cluster XIVa | Firmicutes | |
| HL-30 | Coprococcus eutactus et rel. | Clostridium cluster XIVa | Firmicutes | |
| HL-31 | Uncultured Clostridiales II | Uncultured Clostridiales | Firmicutes | |
| HL-32 | Uncultured Clostridiales II | Uncultured Clostridiales | Firmicutes | |
| HL-33 | | | | |
| HL-34 | Coprococcus eutactus et rel. | Clostridium cluster XIVa | Firmicutes | |
| HL-35 | | | | |
| HL-36 | | | | |
| HL-37 | | | | |
| HL-38 | | | | |
| HL-39 | | | | 8.5E−05 |
| HL-40 | | | | |
| HL-41 | Sporobacter termitidis et rel. | Clostridium cluster IV | Firmicutes | |
| HL-42 | Clostridium cellulosi et rel. | Clostridium cluster IV | Firmicutes | |
| HL-43 | Ruminococcus obeum et rel. | Clostridium cluster XIVa | Firmicutes | |
| HL-44 | Butyrivibrio crossotus et rel. | Clostridium cluster XIVa | Firmicutes | |
| HL-45 | | | | |
| HL-46 | | | | |
| HL-47 | Uncultured Clostridiales I | Uncultured Clostridiales | Firmicutes | |
| HL-48 | | | | |
| HL-49 | Clostridium symbiosum et rel. | Clostridium cluster XIVa | Firmicutes | 1.5E−10 |
| HL-50 | | | | |
| HL-51 | | | | |
| HL-52 | | | | |
| HL-53 | | | | 1.4E−03 |
| HL-54 | Sporobacter termitidis et rel. | Clostridium cluster IV | Firmicutes | |
| HL-55 | | | | |
| HL-56 | | | | |
| HL-57 | Sporobacter termitidis et rel. | Clostridium cluster IV | Firmicutes | |
| HL-58 | Uncultured Clostridiales I | Uncultured Clostridiales | Firmicutes | |

TABLE 5

| | | | | | | | Gene count | |
|---|---|---|---|---|---|---|---|---|
| | Low gene | | High gene | | p | q | p | q |
| N | 64 | (22/42) | 224 | (113/111) | | | 277 (133/144) | |
| Age (yrs) | 56 | (50-62) | 57 | (50-61) | 0.9 | 0.9 | 0.81 | 0.84 |
| BMI (kg/m²) | 32 | (28-34) | 30 | (23-33) | 0.092 | 0.14 | 0.11 | 0.18 |
| Weight (kg) | 95 | (75-100) | 86 | (71-100) | 0.046 | 0.079 | 0.12 | 0.18 |
| Whole body fat | 35 | (29-42) | 31 | (25-39) | 0.017 | 0.057 | 0.0024 | 0.014 |
| percentage (%) | | | | | | | | |
| Waist/hip ratio | 0.90 | (0.85-0.96) | 0.90 | (0.84-0.97) | 0.089 | 0.14 | 0.044 | 0.079 |
| Sagittal diameter | 24 | (20-25) | 22 | (18-26) | 0.4 | 0.47 | 0.21 | 0.26 |
| (cm) | | | | | | | | |
| IAAT (cm^{²}) | 150 | (110-170) | 150 | (93-180) | 0.43 | 0.48 | 0.19 | 0.24 |
| P-Glucose | 5.8 | (5.4-6.2) | 5.7 | (5.4-6.1) | 0.3 | 0.39 | 0.19 | 0.24 |
| (mmol/l) | | | | | | | | |
| HbA1c (%) | 5.5 | (5.3-5.7) | 5.6 | (5.3-5.7) | 0.84 | 0.9 | 0.88 | 0.88 |
| S-Insulin (pmol/l) | 47 | (34-84) | 44 | (26-66) | 0.041 | 0.079 | 0.0052 | 0.018 |
| HOMA-IR | 1.8 | (1.2-3.0) | 1.6 | (0.9-2.6) | 0.044 | 0.079 | 0.0059 | 0.018 |
| P-Cholesterol | 5.5 | (4.8-6.1) | 5.4 | (4.8-6.1) | 0.87 | 0.9 | 0.79 | 0.81 |
| (mmol/l) | | | | | | | | |
| P-HDL | 1.3 | (1.1-1.7) | 1.5 | (1.2-1.8) | 0.047 | 0.079 | 0.24 | 0.28 |
| cholesterol | | | | | | | | |
| (mmol/l) | | | | | | | | |
| P-Triglycerides | 1.3 | (1.0-1.8) | 1.1 | (0.8-1.6) | 0.0028 | 0.036 | 0.00073 | 0.0062 |
| (mmol/l) | | | | | | | | |
| P-Free fatty acids | 0.52 | (0.39-0.69) | 0.48 | (0.35-0.60) | 0.026 | 0.064 | 0.00042 | 0.0062 |
| (mmol/l) | | | | | | | | |
| P-ALT (U/l) | 20 | (14-31) | 19 | (15-26) | 0.15 | 0.2 | 0.029 | 0.06 |
| S-Leptin (μ/l) | 15.0 | (6.7-32.0) | 8.3 | (3.4-26.0) | 0.0071 | 0.036 | 0.00058 | 0.0062 |
| S-Adiponectin | 7.6 | (5.6-13.0) | 9.6 | (6.7-14.0) | 0.032 | 0.072 | 0.016 | 0.036 |
| (mg/l) | | | | | | | | |
| B-Leucocytes | 6.4 | (5.2-7.8) | 5.6 | (4.8-6.9) | 0.0053 | 0.036 | 0.0026 | 0.014 |
| (10⁹/l) | | | | | | | | |
| B-Lymphocytes | 2.1 | (1.6-2.3) | 1.8 | (1.5-2.1) | 0.0014 | 0.036 | 0.0037 | 0.015 |
| (10⁹/l) | | | | | | | | |
| B- | 3.7 | (2.8-4.8) | 3.1 | (2.5-4.1) | 0.019 | 0.057 | 0.0092 | 0.023 |
| Neutrophilocytes | | | | | | | | |
| (10⁹/l) | | | | | | | | |
| B-Monocytes | 0.5 | (0.4-0.6) | 0.4 | (0.4-0.6) | 0.0081 | 0.036 | 0.12 | 0.18 |
| (10⁹/l) | | | | | | | | |
| P-CRP (mg/l) | 1.9 | (1.0-5.4) | 1.4 | (0.6-2.7) | 0.0041 | 0.036 | 0.0038 | 0.015 |
| S-IL-6 (ng/l) | 17.0 | (11.0-31.0) | 13.0 | (6.3-24.0) | 0.023 | 0.062 | 0.044 | 0.079 |
| S-TNFalfa (ng/l) | 13.0 | (0.04-54.0) | 8.6 | (0.04-32.0) | 0.13 | 0.18 | 0.46 | 0.52 |
| S-FIAF (μg/l) | 87 | (72-120) | 78 | (60-100) | 0.012 | 0.046 | 0.0088 | 0.023 |
| S-LBP (μg/l) | 19 | (15-25) | 19 | (15-23) | 0.4 | 0.47 | 0.16 | 0.23 |

TABLE 6
AUC obtained with determining the presence or absence of
all of the 50 genes from a given bacterial species.

| Bacterial | | Bacterial | |
|---|---|---|---|
| species | AUC | species | AUC |
| HL-1 | 0.936055672268908 | HL-55 | 0.789653361344538 |
| HL-57 | 0.904083508403361 | HL-50 | 0.787847951680672 |
| HL-53 | 0.895680147058824 | HL-58 | 0.785057773109244 |
| HL-4 | 0.895647321428571 | HL-34 | 0.784729516806723 |
| HL-54 | 0.894826680672269 | HL-25 | 0.778886554621849 |
| HL-2 | 0.889705882352941 | HL-6 | 0.775013130252101 |
| HL-3 | 0.883009453781513 | HL-51 | 0.7734375 |
| HL-8 | 0.8828125 | HL-19 | 0.765887605042017 |
| HL-10 | 0.877002363445378 | HL-27 | 0.76437762605042 |
| HL-45 | 0.876838235294118 | HL-36 | 0.761357668067227 |
| HL-22 | 0.876050420168067 | HL-52 | 0.756171218487395 |
| HL-26 | 0.875525210084034 | HL-48 | 0.754759716386555 |
| HL-9 | 0.872242647058823 | HL-29 | 0.75108324579832 |
| HL-5 | 0.866530987394958 | HL-24 | 0.749015231092437 |
| HL-11 | 0.858357405462185 | HL-47 | 0.745765493697479 |
| HL-14 | 0.857110031512605 | HL-42 | 0.745338760504202 |
| HL-13 | 0.849954044117647 | HL-43 | 0.743106617647059 |
| HL-18 | 0.847098214285714 | HL-15 | 0.742450105042017 |
| HL-12 | 0.846474527310924 | HL-49 | 0.742089023109244 |
| HL-21 | 0.836594012605042 | HL-35 | 0.741530987394958 |
| HL-41 | 0.825728728991597 | HL-30 | 0.736935399159664 |
| HL-32 | 0.81906512605042 | HL-40 | 0.72780987394958 |
| HL-17 | 0.816307773109244 | HL-28 | 0.726529674369748 |
| HL-44 | 0.815027573529412 | HL-23 | 0.723608193277311 |
| HL-20 | 0.814732142857143 | HL-56 | 0.723542542016807 |
| HL-46 | 0.811548056722689 | HL-7 | 0.711758140756303 |
| HL-31 | 0.806492909663866 | HL-33 | 0.707851890756303 |
| HL-16 | 0.799041491596639 | HL-39 | 0.702271533613445 |
| HL-37 | 0.794708508403361 | HL-38 | 0.690388655462185 |

TABLE 7
AUC above 0.9 are obtained when determining low gut diversity by detecting the
presence or absence of 50 bacterial genes from the given combination of 2 bacterial species.

| Combination of | | Combination of | |
|---|---|---|---|
| bacterial species | AUC | bacterial species | AUC |
| HL-1 and HL-5 | 0.955685399159664 | HL-10 and HL-32 | 0.91281512605042 |
| HL-1 and HL-10 | 0.953551733193277 | HL-12 and HL-13 | 0.912749474789916 |
| HL-1 and HL-3 | 0.949973739495798 | HL-13 and HL-22 | 0.912683823529412 |
| HL-1 and HL-8 | 0.946625525210084 | HL-8 and HL-25 | 0.912618172268908 |
| HL-1 and HL-28 | 0.945542279411765 | HL-5 and HL-54 | 0.912552521008403 |
| HL-1 and HL-47 | 0.945214023109244 | HL-4 and HL-7 | 0.9124868697479 |
| HL-8 and HL-26 | 0.943014705882353 | HL-31 and HL-57 | 0.912486869747899 |
| HL-1 and HL-13 | 0.942883403361345 | HL-4 and HL-15 | 0.912421218487395 |
| HL-5 and HL-57 | 0.942883403361344 | HL-18 and HL-21 | 0.912421218487395 |
| HL-1 and HL-22 | 0.942620798319328 | HL-34 and HL-54 | 0.912421218487395 |
| HL-1 and HL-35 | 0.942587972689076 | HL-25 and HL-45 | 0.912289915966386 |
| HL-1 and HL-26 | 0.94202993697479 | HL-2 and HL-53 | 0.912257090336134 |
| HL-1 and HL-25 | 0.941832983193278 | HL-10 and HL-35 | 0.912092962184874 |
| HL-1 and HL-33 | 0.941307773109244 | HL-10 and HL-49 | 0.912092962184874 |
| HL-3 and HL-53 | 0.940848214285714 | HL-18 and HL-57 | 0.912092962184874 |
| HL-1 and HL-12 | 0.940716911764706 | HL-44 and HL-57 | 0.912092962184874 |
| HL-1 and HL-27 | 0.940651260504202 | HL-26 and HL-45 | 0.911961659663866 |
| HL-10 and HL-53 | 0.940651260504202 | HL-37 and HL-57 | 0.911961659663866 |
| HL-1 and HL-4 | 0.940388655462185 | HL-11 and HL-14 | 0.911928834033613 |
| HL-1 and HL-18 | 0.940290178571429 | HL-2 and HL-22 | 0.911896008403361 |
| HL-1 and HL-23 | 0.940290178571429 | HL-12 and HL-21 | 0.911863182773109 |
| HL-10 and HL-11 | 0.939863445378151 | HL-31 and HL-53 | 0.911830357142857 |
| HL-4 and HL-26 | 0.939764968487395 | HL-10 and HL-25 | 0.911699054621849 |
| HL-26 and HL-53 | 0.939239758403361 | HL-3 and HL-27 | 0.911633403361345 |
| HL-1 and HL-37 | 0.939141281512605 | HL-4 and HL-46 | 0.911633403361344 |
| HL-1 and HL-51 | 0.939108455882353 | HL-8 and HL-27 | 0.911633403361344 |
| HL-1 and HL-53 | 0.938813025210084 | HL-40 and HL-57 | 0.911633403361344 |
| HL-8 and HL-53 | 0.938025210084034 | HL-11 and HL-13 | 0.911502100840336 |
| HL-1 and HL-31 | 0.93795955882353 | HL-13 and HL-57 | 0.911436449579832 |
| HL-10 and HL-21 | 0.937959558823529 | HL-27 and HL-57 | 0.911370798319328 |
| HL-1 and HL-21 | 0.937204569327731 | HL-49 and HL-57 | 0.911305147058824 |
| HL-3 and HL-26 | 0.937138918067227 | HL-2 and HL-47 | 0.911305147058823 |
| HL-1 and HL-46 | 0.93671218487395 | HL-5 and HL-44 | 0.911305147058823 |
| HL-1 and HL-32 | 0.936383928571429 | HL-10 and HL-56 | 0.911272321428572 |
| HL-13 and HL-53 | 0.936351102941176 | HL-2 and HL-46 | 0.911272321428571 |
| HL-8 and HL-11 | 0.935924369747899 | HL-21 and HL-32 | 0.911239495798319 |
| HL-8 and HL-21 | 0.935497636554622 | HL-2 and HL-8 | 0.911173844537815 |
| HL-5 and HL-11 | 0.93546481092437 | HL-12 and HL-22 | 0.911173844537815 |
| HL-1 and HL-40 | 0.935202205882353 | HL-46 and HL-53 | 0.911173844537815 |
| HL-3 and HL-4 | 0.934939600840336 | HL-7 and HL-53 | 0.911108193277311 |
| HL-1 and HL-11 | 0.934808298319328 | HL-26 and HL-51 | 0.911108193277311 |
| HL-1 and HL-9 | 0.934414390756303 | HL-22 and HL-25 | 0.911042542016807 |
| HL-22 and HL-26 | 0.933626575630252 | HL-38 and HL-57 | 0.910911239495799 |
| HL-8 and HL-45 | 0.933560924369748 | HL-23 and HL-57 | 0.910911239495798 |
| HL-8 and HL-9 | 0.933035714285714 | HL-8 and HL-44 | 0.910878413865546 |
| HL-3 and HL-5 | 0.932707457983193 | HL-1 and HL-20 | 0.910845588235294 |
| HL-5 and HL-13 | 0.932280724789916 | HL-33 and HL-57 | 0.91077993697479 |
| HL-10 and HL-22 | 0.93218224789916 | HL-4 and HL-28 | 0.910484506302521 |
| HL-3 and HL-8 | 0.932116596638656 | HL-10 and HL-15 | 0.910386029411764 |
| HL-4 and HL-8 | 0.931755514705882 | HL-13 and HL-37 | 0.910254726890756 |
| HL-13 and HL-26 | 0.931427258403361 | HL-32 and HL-53 | 0.910254726890756 |
| HL-4 and HL-10 | 0.931263130252101 | HL-2 and HL-17 | 0.910189075630252 |
| HL-5 and HL-45 | 0.931131827731092 | HL-3 and HL-15 | 0.91015625 |
| HL-1 and HL-36 | 0.931066176470588 | HL-35 and HL-57 | 0.910123424369748 |
| HL-3 and HL-18 | 0.930015756302521 | HL-11 and HL-18 | 0.909959296218487 |
| HL-4 and HL-5 | 0.930015756302521 | HL-26 and HL-37 | 0.909959296218487 |
| HL-2 and HL-5 | 0.929982930672269 | HL-13 and HL-49 | 0.909860819327731 |
| HL-1 and HL-49 | 0.92985162815126 | HL-15 and HL-53 | 0.909860819327731 |
| HL-1 and HL-45 | 0.929785976890757 | HL-4 and HL-9 | 0.909762342436975 |
| HL-1 and HL-14 | 0.929359243697479 | HL-25 and HL-57 | 0.909663865546218 |
| HL-1 and HL-2 | 0.929326418067227 | HL-29 and HL-54 | 0.909663865546218 |
| HL-1 and HL-15 | 0.929326418067227 | HL-3 and HL-36 | 0.909466911764706 |
| HL-5 and HL-17 | 0.929096638655462 | HL-22 and HL-57 | 0.909466911764706 |
| HL-8 and HL-18 | 0.929096638655462 | HL-2 and HL-31 | 0.909401260504202 |
| HL-3 and HL-10 | 0.929030987394958 | HL-2 and HL-21 | 0.909269957983193 |
| HL-21 and HL-53 | 0.92889968487395 | HL-8 and HL-36 | 0.908974527310924 |
| HL-3 and HL-11 | 0.928768382352941 | HL-5 and HL-46 | 0.908941701680672 |
| HL-10 and HL-45 | 0.928669905462185 | HL-16 and HL-57 | 0.908941701680672 |
| HL-1 and HL-57 | 0.927980567226891 | HL-35 and HL-45 | 0.908876050420168 |
| HL-10 and HL-57 | 0.927980567226891 | HL-1 and HL-48 | 0.908843224789916 |
| HL-10 and HL-18 | 0.927947741596639 | HL-12 and HL-18 | 0.908810399159664 |
| HL-25 and HL-53 | 0.927914915966387 | HL-8 and HL-49 | 0.908613445378151 |
| HL-4 and HL-21 | 0.927849264705882 | HL-36 and HL-57 | 0.908613445378151 |
| HL-8 and HL-13 | 0.927849264705882 | HL-45 and HL-47 | 0.908580619747899 |
| HL-3 and HL-45 | 0.927422531512605 | HL-5 and HL-41 | 0.908547794117647 |
| HL-1 and HL-17 | 0.927127100840336 | HL-9 and HL-26 | 0.908547794117647 |
| HL-10 and HL-17 | 0.927061449579832 | HL-2 and HL-57 | 0.908482142857143 |
| HL-4 and HL-11 | 0.927061449579831 | HL-10 and HL-27 | 0.908416491596639 |
| HL-5 and HL-26 | 0.92702862394958 | HL-51 and HL-53 | 0.908416491596639 |
| HL-4 and HL-53 | 0.925814075630252 | HL-4 and HL-49 | 0.908416491596638 |
| HL-18 and HL-53 | 0.925551470588235 | HL-51 and HL-57 | 0.908416491596638 |
| HL-10 and HL-13 | 0.925518644957983 | HL-8 and HL-32 | 0.908383665966387 |
| HL-1 and HL-56 | 0.925485819327731 | HL-3 and HL-25 | 0.908350840336134 |
| HL-3 and HL-21 | 0.925420168067227 | HL-12 and HL-45 | 0.908350840336134 |
| HL-1 and HL-16 | 0.925190388655463 | HL-9 and HL-53 | 0.908318014705882 |
| HL-3 and HL-22 | 0.92515756302521 | HL-28 and HL-53 | 0.90828518907563 |
| HL-4 and HL-13 | 0.924960609243697 | HL-14 and HL-57 | 0.908219537815126 |
| HL-5 and HL-21 | 0.924960609243697 | HL-8 and HL-15 | 0.908088235294118 |
| HL-1 and HL-7 | 0.924796481092437 | HL-9 and HL-13 | 0.907924107142857 |
| HL-4 and HL-22 | 0.924730829831933 | HL-7 and HL-8 | 0.907891281512605 |
| HL-5 and HL-10 | 0.924698004201681 | HL-26 and HL-31 | 0.907825630252101 |
| HL-10 and HL-46 | 0.924665178571429 | HL-21 and HL-27 | 0.907694327731092 |
| HL-4 and HL-14 | 0.924501050420168 | HL-21 and HL-37 | 0.907694327731092 |
| HL-5 and HL-25 | 0.924435399159664 | HL-22 and HL-47 | 0.907694327731092 |
| HL-35 and HL-53 | 0.924402573529412 | HL-23 and HL-53 | 0.907628676470588 |
| HL-8 and HL-22 | 0.924238445378151 | HL-2 and HL-9 | 0.907563025210084 |
| HL-12 and HL-26 | 0.924041491596639 | HL-8 and HL-31 | 0.907563025210084 |
| HL-5 and HL-14 | 0.924008665966386 | HL-14 and HL-22 | 0.907563025210084 |
| HL-3 and HL-17 | 0.923713235294118 | HL-5 and HL-47 | 0.90749737394958 |
| HL-9 and HL-10 | 0.923384978991596 | HL-9 and HL-14 | 0.90749737394958 |
| HL-22 and HL-53 | 0.923319327731092 | HL-8 and HL-37 | 0.907431722689076 |
| HL-18 and HL-26 | 0.923253676470588 | HL-32 and HL-57 | 0.907431722689075 |
| HL-11 and HL-57 | 0.922859768907563 | HL-21 and HL-45 | 0.907300420168067 |
| HL-1 and HL-44 | 0.922794117647059 | HL-27 and HL-45 | 0.906906512605042 |
| HL-5 and HL-22 | 0.922728466386554 | HL-4 and HL-12 | 0.906808035714286 |
| HL-1 and HL-38 | 0.92266281512605 | HL-3 and HL-44 | 0.906775210084034 |
| HL-10 and HL-26 | 0.922465861344538 | HL-4 and HL-20 | 0.906709558823529 |
| HL-4 and HL-25 | 0.922137605042017 | HL-15 and HL-57 | 0.906709558823529 |
| HL-2 and HL-3 | 0.921973476890756 | HL-14 and HL-32 | 0.906578256302521 |
| HL-5 and HL-8 | 0.921842174369748 | HL-11 and HL-27 | 0.906545430672269 |
| HL-4 and HL-35 | 0.921678046218487 | HL-28 and HL-45 | 0.906446953781513 |
| HL-5 and HL-9 | 0.921448266806723 | HL-2 and HL-25 | 0.906315651260504 |
| HL-4 and HL-27 | 0.921382615546219 | HL-2 and HL-27 | 0.90625 |
| HL-4 and HL-45 | 0.921382615546218 | HL-4 and HL-17 | 0.90625 |
| HL-8 and HL-10 | 0.921382615546218 | HL-13 and HL-56 | 0.905921743697479 |
| HL-5 and HL-53 | 0.92062762605042 | HL-10 and HL-47 | 0.905856092436975 |
| HL-4 and HL-47 | 0.920594800420168 | HL-41 and HL-57 | 0.905856092436975 |
| HL-8 and HL-17 | 0.920594800420168 | HL-11 and HL-45 | 0.90579044117647 |
| HL-18 and HL-22 | 0.920529149159664 | HL-2 and HL-4 | 0.905593487394958 |
| HL-8 and HL-57 | 0.920430672268908 | HL-10 and HL-31 | 0.905593487394958 |
| HL-9 and HL-57 | 0.920299369747899 | HL-4 and HL-23 | 0.905560661764706 |
| HL-22 and HL-35 | 0.920299369747899 | HL-9 and HL-45 | 0.905527836134454 |
| HL-8 and HL-47 | 0.920102415966387 | HL-46 and HL-57 | 0.905462184873949 |
| HL-8 and HL-20 | 0.92000393907563 | HL-4 and HL-51 | 0.905396533613446 |
| HL-21 and HL-26 | 0.919971113445378 | HL-13 and HL-46 | 0.905265231092437 |
| HL-3 and HL-9 | 0.919774159663865 | HL-2 and HL-35 | 0.905199579831933 |
| HL-8 and HL-35 | 0.919511554621849 | HL-14 and HL-45 | 0.905166754201681 |
| HL-14 and HL-26 | 0.91938025210084 | HL-18 and HL-32 | 0.905035451680672 |
| HL-26 and HL-35 | 0.919248949579832 | HL-9 and HL-18 | 0.904969800420168 |
| HL-4 and HL-18 | 0.919051995798319 | HL-11 and HL-26 | 0.904936974789916 |
| HL-11 and HL-53 | 0.919051995798319 | HL-2 and HL-12 | 0.904805672268908 |
| HL-37 and HL-53 | 0.919019170168067 | HL-4 and HL-56 | 0.904805672268908 |
| HL-1 and HL-39 | 0.918887867647059 | HL-22 and HL-51 | 0.904674369747899 |
| HL-1 and HL-6 | 0.918855042016807 | HL-11 and HL-12 | 0.904477415966386 |
| HL-5 and HL-35 | 0.91875656512605 | HL-13 and HL-31 | 0.904411764705882 |
| HL-17 and HL-57 | 0.918723739495799 | HL-18 and HL-25 | 0.904411764705882 |
| HL-3 and HL-20 | 0.918658088235294 | HL-1 and HL-42 | 0.904313287815127 |
| HL-26 and HL-27 | 0.918625262605042 | HL-2 and HL-33 | 0.904017857142857 |
| HL-47 and HL-53 | 0.918526785714286 | HL-2 and HL-51 | 0.903952205882353 |
| HL-25 and HL-26 | 0.918461134453782 | HL-13 and HL-32 | 0.903952205882353 |
| HL-3 and HL-32 | 0.918264180672269 | HL-8 and HL-33 | 0.903886554621849 |
| HL-14 and HL-53 | 0.917870273109244 | HL-33 and HL-45 | 0.903820903361345 |
| HL-12 and HL-53 | 0.917837447478991 | HL-2 and HL-14 | 0.903820903361344 |
| HL-8 and HL-46 | 0.917804621848739 | HL-8 and HL-28 | 0.903623949579832 |
| HL-53 and HL-57 | 0.917607668067227 | HL-10 and HL-37 | 0.90359112394958 |
| HL-4 and HL-31 | 0.917279411764706 | HL-9 and HL-27 | 0.903394170168067 |
| HL-27 and HL-53 | 0.917246586134454 | HL-1 and HL-50 | 0.903361344537816 |
| HL-3 and HL-56 | 0.917148109243697 | HL-5 and HL-37 | 0.903230042016807 |
| HL-33 and HL-53 | 0.917082457983193 | HL-54 and HL-55 | 0.903230042016807 |
| HL-2 and HL-45 | 0.916819852941176 | HL-11 and HL-22 | 0.903098739495798 |
| HL-3 and HL-57 | 0.916819852941176 | HL-20 and HL-53 | 0.902836134453781 |
| HL-21 and HL-22 | 0.916622899159664 | HL-49 and HL-53 | 0.902540703781513 |
| HL-1 and HL-52 | 0.916491596638656 | HL-56 and HL-57 | 0.90250787815126 |
| HL-2 and HL-11 | 0.916491596638655 | HL-8 and HL-16 | 0.902048319327731 |
| HL-5 and HL-18 | 0.916491596638655 | HL-22 and HL-27 | 0.902048319327731 |
| HL-13 and HL-18 | 0.916261817226891 | HL-54 and HL-57 | 0.902048319327731 |
| HL-4 and HL-33 | 0.916130514705882 | HL-7 and HL-21 | 0.902015493697479 |
| HL-2 and HL-13 | 0.915966386554622 | HL-21 and HL-31 | 0.901917016806723 |
| HL-5 and HL-12 | 0.915966386554622 | HL-10 and HL-54 | 0.901785714285715 |
| HL-5 and HL-20 | 0.915966386554622 | HL-22 and HL-49 | 0.901785714285714 |
| HL-26 and HL-47 | 0.915900735294118 | HL-2 and HL-56 | 0.90172006302521 |
| HL-3 and HL-37 | 0.915703781512605 | HL-10 and HL-44 | 0.90172006302521 |
| HL-26 and HL-32 | 0.915703781512605 | HL-23 and HL-45 | 0.901588760504202 |
| HL-4 and HL-57 | 0.915572478991596 | HL-3 and HL-7 | 0.901457457983194 |
| HL-3 and HL-13 | 0.915506827731092 | HL-22 and HL-23 | 0.901457457983193 |
| HL-8 and HL-56 | 0.915506827731092 | HL-13 and HL-15 | 0.901391806722689 |
| HL-45 and HL-57 | 0.915441176470588 | HL-4 and HL-40 | 0.901358981092437 |
| HL-45 and HL-53 | 0.91530987394958 | HL-5 and HL-36 | 0.901326155462185 |
| HL-10 and HL-14 | 0.915112920168067 | HL-4 and HL-38 | 0.901227678571428 |
| HL-18 and HL-45 | 0.915112920168067 | HL-2 and HL-37 | 0.901194852941176 |
| HL-26 and HL-57 | 0.915047268907563 | HL-48 and HL-54 | 0.901129201680672 |
| HL-2 and HL-10 | 0.914915966386555 | HL-53 and HL-56 | 0.900997899159664 |
| HL-2 and HL-18 | 0.914915966386555 | HL-3 and HL-16 | 0.900965073529412 |
| HL-3 and HL-46 | 0.914522058823529 | HL-4 and HL-16 | 0.90093224789916 |
| HL-2 and HL-26 | 0.914390756302521 | HL-8 and HL-39 | 0.90093224789916 |
| HL-13 and HL-21 | 0.914325105042017 | HL-9 and HL-25 | 0.900768119747899 |
| HL-8 and HL-14 | 0.914292279411765 | HL-2 and HL-32 | 0.90063681722689 |
| HL-3 and HL-31 | 0.914259453781513 | HL-20 and HL-57 | 0.900603991596638 |
| HL-4 and HL-32 | 0.9140625 | HL-21 and HL-35 | 0.900571165966387 |
| HL-47 and HL-57 | 0.913996848739496 | HL-48 and HL-57 | 0.900538340336134 |
| HL-1 and HL-41 | 0.913931197478992 | HL-10 and HL-41 | 0.900505514705882 |
| HL-8 and HL-12 | 0.913799894957983 | HL-3 and HL-14 | 0.90047268907563 |
| HL-4 and HL-37 | 0.913635766806723 | HL-42 and HL-54 | 0.90047268907563 |
| HL-13 and HL-45 | 0.91343881302521 | HL-47 and HL-54 | 0.900407037815126 |
| HL-28 and HL-57 | 0.91327468487395 | HL-5 and HL-42 | 0.900341386554622 |
| HL-21 and HL-57 | 0.913209033613445 | HL-50 and HL-57 | 0.900341386554622 |
| HL-3 and HL-12 | 0.913044905462185 | HL-7 and HL-54 | 0.900275735294118 |
| HL-39 and HL-57 | 0.913012079831933 | HL-13 and HL-20 | 0.900275735294118 |
| HL-10 and HL-12 | 0.912946428571429 | HL-5 and HL-32 | 0.900210084033613 |
| HL-10 and HL-20 | 0.912946428571429 | HL-3 and HL-35 | 0.900177258403361 |
| HL-12 and HL-57 | 0.912946428571428 | HL-7 and HL-10 | 0.90014443277311 |
| HL-11 and HL-37 | 0.912880777310924 | HL-2 and HL-41 | 0.900144432773109 |
| HL-3 and HL-49 | 0.912847951680672 | HL-52 and HL-54 | 0.900013130252101 |
| HL-7 and HL-57 | 0.91281512605042 | | |

TABLE 8
AUC above 0.95 are obtained when determining low gut diversity by detecting the
presence or absence of 50 bacterial genes from the given combination of 3 bacterial species.

| Combination of | | Combination of | |
|---|---|---|---|
| bacterial species | AUC | bacterial species | AUC |
| HL-8 and HL-26 and | 0.966123949579832 | HL-1 and HL-3 and HL-13 | 0.953321953781513 |
| HL-53 | | | |
| HL-1 and HL-5 and | 0.964778098739496 | HL-1 and HL-5 and HL-14 | 0.953256302521009 |
| HL-10 | | | |
| HL-8 and HL-13 and | 0.96297268907563 | HL-4 and HL-5 and HL-17 | 0.953157825630253 |
| HL-26 | | | |
| HL-3 and HL-8 and | 0.962841386554622 | HL-4 and HL-10 and HL-26 | 0.953125 |
| HL-26 | | | |
| HL-1 and HL-3 and | 0.962349002100841 | HL-10 and HL-21 and HL-27 | 0.953125 |
| HL-5 | | | |
| HL-1 and HL-5 and | 0.961790966386555 | HL-3 and HL-10 and HL-11 | 0.953059348739495 |
| HL-28 | | | |
| HL-1 and HL-5 and | 0.960740546218487 | HL-8 and HL-11 and HL-26 | 0.952993697478992 |
| HL-17 | | | |
| HL-1 and HL-5 and | 0.960707720588236 | HL-3 and HL-21 and HL-53 | 0.952960871848739 |
| HL-35 | | | |
| HL-1 and HL-5 and | 0.960707720588236 | HL-1 and HL-3 and HL-33 | 0.952928046218487 |
| HL-47 | | | |
| HL-1 and HL-5 and | 0.96031381302521 | HL-1 and HL-3 and HL-23 | 0.952895220588235 |
| HL-8 | | | |
| HL-1 and HL-4 and | 0.959887079831933 | HL-1 and HL-28 and HL-47 | 0.952862394957984 |
| HL-5 | | | |
| HL-3 and HL-26 and | 0.959722951680672 | HL-4 and HL-5 and HL-11 | 0.952862394957983 |
| HL-53 | | | |
| HL-1 and HL-3 and | 0.959591649159664 | HL-10 and HL-35 and HL-53 | 0.952862394957983 |
| HL-10 | | | |
| HL-1 and HL-5 and | 0.959361869747899 | HL-1 and HL-8 and HL-47 | 0.952796743697479 |
| HL-11 | | | |
| HL-1 and HL-5 and | 0.959132090336135 | HL-10 and HL-13 and HL-26 | 0.952796743697479 |
| HL-25 | | | |
| HL-1 and HL-5 and | 0.959099264705883 | HL-8 and HL-25 and HL-26 | 0.952731092436975 |
| HL-33 | | | |
| HL-1 and HL-5 and | 0.958967962184874 | HL-8 and HL-26 and HL-45 | 0.952731092436975 |
| HL-26 | | | |
| HL-4 and HL-8 and | 0.958967962184874 | HL-1 and HL-3 and HL-25 | 0.952698266806723 |
| HL-26 | | | |
| HL-8 and HL-21 and | 0.95890231092437 | HL-1 and HL-8 and HL-28 | 0.952665441176471 |
| HL-53 | | | |
| HL-10 and HL-21 and | 0.95890231092437 | HL-1 and HL-10 and HL-36 | 0.952665441176471 |
| HL-53 | | | |
| HL-1 and HL-5 and | 0.958869485294118 | HL-10 and HL-11 and HL-53 | 0.95266544117647 |
| HL-22 | | | |
| HL-1 and HL-8 and | 0.958869485294118 | HL-1 and HL-3 and HL-27 | 0.952566964285715 |
| HL-10 | | | |
| HL-5 and HL-10 and | 0.958803834033613 | HL-7 and HL-10 and HL-21 | 0.952534138655463 |
| HL-17 | | | |
| HL-1 and HL-5 and | 0.95873818277311 | HL-3 and HL-5 and HL-10 | 0.952534138655462 |
| HL-12 | | | |
| HL-1 and HL-5 and | 0.958377100840337 | HL-13 and HL-35 and HL-53 | 0.952402836134454 |
| HL-13 | | | |
| HL-1 and HL-5 and | 0.958377100840337 | HL-10 and HL-27 and HL-53 | 0.952370010504202 |
| HL-27 | | | |
| HL-1 and HL-10 and | 0.95811449579832 | HL-3 and HL-13 and HL-53 | 0.95233718487395 |
| HL-28 | | | |
| HL-1 and HL-10 and | 0.958048844537815 | HL-10 and HL-11 and HL-37 | 0.952337184873949 |
| HL-47 | | | |
| HL-8 and HL-10 and | 0.957983193277311 | HL-10 and HL-13 and HL-21 | 0.952304359243697 |
| HL-11 | | | |
| HL-8 and HL-21 and | 0.957753413865546 | HL-7 and HL-8 and HL-21 | 0.952140231092437 |
| HL-26 | | | |
| HL-8 and HL-26 and | 0.95765493697479 | HL-3 and HL-8 and HL-45 | 0.952074579831933 |
| HL-47 | | | |
| HL-1 and HL-5 and | 0.957589285714286 | HL-10 and HL-11 and HL-26 | 0.952074579831933 |
| HL-32 | | | |
| HL-1 and HL-5 and | 0.957523634453781 | HL-1 and HL-8 and HL-26 | 0.951943277310924 |
| HL-9 | | | |
| HL-8 and HL-13 and | 0.957523634453781 | HL-5 and HL-11 and HL-26 | 0.951943277310924 |
| HL-53 | | | |
| HL-1 and HL-10 and | 0.957425157563025 | HL-1 and HL-8 and HL-35 | 0.951844800420168 |
| HL-22 | | | |
| HL-13 and HL-26 and | 0.957359506302521 | HL-10 and HL-11 and HL-13 | 0.951811974789916 |
| HL-53 | | | |
| HL-1 and HL-5 and | 0.957326680672269 | HL-5 and HL-8 and HL-26 | 0.951779149159664 |
| HL-53 | | | |
| HL-1 and HL-5 and | 0.957293855042017 | HL-5 and HL-10 and HL-13 | 0.951779149159664 |
| HL-23 | | | |
| HL-8 and HL-12 and | 0.957293855042017 | HL-1 and HL-3 and HL-4 | 0.951680672268907 |
| HL-26 | | | |
| HL-3 and HL-8 and | 0.957261029411765 | HL-1 and HL-5 and HL-39 | 0.951647846638656 |
| HL-11 | | | |
| HL-1 and HL-10 and | 0.957195378151261 | HL-1 and HL-3 and HL-12 | 0.951615021008404 |
| HL-35 | | | |
| HL-3 and HL-8 and | 0.956998424369748 | HL-1 and HL-3 and HL-37 | 0.951615021008403 |
| HL-53 | | | |
| HL-3 and HL-10 and | 0.956998424369748 | HL-1 and HL-10 and HL-11 | 0.951615021008403 |
| HL-53 | | | |
| HL-1 and HL-5 and | 0.956965598739496 | HL-1 and HL-3 and HL-51 | 0.951582195378151 |
| HL-21 | | | |
| HL-1 and HL-10 and | 0.956932773109244 | HL-1 and HL-3 and HL-53 | 0.951582195378151 |
| HL-13 | | | |
| HL-1 and HL-10 and | 0.956899947478992 | HL-1 and HL-5 and HL-7 | 0.951549369747899 |
| HL-27 | | | |
| HL-5 and HL-8 and | 0.95686712184874 | HL-10 and HL-11 and HL-27 | 0.951549369747899 |
| HL-11 | | | |
| HL-5 and HL-8 and | 0.956801470588235 | HL-1 and HL-10 and HL-46 | 0.951516544117647 |
| HL-17 | | | |
| HL-8 and HL-26 and | 0.956801470588235 | HL-1 and HL-13 and HL-47 | 0.951450892857143 |
| HL-35 | | | |
| HL-1 and HL-5 and | 0.956702993697479 | HL-1 and HL-8 and HL-13 | 0.951418067226891 |
| HL-51 | | | |
| HL-1 and HL-5 and | 0.956670168067227 | HL-1 and HL-5 and HL-6 | 0.951352415966387 |
| HL-36 | | | |
| HL-1 and HL-5 and | 0.956538865546219 | HL-1 and HL-8 and HL-22 | 0.951221113445378 |
| HL-37 | | | |
| HL-1 and HL-4 and | 0.956473214285714 | HL-4 and HL-13 and HL-26 | 0.951221113445378 |
| HL-10 | | | |
| HL-1 and HL -3 and | 0.956309086134454 | HL-5 and HL-13 and HL-17 | 0.951221113445378 |
| HL-8 | | | |
| HL-1 and HL-5 and | 0.956276260504202 | HL-10 and HL-11 and HL-22 | 0.951221113445378 |
| HL-40 | | | |
| HL-10 and HL-21 and | 0.956210609243697 | HL-1 and HL-22 and HL-47 | 0.951188287815126 |
| HL-26 | | | |
| HL-1 and HL-10 and | 0.956177783613446 | HL-1 and HL-3 and HL-18 | 0.951155462184874 |
| HL-12 | | | |
| HL-8 and HL-26 and | 0.956079306722689 | HL-8 and HL-26 and HL-32 | 0.951155462184874 |
| HL-27 | | | |
| HL-1 and HL-10 and | 0.955980829831933 | HL-1 and HL-8 and HL-33 | 0.95108981092437 |
| HL-26 | | | |
| HL-5 and HL-10 and | 0.955882352941176 | HL-5 and HL-8 and HL-13 | 0.951024159663865 |
| HL-11 | | | |
| HL-1 and HL-10 and | 0.955816701680672 | HL-5 and HL-13 and HL-26 | 0.950958508403361 |
| HL-23 | | | |
| HL-3 and HL-5 and | 0.955816701680672 | HL-4 and HL-26 and HL-53 | 0.950892857142857 |
| HL-17 | | | |
| HL-8 and HL-18 and | 0.95578387605042 | HL-8 and HL-26 and HL-31 | 0.950892857142857 |
| HL-26 | | | |
| HL-3 and HL-18 and | 0.955751050420168 | HL-8 and HL-27 and HL-53 | 0.950892857142857 |
| HL-26 | | | |
| HL-1 and HL-5 and | 0.955718224789917 | HL-22 and HL-26 and HL-47 | 0.950892857142857 |
| HL-45 | | | |
| HL-8 and HL-10 and | 0.955685399159664 | HL-1 and HL-5 and HL-16 | 0.950860031512605 |
| HL-53 | | | |
| HL-10 and HL-13 and | 0.955652573529412 | HL-1 and HL-13 and HL-28 | 0.950794380252101 |
| HL-53 | | | |
| HL-1 and HL-5 and | 0.955586922268908 | HL-1 and HL-26 and HL-28 | 0.950794380252101 |
| HL-31 | | | |
| HL-1 and HL-10 and | 0.955586922268908 | HL-1 and HL-26 and HL-47 | 0.950794380252101 |
| HL-33 | | | |
| HL-1 and HL-3 and | 0.955455619747899 | HL-26 and HL-27 and HL-53 | 0.950794380252101 |
| HL-28 | | | |
| HL-4 and HL-10 and | 0.955389968487395 | HL-1 and HL-3 and HL-32 | 0.950761554621849 |
| HL-21 | | | |
| HL-3 and HL-5 and | 0.955225840336134 | HL-8 and HL-10 and HL-26 | 0.950761554621849 |
| HL-26 | | | |
| HL-1 and HL-10 and | 0.955127363445378 | HL-8 and HL-10 and HL-21 | 0.950728728991596 |
| HL-37 | | | |
| HL-1 and HL-3 and | 0.955028886554622 | HL-8 and HL-18 and HL-53 | 0.950728728991596 |
| HL-22 | | | |
| HL-1 and HL-5 and | 0.954930409663866 | HL-13 and HL-21 and HL-53 | 0.950728728991596 |
| HL-18 | | | |
| HL-1 and HL-10 and | 0.954930409663866 | HL-3 and HL-10 and HL-18 | 0.950695903361345 |
| HL-25 | | | |
| HL-1 and HL-10 and | 0.954930409663866 | HL-10 and HL-17 and HL-53 | 0.950695903361345 |
| HL-51 | | | |
| HL-25 and HL-26 and | 0.954766281512605 | HL-1 and HL-5 and HL-49 | 0.950695903361344 |
| HL-53 | | | |
| HL-1 and HL-10 and | 0.954634978991597 | HL-1 and HL-8 and HL-27 | 0.950663077731093 |
| HL-32 | | | |
| HL-1 and HL-10 and | 0.954569327731093 | HL-1 and HL-5 and HL-15 | 0.950663077731092 |
| HL-21 | | | |
| HL-3 and HL-4 and | 0.95453650210084 | HL-5 and HL-11 and HL-25 | 0.950630252100841 |
| HL-26 | | | |
| HL-8 and HL-22 and | 0.954306722689076 | HL-1 and HL-10 and HL-45 | 0.950498949579832 |
| HL-26 | | | |
| HL-1 and HL-10 and | 0.954273897058824 | HL-8 and HL-11 and HL-13 | 0.950498949579832 |
| HL-40 | | | |
| HL-10 and HL-26 and | 0.954175420168067 | HL-10 and HL-11 and HL-21 | 0.950498949579832 |
| HL-53 | | | |
| HL-1 and HL-5 and | 0.954109768907563 | HL-1 and HL-8 and HL-25 | 0.95046612394958 |
| HL-57 | | | |
| HL-1 and HL-5 and | 0.953978466386555 | HL-4 and HL-26 and HL-35 | 0.950433298319328 |
| HL-46 | | | |
| HL-1 and HL-3 and | 0.953847163865546 | HL-8 and HL-26 and HL-28 | 0.950433298319328 |
| HL-26 | | | |
| HL-1 and HL-3 and | 0.953814338235294 | HL-8 and HL-26 and HL-51 | 0.950433298319328 |
| HL-35 | | | |
| HL-3 and HL-10 and | 0.953715861344538 | HL-10 and HL-22 and HL-53 | 0.950433298319328 |
| HL-21 | | | |
| HL-5 and HL-11 and | 0.953715861344538 | HL-5 and HL-11 and HL-57 | 0.950367647058824 |
| HL-13 | | | |
| HL-10 and HL-25 and | 0.953715861344538 | HL-8 and HL-11 and HL-53 | 0.950367647058824 |
| HL-53 | | | |
| HL-3 and HL-18 and | 0.953617384453781 | HL-3 and HL-8 and HL-21 | 0.950367647058823 |
| HL-53 | | | |
| HL-4 and HL-10 and | 0.953584558823529 | HL-26 and HL-35 and HL-53 | 0.950367647058823 |
| HL-11 | | | |
| HL-1 and HL-10 and | 0.953551733193278 | HL-8 and HL-35 and HL-53 | 0.950334821428571 |
| HL-53 | | | |
| HL-1 and HL-10 and | 0.953551733193277 | HL-1 and HL-22 and HL-28 | 0.950269170168067 |
| HL-31 | | | |
| HL-5 and HL-10 and | 0.953518907563025 | HL-22 and HL-25 and HL-26 | 0.950236344537815 |
| HL-57 | | | |
| HL-10 and HL-21 and | 0.953518907563025 | HL-1 and HL-3 and HL-40 | 0.950203518907563 |
| HL-22 | | | |
| HL-1 and HL-3 and | 0.953486081932774 | HL-1 and HL-9 and HL-10 | 0.950105042016807 |
| HL-47 | | | |
| HL-1 and HL-10 and | 0.953387605042017 | HL-3 and HL-8 and HL-18 | 0.950105042016807 |
| HL-17 | | | |
| HL-1 and HL-10 and | 0.953387605042017 | HL-5 and HL-8 and HL-21 | 0.950105042016807 |
| HL-18 | | | |
| HL-3 and HL-22 and | 0.953354779411765 | HL-3 and HL-8 and HL-9 | 0.950105042016806 |
| HL-26 | | | |
| HL-3 and HL-5 and | 0.953354779411764 | HL-5 and HL-17 and HL-45 | 0.950039390756303 |
| HL-11 | | | |

TABLE 9
AUC above 0.96 are obtained when determining low gut
diversity by detecting the presence or absence of 50 bacterial
genes from the given combination of 4 bacterial species.

| Combination of clusters | AUC |
|---|---|
| HL-3; HL-8; HL-26 and HL-53 | 0.975380777310924 |
| HL-8; HL-13; HL-26 and HL-53 | 0.974658613445378 |
| HL-8; HL-13; HL-26 and HL-35 | 0.972098214285714 |
| HL-8; HL-26; HL-27 and HL-53 | 0.971179096638655 |
| HL-8; HL-25; HL-26 and HL-53 | 0.970522584033613 |
| HL-1; HL-5; HL-10 and HL-17 | 0.970391281512605 |
| HL-8; HL-26; HL-35 and HL-53 | 0.970161502100841 |
| HL-8; HL-13; HL-26 and HL-47 | 0.969800420168067 |
| HL-8; HL-10; HL-26 and HL-53 | 0.969669117647059 |
| HL-8; HL-21; HL-26 and HL-53 | 0.969669117647059 |
| HL-3; HL-8; HL-26 and HL-51 | 0.969603466386555 |
| HL-5; HL-8; HL-10 and HL-17 | 0.96937368697479 |
| HL-8; HL-13; HL-26 and HL-51 | 0.969209558823529 |
| HL-8; HL-26; HL-33 and HL-53 | 0.968881302521009 |
| HL-8; HL-13; HL-18 and HL-26 | 0.968881302521008 |
| HL-8; HL-26; HL-47 and HL-53 | 0.968815651260504 |
| HL-5; HL-10; HL-17 and HL-22 | 0.968553046218488 |
| HL-1; HL-4; HL-5 and HL-10 | 0.968290441176471 |
| HL-1; HL-3; HL-5 and HL-17 | 0.968224789915966 |
| HL-8; HL-12; HL-26 and HL-53 | 0.968224789915966 |
| HL-5; HL-8; HL-17 and HL-45 | 0.968159138655462 |
| HL-8; HL-10; HL-13 and HL-26 | 0.968159138655462 |
| HL-3; HL-8; HL-13 and HL-26 | 0.968093487394958 |
| HL-8; HL-26; HL-51 and HL-53 | 0.968027836134454 |
| HL-1; HL-5; HL-8 and HL-17 | 0.96796218487395 |
| HL-3; HL-8; HL-26 and HL-35 | 0.967929359243697 |
| HL-8; HL-26; HL-37 and HL-53 | 0.967863707983194 |
| HL-8; HL-26; HL-27 and HL-35 | 0.967732405462185 |
| HL-8; HL-10; HL-21 and HL-53 | 0.967699579831933 |
| HL-1; HL-3; HL-5 and HL-10 | 0.967633928571429 |
| HL-3; HL-5; HL-10 and HL-17 | 0.967633928571429 |
| HL-1; HL-5; HL-8 and HL-10 | 0.967568277310925 |
| HL-8; HL-26; HL-31 and HL-53 | 0.96750262605042 |
| HL-1; HL-5; HL-10 and HL-27 | 0.967469800420168 |
| HL-5; HL-10; HL-13 and HL-17 | 0.967436974789916 |
| HL-3; HL-8; HL-10 and HL-26 | 0.967305672268908 |
| HL-1; HL-5; HL-10 and HL-35 | 0.967240021008404 |
| HL-1; HL-5; HL-10 and HL-32 | 0.967240021008403 |
| HL-1; HL-5; HL-10 and HL-47 | 0.967108718487395 |
| HL-5; HL-10; HL-17 and HL-27 | 0.966911764705883 |
| HL-1; HL-5; HL-10 and HL-36 | 0.966911764705882 |
| HL-3; HL-8; HL-26 and HL-47 | 0.966911764705882 |
| HL-8; HL-10; HL-27 and HL-53 | 0.966911764705882 |
| HL-4; HL-8; HL-26 and HL-53 | 0.966878939075631 |
| HL-3; HL-8; HL-18 and HL-26 | 0.966846113445378 |
| HL-1; HL-5; HL-10 and HL-26 | 0.966813287815126 |
| HL-8; HL-10; HL-13 and HL-53 | 0.966813287815126 |
| HL-1; HL-5; HL-10 and HL-12 | 0.966780462184874 |
| HL-1; HL-5; HL-17 and HL-28 | 0.966780462184874 |
| HL-3; HL-4; HL-8 and HL-26 | 0.966780462184874 |
| HL-1; HL-5; HL-10 and HL-13 | 0.96671481092437 |
| HL-8; HL-10; HL-17 and HL-53 | 0.966583508403361 |
| HL-3; HL-8; HL-10 and HL-53 | 0.966550682773109 |
| HL-1; HL-5; HL-10 and HL-28 | 0.966485031512605 |
| HL-5; HL-8; HL-13 and HL-17 | 0.966320903361345 |
| HL-3; HL-5; HL-8 and HL-17 | 0.966320903361344 |
| HL-8; HL-13; HL-26 and HL-28 | 0.966320903361344 |
| HL-8; HL-26; HL-27 and HL-47 | 0.966320903361344 |
| HL-1; HL-5; HL-10 and HL-22 | 0.966255252100841 |
| HL-1; HL-5; HL-17 and HL-47 | 0.96625525210084 |
| HL-8; HL-13; HL-26 and HL-37 | 0.966156775210084 |
| HL-8; HL-22; HL-26 and HL-53 | 0.966156775210084 |
| HL-8; HL-10; HL-11 and HL-21 | 0.966123949579832 |
| HL-1; HL-3; HL-5 and HL-28 | 0.96609112394958 |
| HL-1; HL-5; HL-10 and HL-25 | 0.966058298319328 |
| HL-10; HL-25; HL-26 and HL-53 | 0.966058298319328 |
| HL-5; HL-8; HL-11 and HL-26 | 0.965926995798319 |
| HL-8; HL-13; HL-25 and HL-26 | 0.965926995798319 |
| HL-5; HL-10; HL-17 and HL-45 | 0.965861344537815 |
| HL-10; HL-13; HL-21 and HL-53 | 0.965762867647059 |
| HL-1; HL-3; HL-5 and HL-35 | 0.965730042016807 |
| HL-4; HL-5; HL-10 and HL-17 | 0.965730042016807 |
| HL-4; HL-8; HL-13 and HL-26 | 0.965730042016807 |
| HL-8; HL-10; HL-11 and HL-26 | 0.965730042016807 |
| HL-8; HL-10; HL-11 and HL-27 | 0.965730042016806 |
| HL-1; HL-5; HL-10 and HL-21 | 0.965664390756303 |
| HL-3; HL-8; HL-12 and HL-26 | 0.965664390756303 |
| HL-3; HL-8; HL-22 and HL-26 | 0.965664390756302 |
| HL-1; HL-5; HL-10 and HL-23 | 0.965598739495799 |
| HL-3; HL-8; HL-21 and HL-53 | 0.965598739495798 |
| HL-3; HL-10; HL-21 and HL-53 | 0.965598739495798 |
| HL-4; HL-10; HL-21 and HL-27 | 0.965598739495798 |
| HL-8; HL-18; HL-26 and HL-53 | 0.965598739495798 |
| HL-1; HL-5; HL-10 and HL-33 | 0.965565913865547 |
| HL-1; HL-5; HL-10 and HL-37 | 0.965500262605042 |
| HL-3; HL-8; HL-26 and HL-37 | 0.965500262605042 |
| HL-4; HL-8; HL-26 and HL-35 | 0.965500262605042 |
| HL-3; HL-8; HL-26 and HL-32 | 0.96546743697479 |
| HL-4; HL-10; HL-21 and HL-26 | 0.96546743697479 |
| HL-1; HL-5; HL-10 and HL-51 | 0.965434611344538 |
| HL-1; HL-5; HL-28 and HL-47 | 0.965401785714286 |
| HL-8; HL-13; HL-26 and HL-33 | 0.965401785714286 |
| HL-1; HL-5; HL-10 and HL-40 | 0.965368960084034 |
| HL-3; HL-13; HL-26 and HL-53 | 0.965368960084034 |
| HL-5; HL-10; HL-17 and HL-25 | 0.965368960084034 |
| HL-1; HL-4; HL-5 and HL-28 | 0.965336134453782 |
| HL-1; HL-5; HL-10 and HL-11 | 0.965336134453781 |
| HL-8; HL-26; HL-40 and HL-53 | 0.965336134453781 |
| HL-5; HL-8; HL-11 and HL-17 | 0.965270483193278 |
| HL-8; HL-21; HL-26 and HL-27 | 0.965270483193277 |
| HL-4; HL-5; HL-8 and HL-17 | 0.965139180672269 |
| HL-4; HL-10; HL-21 and HL-53 | 0.965106355042017 |
| HL-5; HL-10; HL-17 and HL-26 | 0.965106355042017 |
| HL-10; HL-13; HL-26 and HL-53 | 0.965073529411765 |
| HL-3; HL-8; HL-26 and HL-45 | 0.965007878151261 |
| HL-1; HL-3; HL-4 and HL-5 | 0.964942226890757 |
| HL-5; HL-10; HL-11 and HL-17 | 0.964942226890757 |
| HL-3; HL-8; HL-26 and HL-40 | 0.964942226890756 |
| HL-5; HL-8; HL-17 and HL-26 | 0.964942226890756 |
| HL-5; HL-10; HL-17 and HL-53 | 0.964942226890756 |
| HL-8; HL-13; HL-35 and HL-53 | 0.964942226890756 |
| HL-1; HL-5; HL-10 and HL-53 | 0.964909401260505 |
| HL-1; HL-5; HL-8 and HL-28 | 0.964876575630253 |
| HL-4; HL-8; HL-21 and HL-26 | 0.964876575630252 |
| HL-8; HL-26; HL-28 and HL-53 | 0.964876575630252 |
| HL-1; HL-3; HL-5 and HL-8 | 0.96484375 |
| HL-3; HL-5; HL-8 and HL-26 | 0.96484375 |
| HL-3; HL-8; HL-11 and HL-26 | 0.964810924369748 |
| HL-8; HL-10; HL-11 and HL-35 | 0.964810924369748 |
| HL-8; HL-12; HL-13 and HL-26 | 0.964810924369748 |
| HL-8; HL-12; HL-26 and HL-35 | 0.964810924369748 |
| HL-8; HL-13; HL-22 and HL-26 | 0.964810924369748 |
| HL-8; HL-23; HL-26 and HL-53 | 0.964810924369748 |
| HL-10; HL-13; HL-18 and HL-26 | 0.964745273109244 |
| HL-1; HL-5; HL-28 and HL-35 | 0.964712447478992 |
| HL-1; HL-5; HL-10 and HL-31 | 0.96467962184874 |
| HL-1; HL-5; HL-10 and HL-45 | 0.96467962184874 |
| HL-4; HL-8; HL-26 and HL-47 | 0.964679621848739 |
| HL-1; HL-3; HL-5 and HL-26 | 0.964646796218488 |
| HL-1; HL-5; HL-8 and HL-35 | 0.964613970588236 |
| HL-3; HL-8; HL-11 and HL-37 | 0.964613970588235 |
| HL-3; HL-5; HL-8 and HL-11 | 0.964548319327731 |
| HL-8; HL-18; HL-26 and HL-35 | 0.964548319327731 |
| HL-1; HL-3; HL-5 and HL-22 | 0.964482668067227 |
| HL-1; HL-3; HL-5 and HL-32 | 0.964482668067227 |
| HL-1; HL-5; HL-17 and HL-26 | 0.964482668067227 |
| HL-5; HL-10; HL-17 and HL-31 | 0.964482668067227 |
| HL-10; HL-21; HL-26 and HL-53 | 0.964482668067227 |
| HL-1; HL-3; HL-5 and HL-47 | 0.964449842436975 |
| HL-5; HL-8; HL-13 and HL-26 | 0.964449842436975 |
| HL-1; HL-5; HL-35 and HL-47 | 0.964417016806723 |
| HL-3; HL-5; HL-13 and HL-17 | 0.964417016806723 |
| HL-3; HL-8; HL-26 and HL-27 | 0.964417016806723 |
| HL-1; HL-3; HL-5 and HL-33 | 0.964384191176471 |
| HL-10; HL-13; HL-21 and HL-26 | 0.96438419117647 |
| HL-1; HL-5; HL-17 and HL-45 | 0.964351365546219 |
| HL-3; HL-10; HL-17 and HL-53 | 0.964351365546219 |
| HL-10; HL-21; HL-22 and HL-26 | 0.964351365546219 |
| HL-3; HL-8; HL-21 and HL-26 | 0.964351365546218 |
| HL-3; HL-10; HL-21 and HL-26 | 0.964351365546218 |
| HL-8; HL-21; HL-26 and HL-31 | 0.964351365546218 |
| HL-1; HL-5; HL-26 and HL-28 | 0.964285714285715 |
| HL-1; HL-5; HL-12 and HL-17 | 0.964285714285714 |
| HL-4; HL-8; HL-26 and HL-27 | 0.964252888655462 |
| HL-8; HL-22; HL-26 and HL-47 | 0.964252888655462 |
| HL-10; HL-21; HL-26 and HL-27 | 0.964252888655462 |
| HL-1; HL-4; HL-5 and HL-17 | 0.96422006302521 |
| HL-1; HL-4; HL-5 and HL-35 | 0.96422006302521 |
| HL-1; HL-5; HL-17 and HL-33 | 0.96422006302521 |
| HL-3; HL-10; HL-26 and HL-53 | 0.96422006302521 |
| HL-8; HL-10; HL-11 and HL-37 | 0.96422006302521 |
| HL-13; HL-26; HL-47 and HL-53 | 0.96422006302521 |
| HL-1; HL-3; HL-5 and HL-27 | 0.964187237394958 |
| HL-1; HL-5; HL-12 and HL-28 | 0.964154411764706 |
| HL-8; HL-10; HL-11 and HL-13 | 0.964154411764706 |
| HL-10; HL-15; HL-21 and HL-53 | 0.964154411764706 |
| HL-10; HL-21; HL-22 and HL-53 | 0.964154411764706 |
| HL-10; HL-21; HL-27 and HL-53 | 0.964154411764706 |
| HL-1; HL-3; HL-5 and HL-25 | 0.964121586134454 |
| HL-3; HL-18; HL-26 and HL-32 | 0.964121586134454 |
| HL-1; HL-3; HL-5 and HL-36 | 0.964088760504202 |
| HL-1; HL-5; HL-13 and HL-28 | 0.964088760504202 |
| HL-3; HL-8; HL-26 and HL-28 | 0.964088760504202 |
| HL-3; HL-8; HL-10 and HL-11 | 0.964088760504201 |
| HL-1; HL-3; HL-5 and HL-13 | 0.96405593487395 |
| HL-1; HL-5; HL-13 and HL-17 | 0.964023109243697 |
| HL-8; HL-10; HL-26 and HL-47 | 0.964023109243697 |
| HL-8; HL-13; HL-21 and HL-26 | 0.964023109243697 |
| HL-8; HL-13; HL-21 and HL-53 | 0.964023109243697 |
| HL-1; HL-5; HL-27 and HL-28 | 0.963990283613446 |
| HL-5; HL-10; HL-17 and HL-37 | 0.963990283613446 |
| HL-5; HL-8; HL-10 and HL-13 | 0.963990283613445 |
| HL-1; HL-4; HL-5 and HL-47 | 0.963957457983193 |
| HL-1; HL-5; HL-17 and HL-27 | 0.963957457983193 |
| HL-1; HL-5; HL-17 and HL-35 | 0.963957457983193 |
| HL-1; HL-5; HL-22 and HL-28 | 0.963924632352942 |
| HL-8; HL-10; HL-21 and HL-26 | 0.963924632352941 |
| HL-1; HL-5; HL-17 and HL-53 | 0.963891806722689 |
| HL-1; HL-5; HL-28 and HL-32 | 0.963891806722689 |
| HL-3; HL-8; HL-26 and HL-33 | 0.963891806722689 |
| HL-8; HL-10; HL-17 and HL-45 | 0.963891806722689 |
| HL-3; HL-8; HL-11 and HL-35 | 0.963826155462185 |
| HL-3; HL-18; HL-26 and HL-53 | 0.963826155462185 |
| HL-7; HL-10; HL-21 and HL-53 | 0.963826155462185 |
| HL-1; HL-3; HL-5 and HL-11 | 0.963760504201681 |
| HL-1; HL-4; HL-5 and HL-8 | 0.963760504201681 |
| HL-1; HL-5; HL-8 and HL-9 | 0.963760504201681 |
| HL-1; HL-5; HL-10 and HL-18 | 0.963760504201681 |
| HL-10; HL-21; HL-37 and HL-53 | 0.963760504201681 |
| HL-4; HL-8; HL-10 and HL-26 | 0.96376050420168 |
| HL-1; HL-3; HL-5 and HL-12 | 0.963727678571429 |
| HL-1; HL-5; HL-8 and HL-47 | 0.963727678571429 |
| HL-5; HL-10; HL-11 and HL-26 | 0.963694852941177 |
| HL-8; HL-13; HL-18 and HL-53 | 0.963694852941176 |
| HL-8; HL-13; HL-26 and HL-45 | 0.963694852941176 |
| HL-1; HL-5; HL-8 and HL-25 | 0.963662027310925 |
| HL-3; HL-7; HL-10 and HL-21 | 0.963662027310925 |
| HL-1; HL-3; HL-5 and HL-53 | 0.963596376050421 |
| HL-1; HL-5; HL-8 and HL-33 | 0.963596376050421 |
| HL-1; HL-5; HL-8 and HL-53 | 0.963596376050421 |
| HL-1; HL-5; HL-25 and HL-47 | 0.963596376050421 |
| HL-5; HL-10; HL-17 and HL-35 | 0.96359637605042 |
| HL-1; HL-5; HL-11 and HL-17 | 0.963563550420169 |
| HL-1; HL-5; HL-17 and HL-23 | 0.963563550420168 |
| HL-1; HL-5; HL-28 and HL-36 | 0.963563550420168 |
| HL-7; HL-8; HL-21 and HL-26 | 0.963563550420168 |
| HL-8; HL-10; HL-11 and HL-53 | 0.963563550420168 |
| HL-8; HL-13; HL-26 and HL-40 | 0.963563550420168 |
| HL-10; HL-13; HL-35 and HL-53 | 0.963563550420168 |
| HL-1; HL-5; HL-26 and HL-47 | 0.963530724789917 |
| HL-8; HL-12; HL-26 and HL-47 | 0.963530724789916 |
| HL-3; HL-5; HL-17 and HL-26 | 0.963497899159664 |
| HL-5; HL-8; HL-11 and HL-21 | 0.963497899159664 |
| HL-8; HL-26; HL-31 and HL-47 | 0.963497899159664 |
| HL-1; HL-5; HL-8 and HL-26 | 0.963465073529412 |
| HL-1; HL-5; HL-17 and HL-22 | 0.96343224789916 |
| HL-3; HL-8; HL-11 and HL-21 | 0.96343224789916 |
| HL-3; HL-22; HL-26 and HL-47 | 0.96343224789916 |
| HL-3; HL-25; HL-26 and HL-53 | 0.96343224789916 |
| HL-5; HL-8; HL-17 and HL-36 | 0.96343224789916 |
| HL-8; HL-11; HL-26 and HL-53 | 0.96343224789916 |
| HL-3; HL-8; HL-25 and HL-26 | 0.963432247899159 |
| HL-8; HL-13; HL-26 and HL-31 | 0.963432247899159 |
| HL-8; HL-21; HL-26 and HL-35 | 0.963432247899159 |
| HL-1; HL-5; HL-26 and HL-35 | 0.963399422268908 |
| HL-1; HL-5; HL-33 and HL-47 | 0.963399422268908 |
| HL-5; HL-8; HL-11 and HL-13 | 0.963366596638656 |
| HL-7; HL-8; HL-21 and HL-53 | 0.963366596638656 |
| HL-1; HL-5; HL-11 and HL-26 | 0.963366596638655 |
| HL-3; HL-5; HL-17 and HL-45 | 0.963366596638655 |
| HL-3; HL-8; HL-11 and HL-53 | 0.963366596638655 |
| HL-8; HL-21; HL-26 and HL-51 | 0.963366596638655 |
| HL-13; HL-26; HL-35 and HL-53 | 0.963366596638655 |
| HL-4; HL-8; HL-25 and HL-26 | 0.963333771008403 |
| HL-1; HL-5; HL-8 and HL-27 | 0.963300945378152 |
| HL-1; HL-5; HL-17 and HL-25 | 0.963300945378151 |
| HL-3; HL-4; HL-26 and HL-53 | 0.963300945378151 |
| HL-8; HL-13; HL-18 and HL-35 | 0.963300945378151 |
| HL-1; HL-5; HL-12 and HL-47 | 0.9632681197479 |
| HL-1; HL-5; HL-17 and HL-40 | 0.963235294117647 |
| HL-1; HL-5; HL-32 and HL-47 | 0.963235294117647 |
| HL-3; HL-5; HL-11 and HL-26 | 0.963235294117647 |
| HL-8; HL-22; HL-26 and HL-35 | 0.963235294117647 |
| HL-8; HL-10; HL-17 and HL-27 | 0.963202468487395 |
| HL-1; HL-4; HL-5 and HL-33 | 0.963169642857143 |
| HL-4; HL-8; HL-26 and HL-33 | 0.963169642857143 |
| HL-8; HL-10; HL-11 and HL-47 | 0.963169642857143 |
| HL-10; HL-21; HL-25 and HL-53 | 0.963169642857142 |
| HL-1; HL-5; HL-8 and HL-13 | 0.963136817226891 |
| HL-5; HL-10; HL-17 and HL-23 | 0.963136817226891 |
| HL-1; HL-5; HL-11 and HL-47 | 0.963103991596639 |
| HL-8; HL-10; HL-11 and HL-40 | 0.963103991596639 |
| HL-8; HL-10; HL-35 and HL-53 | 0.963103991596639 |
| HL-1; HL-5; HL-21 and HL-28 | 0.963071165966387 |
| HL-3; HL-26; HL-47 and HL-53 | 0.963071165966387 |
| HL-1; HL-5; HL-11 and HL-21 | 0.963038340336135 |
| HL-1; HL-5; HL-22 and HL-47 | 0.963038340336135 |
| HL-1; HL-5; HL-28 and HL-33 | 0.963038340336135 |
| HL-3; HL-5; HL-11 and HL-37 | 0.963038340336135 |
| HL-1; HL-4; HL-5 and HL-25 | 0.963038340336134 |
| HL-3; HL-5; HL-22 and HL-26 | 0.963038340336134 |
| HL-8; HL-13; HL-26 and HL-32 | 0.963038340336134 |
| HL-8; HL-21; HL-27 and HL-53 | 0.963038340336134 |
| HL-8; HL-26; HL-27 and HL-51 | 0.963038340336134 |
| HL-1; HL-5; HL-13 and HL-35 | 0.963005514705883 |
| HL-1; HL-5; HL-13 and HL-47 | 0.963005514705883 |
| HL-1; HL-5; HL-27 and HL-35 | 0.963005514705883 |
| HL-1; HL-4; HL-5 and HL-26 | 0.962972689075631 |
| HL-1; HL-5; HL-8 and HL-12 | 0.962972689075631 |
| HL-1; HL-3; HL-8 and HL-10 | 0.96297268907563 |
| HL-1; HL-5; HL-9 and HL-17 | 0.96297268907563 |
| HL-3; HL-22; HL-26 and HL-53 | 0.96297268907563 |
| HL-4; HL-10; HL-11 and HL-21 | 0.96297268907563 |
| HL-5; HL-10; HL-11 and HL-13 | 0.96297268907563 |
| HL-8; HL-15; HL-21 and HL-53 | 0.96297268907563 |
| HL-10; HL-21; HL-22 and HL-27 | 0.96297268907563 |
| HL-1; HL-3; HL-10 and HL-22 | 0.962939863445378 |
| HL-3; HL-26; HL-37 and HL-53 | 0.962939863445378 |
| HL-5; HL-8; HL-10 and HL-11 | 0.962907037815126 |
| HL-5; HL-10; HL-13 and HL-26 | 0.962874212184874 |
| HL-8; HL-18; HL-21 and HL-53 | 0.962874212184873 |
| HL-1; HL-3; HL-5 and HL-9 | 0.962841386554622 |
| HL-1; HL-3; HL-5 and HL-23 | 0.962841386554622 |
| HL-5; HL-8; HL-11 and HL-35 | 0.962841386554622 |
| HL-5; HL-10; HL-17 and HL-28 | 0.962841386554622 |
| HL-5; HL-10; HL-17 and HL-47 | 0.962841386554622 |
| HL-8; HL-18; HL-26 and HL-27 | 0.962841386554622 |
| HL-1; HL-5; HL-33 and HL-35 | 0.96280856092437 |
| HL-3; HL-4; HL-5 and HL-17 | 0.96280856092437 |
| HL-1; HL-5; HL-11 and HL-35 | 0.962775735294118 |
| HL-1; HL-5; HL-28 and HL-37 | 0.962775735294118 |
| HL-5; HL-8; HL-11 and HL-45 | 0.962775735294118 |
| HL-5; HL-8; HL-17 and HL-31 | 0.962775735294118 |
| HL-5; HL-10; HL-17 and HL-36 | 0.962775735294118 |
| HL-8; HL-12; HL-21 and HL-53 | 0.962775735294118 |
| HL-1; HL-5; HL-11 and HL-28 | 0.962775735294117 |
| HL-1; HL-3; HL-5 and HL-40 | 0.962742909663866 |
| HL-1; HL-5; HL-25 and HL-28 | 0.962742909663866 |
| HL-8; HL-18; HL-26 and HL-47 | 0.962742909663865 |
| HL-1; HL-5; HL-8 and HL-22 | 0.962710084033614 |
| HL-1; HL-5; HL-12 and HL-35 | 0.962710084033614 |
| HL-1; HL-5; HL-17 and HL-37 | 0.962710084033614 |
| HL-1; HL-5; HL-25 and HL-35 | 0.962710084033614 |
| HL-5; HL-8; HL-17 and HL-27 | 0.962710084033614 |
| HL-1; HL-5; HL-7 and HL-17 | 0.962710084033613 |
| HL-3; HL-8; HL-18 and HL-53 | 0.962710084033613 |
| HL-3; HL-8; HL-26 and HL-31 | 0.962710084033613 |
| HL-8; HL-10; HL-26 and HL-27 | 0.962710084033613 |
| HL-8; HL-13; HL-26 and HL-49 | 0.962710084033613 |
| HL-8; HL-21; HL-37 and HL-53 | 0.962710084033613 |
| HL-1; HL-3; HL-5 and HL-37 | 0.962677258403362 |
| HL-1; HL-5; HL-23 and HL-28 | 0.962677258403362 |
| HL-1; HL-5; HL-27 and HL-47 | 0.962677258403362 |
| HL-1; HL-5; HL-28 and HL-51 | 0.962677258403362 |
| HL-8; HL-10; HL-18 and HL-26 | 0.962677258403361 |
| HL-1; HL-3; HL-5 and HL-51 | 0.96264443277311 |
| HL-1; HL-5; HL-8 and HL-11 | 0.962644432773109 |
| HL-1; HL-5; HL-9 and HL-10 | 0.962644432773109 |
| HL-5; HL-8; HL-11 and HL-27 | 0.962644432773109 |
| HL-5; HL-8; HL-17 and HL-22 | 0.962644432773109 |
| HL-8; HL-10; HL-33 and HL-53 | 0.962644432773109 |
| HL-8; HL-13; HL-26 and HL-27 | 0.962644432773109 |
| HL-8; HL-21; HL-26 and HL-37 | 0.962644432773109 |
| HL-1; HL-8; HL-10 and HL-47 | 0.962611607142857 |
| HL-1; HL-5; HL-11 and HL-40 | 0.962578781512606 |
| HL-1; HL-5; HL-17 and HL-21 | 0.962578781512605 |
| HL-3; HL-8; HL-11 and HL-40 | 0.962578781512605 |
| HL-4; HL-10; HL-11 and HL-26 | 0.962578781512605 |
| HL-5; HL-10; HL-12 and HL-17 | 0.962578781512605 |
| HL-8; HL-21; HL-35 and HL-53 | 0.962578781512605 |
| HL-1; HL-5; HL-25 and HL-26 | 0.962545955882353 |
| HL-1; HL-4; HL-5 and HL-27 | 0.962513130252101 |
| HL-1; HL-5; HL-32 and HL-35 | 0.962513130252101 |
| HL-3; HL-21; HL-26 and HL-53 | 0.962513130252101 |
| HL-10; HL-21; HL-35 and HL-53 | 0.962480304621849 |
| HL-3; HL-8; HL-13 and HL-53 | 0.962480304621848 |
| HL-1; HL-4; HL-5 and HL-13 | 0.962447478991597 |
| HL-1; HL-5; HL-8 and HL-36 | 0.962447478991597 |
| HL-1; HL-5; HL-17 and HL-36 | 0.962447478991597 |
| HL-1; HL-5; HL-22 and HL-35 | 0.962447478991597 |
| HL-3; HL-7; HL-21 and HL-53 | 0.962447478991597 |
| HL-3; HL-13; HL-18 and HL-26 | 0.962447478991597 |
| HL-1; HL-3; HL-5 and HL-21 | 0.962414653361345 |
| HL-3; HL-18; HL-22 and HL-26 | 0.962414653361344 |
| HL-5; HL-10; HL-17 and HL-40 | 0.962381827731093 |
| HL-1; HL-4; HL-5 and HL-12 | 0.962381827731092 |
| HL-1; HL-4; HL-5 and HL-22 | 0.962381827731092 |
| HL-1; HL-5; HL-11 and HL-27 | 0.962381827731092 |
| HL-3; HL-10; HL-11 and HL-37 | 0.962381827731092 |
| HL-8; HL-10; HL-11 and HL-33 | 0.962381827731092 |
| HL-1; HL-5; HL-23 and HL-35 | 0.962316176470589 |
| HL-1; HL-5; HL-28 and HL-40 | 0.962316176470589 |
| HL-4; HL-5; HL-11 and HL-26 | 0.962316176470589 |
| HL-4; HL-7; HL-10 and HL-21 | 0.962316176470589 |
| HL-10; HL-13; HL-15 and HL-21 | 0.962316176470589 |
| HL-1; HL-4; HL-5 and HL-53 | 0.962316176470588 |
| HL-1; HL-5; HL-17 and HL-31 | 0.962316176470588 |
| HL-5; HL-8; HL-11 and HL-37 | 0.962316176470588 |
| HL-8; HL-10; HL-12 and HL-26 | 0.962316176470588 |
| HL-4; HL-8; HL-21 and HL-53 | 0.962283350840335 |
| HL-1; HL-5; HL-6 and HL-10 | 0.962250525210084 |
| HL-1; HL-5; HL-35 and HL-36 | 0.962250525210084 |
| HL-1; HL-5; HL-36 and HL-47 | 0.962250525210084 |
| HL-3; HL-5; HL-17 and HL-36 | 0.962250525210084 |
| HL-5; HL-11; HL-13 and HL-26 | 0.962250525210084 |
| HL-8; HL-10; HL-16 and HL-17 | 0.962250525210084 |
| HL-8; HL-26; HL-32 and HL-53 | 0.962250525210084 |
| HL-8; HL-26; HL-40 and HL-47 | 0.962250525210084 |
| HL-8; HL-26; HL-47 and HL-51 | 0.962250525210084 |
| HL-10; HL-18; HL-21 and HL-53 | 0.962217699579831 |
| HL-1; HL-5; HL-17 and HL-18 | 0.96218487394958 |
| HL-1; HL-5; HL-17 and HL-51 | 0.96218487394958 |
| HL-1; HL-5; HL-26 and HL-33 | 0.96218487394958 |
| HL-3; HL-8; HL-11 and HL-27 | 0.96218487394958 |
| HL-4; HL-21; HL-26 and HL-27 | 0.96218487394958 |
| HL-5; HL-8; HL-17 and HL-53 | 0.96218487394958 |
| HL-8; HL-10; HL-11 and HL-45 | 0.96218487394958 |
| HL-8; HL-10; HL-21 and HL-27 | 0.96218487394958 |
| HL-1; HL-3; HL-10 and HL-13 | 0.962119222689076 |
| HL-1; HL-5; HL-11 and HL-12 | 0.962119222689076 |
| HL-1; HL-10; HL-22 and HL-28 | 0.962119222689076 |
| HL-8; HL-10; HL-11 and HL-22 | 0.962119222689075 |
| HL-8; HL-21; HL-26 and HL-40 | 0.962119222689075 |
| HL-1; HL-3; HL-10 and HL-26 | 0.962086397058824 |
| HL-1; HL-5; HL-8 and HL-40 | 0.962086397058824 |
| HL-1; HL-5; HL-22 and HL-26 | 0.962086397058824 |
| HL-1; HL-3; HL-10 and HL-28 | 0.962053571428572 |
| HL-1; HL-5; HL-13 and HL-33 | 0.962053571428572 |
| HL-3; HL-5; HL-11 and HL-17 | 0.962053571428572 |
| HL-3; HL-8; HL-35 and HL-53 | 0.962053571428571 |
| HL-4; HL-8; HL-10 and HL-11 | 0.962053571428571 |
| HL-8; HL-22; HL-25 and HL-26 | 0.962053571428571 |
| HL-10; HL-12; HL-21 and HL-53 | 0.962053571428571 |
| HL-1; HL-5; HL-12 and HL-25 | 0.96202074579832 |
| HL-3; HL-4; HL-10 and HL-21 | 0.962020745798319 |
| HL-8; HL-12; HL-21 and HL-26 | 0.962020745798319 |
| HL-10; HL-22; HL-25 and HL-53 | 0.962020745798319 |
| HL-1; HL-5; HL-10 and HL-49 | 0.961987920168068 |
| HL-1; HL-5; HL-8 and HL-32 | 0.961987920168067 |
| HL-1; HL-5; HL-11 and HL-13 | 0.961987920168067 |
| HL-1; HL-8; HL-10 and HL-27 | 0.961987920168067 |
| HL-3; HL-8; HL-17 and HL-45 | 0.961987920168067 |
| HL-5; HL-10; HL-22 and HL-25 | 0.961987920168067 |
| HL-1; HL-8; HL-10 and HL-22 | 0.961955094537815 |
| HL-1; HL-8; HL-10 and HL-26 | 0.961955094537815 |
| HL-1; HL-3; HL-10 and HL-35 | 0.961922268907563 |
| HL-3; HL-5; HL-8 and HL-10 | 0.961922268907563 |
| HL-5; HL-10; HL-17 and HL-51 | 0.961922268907563 |
| HL-8; HL-10; HL-26 and HL-45 | 0.961922268907563 |
| HL-10; HL-13; HL-26 and HL-47 | 0.961922268907563 |
| HL-10; HL-21; HL-26 and HL-32 | 0.961889443277311 |
| HL-1; HL-8; HL-10 and HL-35 | 0.961856617647059 |
| HL-3; HL-4; HL-21 and HL-26 | 0.961856617647059 |
| HL-3; HL-5; HL-11 and HL-13 | 0.961856617647059 |
| HL-3; HL-8; HL-11 and HL-47 | 0.961856617647059 |
| HL-3; HL-26; HL-35 and HL-53 | 0.961856617647059 |
| HL-8; HL-18; HL-25 and HL-26 | 0.961856617647059 |
| HL-10; HL-11; HL-26 and HL-53 | 0.961856617647059 |
| HL-10; HL-13; HL-25 and HL-26 | 0.961856617647059 |
| HL-5; HL-10; HL-11 and HL-37 | 0.961856617647058 |
| HL-1; HL-5; HL-12 and HL-33 | 0.961823792016807 |
| HL-1; HL-5; HL-13 and HL-25 | 0.961823792016807 |
| HL-1; HL-5; HL-47 and HL-53 | 0.961823792016807 |
| HL-8; HL-26; HL-35 and HL-40 | 0.961823792016807 |
| HL-8; HL-21; HL-26 and HL-33 | 0.961823792016806 |
| HL-1; HL-3; HL-5 and HL-31 | 0.961790966386555 |
| HL-1; HL-4; HL-8 and HL-10 | 0.961790966386555 |
| HL-1; HL-5; HL-9 and HL-47 | 0.961790966386555 |
| HL-1; HL-5; HL-11 and HL-25 | 0.961790966386555 |
| HL-3; HL-23; HL-26 and HL-53 | 0.961790966386555 |
| HL-13; HL-22; HL-26 and HL-47 | 0.961790966386554 |
| HL-1; HL-5; HL-12 and HL-26 | 0.961758140756303 |
| HL-1; HL-5; HL-28 and HL-31 | 0.961758140756303 |
| HL-8; HL-26; HL-32 and HL-47 | 0.961758140756303 |
| HL-10; HL-21; HL-26 and HL-37 | 0.961758140756303 |
| HL-4; HL-10; HL-15 and HL-21 | 0.961758140756302 |
| HL-1; HL-3; HL-10 and HL-27 | 0.961725315126051 |
| HL-1; HL-3; HL-10 and HL-47 | 0.961725315126051 |
| HL-1; HL-5; HL-27 and HL-33 | 0.961725315126051 |
| HL-5; HL-8; HL-17 and HL-40 | 0.961725315126051 |
| HL-7; HL-8; HL-13 and HL-21 | 0.961725315126051 |
| HL-7; HL-13; HL-21 and HL-53 | 0.961725315126051 |
| HL-8; HL-11; HL-26 and HL-47 | 0.961725315126051 |
| HL-8; HL-13; HL-23 and HL-26 | 0.961725315126051 |
| HL-4; HL-10; HL-11 and HL-27 | 0.96172531512605 |
| HL-5; HL-8; HL-13 and HL-35 | 0.96172531512605 |
| HL-8; HL-10; HL-26 and HL-35 | 0.96172531512605 |
| HL-8; HL-21; HL-25 and HL-26 | 0.96172531512605 |
| HL-8; HL-26; HL-31 and HL-35 | 0.96172531512605 |
| HL-3; HL-5; HL-10 and HL-26 | 0.961692489495798 |
| HL-1; HL-5; HL-13 and HL-26 | 0.961659663865547 |
| HL-5; HL-11; HL-13 and HL-35 | 0.961659663865547 |
| HL-1; HL-5; HL-26 and HL-32 | 0.961659663865546 |
| HL-1; HL-8; HL-10 and HL-13 | 0.961659663865546 |
| HL-3; HL-8; HL-9 and HL-26 | 0.961659663865546 |
| HL-3; HL-8; HL-21 and HL-36 | 0.961659663865546 |
| HL-5; HL-10; HL-11 and HL-27 | 0.961659663865546 |
| HL-5; HL-11; HL-13 and HL-39 | 0.961659663865546 |
| HL-8; HL-10; HL-11 and HL-25 | 0.961659663865546 |
| HL-8; HL-21; HL-33 and HL-53 | 0.961659663865546 |
| HL-5; HL-11; HL-13 and HL-17 | 0.961594012605043 |
| HL-1; HL-3; HL-10 and HL-23 | 0.961594012605042 |
| HL-1; HL-5; HL-26 and HL-27 | 0.961594012605042 |
| HL-3; HL-5; HL-10 and HL-11 | 0.961594012605042 |
| HL-5; HL-10; HL-11 and HL-35 | 0.961594012605042 |
| HL-8; HL-11; HL-26 and HL-27 | 0.961594012605042 |
| HL-8; HL-11; HL-26 and HL-37 | 0.961594012605042 |
| HL-8; HL-27; HL-35 and HL-53 | 0.961594012605042 |
| HL-10; HL-21; HL-33 and HL-53 | 0.961594012605042 |
| HL-10; HL-27; HL-35 and HL-53 | 0.961594012605042 |
| HL-13; HL-25; HL-26 and HL-53 | 0.961594012605042 |
| HL-1; HL-5; HL-35 and HL-53 | 0.96156118697479 |
| HL-3; HL-7; HL-8 and HL-21 | 0.96156118697479 |
| HL-5; HL-8; HL-26 and HL-53 | 0.96156118697479 |
| HL-5; HL-10; HL-17 and HL-21 | 0.96156118697479 |
| HL-5; HL-10; HL-17 and HL-33 | 0.96156118697479 |
| HL-8; HL-10; HL-27 and HL-35 | 0.96156118697479 |
| HL-1; HL-5; HL-8 and HL-23 | 0.961528361344538 |
| HL-1; HL-5; HL-28 and HL-45 | 0.961528361344538 |
| HL-1; HL-5; HL-32 and HL-33 | 0.961528361344538 |
| HL-1; HL-10; HL-22 and HL-47 | 0.961528361344538 |
| HL-3; HL-5; HL-13 and HL-26 | 0.961528361344538 |
| HL-3; HL-5; HL-17 and HL-22 | 0.961528361344538 |
| HL-3; HL-8; HL-23 and HL-26 | 0.961528361344538 |
| HL-8; HL-13; HL-27 and HL-53 | 0.961528361344538 |
| HL-10; HL-11; HL-37 and HL-53 | 0.961528361344538 |
| HL-1; HL-5; HL-11 and HL-53 | 0.961462710084034 |
| HL-1; HL-5; HL-25 and HL-32 | 0.961462710084034 |
| HL-3; HL-5; HL-11 and HL-35 | 0.961462710084034 |
| HL-3; HL-10; HL-18 and HL-26 | 0.961462710084034 |
| HL-8; HL-21; HL-22 and HL-26 | 0.961462710084034 |
| HL-8; HL-26; HL-35 and HL-51 | 0.961462710084034 |
| HL-10; HL-11; HL-21 and HL-53 | 0.961462710084034 |
| HL-8; HL-26; HL-37 and HL-47 | 0.961462710084033 |
| HL-1; HL-3; HL-5 and HL-45 | 0.96139705882353 |
| HL-1; HL-5; HL-12 and HL-22 | 0.96139705882353 |
| HL-1; HL-5; HL-35 and HL-51 | 0.96139705882353 |
| HL-5; HL-8; HL-11 and HL-12 | 0.96139705882353 |
| HL-5; HL-10; HL-17 and HL-32 | 0.96139705882353 |
| HL-1; HL-3; HL-10 and HL-32 | 0.961397058823529 |
| HL-3; HL-10; HL-11 and HL-26 | 0.961397058823529 |
| HL-5; HL-8; HL-17 and HL-21 | 0.961397058823529 |
| HL-8; HL-10; HL-25 and HL-53 | 0.961397058823529 |
| HL-10; HL-11; HL-26 and HL-27 | 0.961397058823529 |
| HL-1; HL-5; HL-25 and HL-33 | 0.961364233193278 |
| HL-10; HL-15; HL-21 and HL-22 | 0.961364233193278 |
| HL-3; HL-10; HL-35 and HL-53 | 0.961364233193277 |
| HL-1; HL-5; HL-8 and HL-21 | 0.961331407563026 |
| HL-1; HL-5; HL-23 and HL-47 | 0.961331407563026 |
| HL-1; HL-5; HL-12 and HL-36 | 0.961331407563025 |
| HL-1; HL-5; HL-25 and HL-36 | 0.961331407563025 |
| HL-3; HL-4; HL-21 and HL-53 | 0.961331407563025 |
| HL-3; HL-5; HL-17 and HL-53 | 0.961331407563025 |
| HL-3; HL-8; HL-11 and HL-33 | 0.961331407563025 |
| HL-3; HL-10; HL-11 and HL-53 | 0.961331407563025 |
| HL-4; HL-8; HL-11 and HL-26 | 0.961331407563025 |
| HL-4; HL-8; HL-26 and HL-28 | 0.961331407563025 |
| HL-4; HL-10; HL-25 and HL-26 | 0.961331407563025 |
| HL-5; HL-8; HL-17 and HL-35 | 0.961331407563025 |
| HL-5; HL-10; HL-11 and HL-25 | 0.961331407563025 |
| HL-7; HL-10; HL-21 and HL-22 | 0.961331407563025 |
| HL-8; HL-18; HL-21 and HL-26 | 0.961331407563025 |
| HL-10; HL-21; HL-26 and HL-51 | 0.961331407563025 |
| HL-13; HL-15; HL-21 and HL-53 | 0.961331407563025 |
| HL-1; HL-5; HL-8 and HL-37 | 0.961298581932774 |
| HL-1; HL-5; HL-22 and HL-27 | 0.961298581932774 |
| HL-1; HL-5; HL-25 and HL-27 | 0.961298581932774 |
| HL-1; HL-5; HL-35 and HL-37 | 0.961298581932774 |
| HL-1; HL-5; HL-35 and HL-40 | 0.961298581932774 |
| HL-1; HL-5; HL-10 and HL-15 | 0.961298581932773 |
| HL-1; HL-10; HL-28 and HL-47 | 0.961298581932773 |
| HL-3; HL-8; HL-45 and HL-53 | 0.961298581932773 |
| HL-10; HL-21; HL-51 and HL-53 | 0.961298581932773 |
| HL-1; HL-8; HL-10 and HL-17 | 0.961265756302521 |
| HL-3; HL-4; HL-5 and HL-11 | 0.961265756302521 |
| HL-5; HL-8; HL-17 and HL-28 | 0.961265756302521 |
| HL-5; HL-11; HL-25 and HL-26 | 0.961265756302521 |
| HL-8; HL-10; HL-11 and HL-36 | 0.961265756302521 |
| HL-10; HL-11; HL-13 and HL-26 | 0.961265756302521 |
| HL-10; HL-21; HL-26 and HL-31 | 0.961265756302521 |
| HL-1; HL-5; HL-37 and HL-47 | 0.961232930672269 |
| HL-1; HL-10; HL-13 and HL-47 | 0.961232930672269 |
| HL-1; HL-3; HL-4 and HL-10 | 0.961200105042017 |
| HL-1; HL-4; HL-5 and HL-21 | 0.961200105042017 |
| HL-1; HL-4; HL-5 and HL-40 | 0.961200105042017 |
| HL-1; HL-5; HL-22 and HL-25 | 0.961200105042017 |
| HL-1; HL-5; HL-28 and HL-53 | 0.961200105042017 |
| HL-1; HL-5; HL-47 and HL-51 | 0.961200105042017 |
| HL-3; HL-7; HL-21 and HL-26 | 0.961200105042017 |
| HL-3; HL-10; HL-25 and HL-53 | 0.961200105042017 |
| HL-4; HL-8; HL-26 and HL-37 | 0.961200105042017 |
| HL-5; HL-10; HL-11 and HL-21 | 0.961200105042017 |
| HL-10; HL-11; HL-21 and HL-37 | 0.961200105042017 |
| HL-3; HL-4; HL-8 and HL-11 | 0.961200105042016 |
| HL-1; HL-5; HL-10 and HL-46 | 0.961167279411765 |
| HL-1; HL-5; HL-12 and HL-27 | 0.961167279411765 |
| HL-1; HL-4; HL-5 and HL-23 | 0.961134453781513 |
| HL-1; HL-5; HL-11 and HL-36 | 0.961134453781513 |
| HL-3; HL-8; HL-11 and HL-15 | 0.961134453781513 |
| HL-8; HL-11; HL-12 and HL-26 | 0.961134453781513 |
| HL-8; HL-12; HL-26 and HL-40 | 0.961134453781513 |
| HL-1; HL-5; HL-33 and HL-36 | 0.961134453781512 |
| HL-3; HL-13; HL-21 and HL-53 | 0.961134453781512 |
| HL-5; HL-8; HL-35 and HL-45 | 0.961134453781512 |
| HL-8; HL-21; HL-31 and HL-53 | 0.961134453781512 |
| HL-1; HL-3; HL-10 and HL-51 | 0.961101628151261 |
| HL-1; HL-5; HL-22 and HL-33 | 0.961101628151261 |
| HL-3; HL-26; HL-33 and HL-53 | 0.96110162815126 |
| HL-8; HL-26; HL-28 and HL-47 | 0.961068802521008 |
| HL-1; HL-5; HL-8 and HL-51 | 0.961003151260505 |
| HL-1; HL-5; HL-11 and HL-18 | 0.961003151260504 |
| HL-1; HL-5; HL-11 and HL-37 | 0.961003151260504 |
| HL-1; HL-10; HL-22 and HL-35 | 0.961003151260504 |
| HL-3; HL-5; HL-25 and HL-26 | 0.961003151260504 |
| HL-4; HL-5; HL-8 and HL-11 | 0.961003151260504 |
| HL-5; HL-8; HL-11 and HL-47 | 0.961003151260504 |
| HL-8; HL-11; HL-13 and HL-26 | 0.961003151260504 |
| HL-8; HL-11; HL-21 and HL-26 | 0.961003151260504 |
| HL-1; HL-5; HL-13 and HL-27 | 0.960970325630253 |
| HL-1; HL-5; HL-40 and HL-47 | 0.960970325630253 |
| HL-1; HL-5; HL-13 and HL-22 | 0.960970325630252 |
| HL-1; HL-10; HL-27 and HL-28 | 0.960970325630252 |
| HL-1; HL-3; HL-5 and HL-46 | 0.960937500000001 |
| HL-1; HL-5; HL-15 and HL-17 | 0.960937500000001 |
| HL-1; HL-5; HL-12 and HL-32 | 0.9609375 |
| HL-1; HL-5; HL-17 and HL-32 | 0.9609375 |
| HL-1; HL-5; HL-17 and HL-39 | 0.9609375 |
| HL-3; HL-5; HL-8 and HL-45 | 0.9609375 |
| HL-4; HL-8; HL-26 and HL-31 | 0.9609375 |
| HL-5; HL-8; HL-11 and HL-25 | 0.9609375 |
| HL-5; HL-8; HL-17 and HL-37 | 0.9609375 |
| HL-5; HL-10; HL-11 and HL-45 | 0.9609375 |
| HL-8; HL-11; HL-26 and HL-35 | 0.9609375 |
| HL-8; HL-21; HL-25 and HL-53 | 0.9609375 |
| HL-10; HL-11; HL-13 and HL-53 | 0.9609375 |
| HL-1; HL-8; HL-10 and HL-28 | 0.960904674369748 |
| HL-1; HL-10; HL-27 and HL-47 | 0.960904674369748 |
| HL-8; HL-10; HL-12 and HL-53 | 0.960904674369748 |
| HL-1; HL-3; HL-10 and HL-17 | 0.960871848739496 |
| HL-1; HL-4; HL-5 and HL-51 | 0.960871848739496 |
| HL-1; HL-5; HL-11 and HL-22 | 0.960871848739496 |
| HL-1; HL-5; HL-11 and HL-33 | 0.960871848739496 |
| HL-1; HL-5; HL-13 and HL-53 | 0.960871848739496 |
| HL-3; HL-4; HL-10 and HL-26 | 0.960871848739496 |
| HL-3; HL-8; HL-11 and HL-13 | 0.960871848739496 |
| HL-3; HL-18; HL-26 and HL-35 | 0.960871848739496 |
| HL-7; HL-8; HL-13 and HL-26 | 0.960871848739496 |
| HL-8; HL-13; HL-15 and HL-21 | 0.960871848739496 |
| HL-8; HL-26; HL-35 and HL-45 | 0.960871848739496 |
| HL-10; HL-11; HL-27 and HL-37 | 0.960871848739496 |
| HL-1; HL-5; HL-18 and HL-28 | 0.960839023109244 |
| HL-3; HL-26; HL-27 and HL-53 | 0.960839023109243 |
| HL-3; HL-8; HL-9 and HL-45 | 0.960806197478992 |
| HL-7; HL-10; HL-13 and HL-21 | 0.960806197478992 |
| HL-8; HL-10; HL-11 and HL-17 | 0.960806197478992 |
| HL-10; HL-26; HL-27 and HL-53 | 0.960806197478992 |
| HL-3; HL-8; HL-27 and HL-53 | 0.960806197478991 |
| HL-5; HL-17; HL-28 and HL-45 | 0.960806197478991 |
| HL-8; HL-26; HL-35 and HL-47 | 0.960806197478991 |
| HL-10; HL-18; HL-21 and HL-26 | 0.960806197478991 |
| HL-1; HL-3; HL-5 and HL-18 | 0.96077337184874 |
| HL-1; HL-10; HL-28 and HL-35 | 0.96077337184874 |
| HL-8; HL-12; HL-18 and HL-26 | 0.96077337184874 |
| HL-5; HL-8; HL-17 and HL-25 | 0.960773371848739 |
| HL-5; HL-8; HL-17 and HL-47 | 0.960773371848739 |
| HL-5; HL-10; HL-17 and HL-18 | 0.960773371848739 |
| HL-1; HL-5; HL-11 and HL-15 | 0.960740546218488 |
| HL-1; HL-5; HL-23 and HL-25 | 0.960740546218488 |
| HL-1; HL-5; HL-26 and HL-53 | 0.960740546218488 |
| HL-10; HL-17; HL-25 and HL-53 | 0.960740546218488 |
| HL-1; HL-4; HL-10 and HL-26 | 0.960740546218487 |
| HL-1; HL-5; HL-9 and HL-35 | 0.960740546218487 |
| HL-3; HL-8; HL-11 and HL-18 | 0.960740546218487 |
| HL-3; HL-8; HL-18 and HL-45 | 0.960740546218487 |
| HL-3; HL-18; HL-21 and HL-53 | 0.960740546218487 |
| HL-3; HL-26; HL-51 and HL-53 | 0.960740546218487 |
| HL-4; HL-10; HL-13 and HL-21 | 0.960740546218487 |
| HL-4; HL-10; HL-13 and HL-26 | 0.960740546218487 |
| HL-5; HL-10; HL-21 and HL-22 | 0.960740546218487 |
| HL-8; HL-10; HL-11 and HL-12 | 0.960740546218487 |
| HL-8; HL-10; HL-11 and HL-18 | 0.960740546218487 |
| HL-8; HL-10; HL-17 and HL-31 | 0.960740546218487 |
| HL-8; HL-12; HL-25 and HL-26 | 0.960740546218487 |
| HL-8; HL-21; HL-51 and HL-53 | 0.960740546218487 |
| HL-8; HL-25; HL-26 and HL-40 | 0.960740546218487 |
| HL-1; HL-8; HL-10 and HL-12 | 0.960707720588236 |
| HL-1; HL-8; HL-10 and HL-40 | 0.960707720588236 |
| HL-5; HL-7; HL-10 and HL-17 | 0.960707720588236 |
| HL-1; HL-5; HL-8 and HL-31 | 0.960674894957984 |
| HL-1; HL-5; HL-12 and HL-13 | 0.960674894957984 |
| HL-4; HL-5; HL-11 and HL-17 | 0.960674894957984 |
| HL-1; HL-4; HL-5 and HL-37 | 0.960674894957983 |
| HL-1; HL-4; HL-10 and HL-28 | 0.960674894957983 |
| HL-1; HL-5; HL-11 and HL-45 | 0.960674894957983 |
| HL-1; HL-10; HL-26 and HL-28 | 0.960674894957983 |
| HL-3; HL-13; HL-18 and HL-53 | 0.960674894957983 |
| HL-3; HL-18; HL-25 and HL-26 | 0.960674894957983 |
| HL-5; HL-8; HL-12 and HL-17 | 0.960674894957983 |
| HL-5; HL-10; HL-13 and HL-35 | 0.960674894957983 |
| HL-8; HL-10; HL-13 and HL-45 | 0.960674894957983 |
| HL-8; HL-10; HL-35 and HL-45 | 0.960674894957983 |
| HL-8; HL-12; HL-26 and HL-37 | 0.960674894957983 |
| HL-8; HL-13; HL-47 and HL-53 | 0.960674894957983 |
| HL-8; HL-13; HL-51 and HL-53 | 0.960674894957983 |
| HL-8; HL-21; HL-53 and HL-56 | 0.960674894957983 |
| HL-13; HL-22; HL-26 and HL-53 | 0.960674894957983 |
| HL-1; HL-3; HL-10 and HL-33 | 0.960642069327731 |
| HL-8; HL-12; HL-26 and HL-31 | 0.960642069327731 |
| HL-1; HL-5; HL-9 and HL-12 | 0.960609243697479 |
| HL-1; HL-5; HL-21 and HL-36 | 0.960609243697479 |
| HL-5; HL-8; HL-26 and HL-45 | 0.960609243697479 |
| HL-8; HL-10; HL-17 and HL-36 | 0.960609243697479 |
| HL-8; HL-21; HL-26 and HL-47 | 0.960609243697479 |
| HL-8; HL-26; HL-35 and HL-37 | 0.960609243697479 |
| HL-13; HL-21; HL-26 and HL-53 | 0.960609243697479 |
| HL-1; HL-3; HL-5 and HL-39 | 0.960576418067227 |
| HL-1; HL-5; HL-33 and HL-51 | 0.960576418067227 |
| HL-1; HL-10; HL-13 and HL-28 | 0.960576418067227 |
| HL-1; HL-10; HL-22 and HL-27 | 0.960576418067227 |
| HL-4; HL-10; HL-26 and HL-53 | 0.960576418067227 |
| HL-10; HL-21; HL-27 and HL-37 | 0.960576418067227 |
| HL-1; HL-5; HL-9 and HL-13 | 0.960543592436975 |
| HL-1; HL-5; HL-9 and HL-26 | 0.960543592436975 |
| HL-1; HL-10; HL-26 and HL-47 | 0.960543592436975 |
| HL-3; HL-5; HL-17 and HL-28 | 0.960543592436975 |
| HL-3; HL-5; HL-26 and HL-32 | 0.960543592436975 |
| HL-4; HL-5; HL-11 and HL-13 | 0.960543592436975 |
| HL-4; HL-13; HL-26 and HL-53 | 0.960543592436975 |
| HL-5; HL-10; HL-11 and HL-22 | 0.960543592436975 |
| HL-8; HL-26; HL-33 and HL-35 | 0.960543592436975 |
| HL-8; HL-26; HL-33 and HL-47 | 0.960543592436975 |
| HL-1; HL-3; HL-8 and HL-22 | 0.960510766806723 |
| HL-1; HL-5; HL-12 and HL-53 | 0.960510766806723 |
| HL-1; HL-5; HL-25 and HL-37 | 0.960510766806723 |
| HL-13; HL-26; HL-37 and HL-53 | 0.960510766806723 |
| HL-5; HL-8; HL-10 and HL-21 | 0.960510766806722 |
| HL-1; HL-3; HL-10 and HL-40 | 0.960477941176471 |
| HL-1; HL-4; HL-5 and HL-45 | 0.960477941176471 |
| HL-1; HL-5; HL-12 and HL-23 | 0.960477941176471 |
| HL-3; HL-5; HL-11 and HL-25 | 0.960477941176471 |
| HL-3; HL-11; HL-37 and HL-53 | 0.960477941176471 |
| HL-5; HL-8; HL-16 and HL-17 | 0.960477941176471 |
| HL-5; HL-17; HL-25 and HL-45 | 0.960477941176471 |
| HL-8; HL-26; HL-45 and HL-53 | 0.960477941176471 |
| HL-10; HL-11; HL-22 and HL-27 | 0.960477941176471 |
| HL-10; HL-21; HL-25 and HL-26 | 0.960477941176471 |
| HL-8; HL-13; HL-22 and HL-53 | 0.96047794117647 |
| HL-8; HL-22; HL-26 and HL-27 | 0.96047794117647 |
| HL-10; HL-13; HL-25 and HL-53 | 0.96047794117647 |
| HL-1; HL-5; HL-22 and HL-23 | 0.960445115546219 |
| HL-1; HL-3; HL-10 and HL-37 | 0.960445115546218 |
| HL-1; HL-10; HL-13 and HL-35 | 0.960445115546218 |
| HL-3; HL-4; HL-10 and HL-53 | 0.960445115546218 |
| HL-8; HL-12; HL-26 and HL-27 | 0.960445115546218 |
| HL-8; HL-12; HL-26 and HL-51 | 0.960445115546218 |
| HL-8; HL-13; HL-37 and HL-53 | 0.960445115546218 |
| HL-13; HL-26; HL-33 and HL-53 | 0.960445115546218 |
| HL-1; HL-5; HL-31 and HL-47 | 0.960412289915967 |
| HL-8; HL-10; HL-11 and HL-49 | 0.960412289915967 |
| HL-1; HL-4; HL-10 and HL-47 | 0.960412289915966 |
| HL-1; HL-5; HL-7 and HL-21 | 0.960412289915966 |
| HL-3; HL-4; HL-8 and HL-53 | 0.960412289915966 |
| HL-3; HL-4; HL-13 and HL-26 | 0.960412289915966 |
| HL-3; HL-8; HL-11 and HL-39 | 0.960412289915966 |
| HL-7; HL-21; HL-25 and HL-53 | 0.960412289915966 |
| HL-10; HL-11; HL-37 and HL-38 | 0.960412289915966 |
| HL-10; HL-13; HL-47 and HL-53 | 0.960412289915966 |
| HL-13; HL-18; HL-35 and HL-53 | 0.960412289915966 |
| HL-1; HL-5; HL-8 and HL-45 | 0.960379464285715 |
| HL-1; HL-5; HL-10 and HL-14 | 0.960379464285715 |
| HL-1; HL-5; HL-21 and HL-25 | 0.960379464285715 |
| HL-1; HL-5; HL-26 and HL-51 | 0.960379464285715 |
| HL-1; HL-8; HL-10 and HL-51 | 0.960379464285715 |
| HL-3; HL-10; HL-22 and HL-53 | 0.960379464285714 |
| HL-1; HL-5; HL-21 and HL-47 | 0.960346638655463 |
| HL-1; HL-4; HL-5 and HL-11 | 0.960346638655462 |
| HL-1; HL-5; HL-10 and HL-57 | 0.960346638655462 |
| HL-3; HL-4; HL-10 and HL-11 | 0.960346638655462 |
| HL-3; HL-4; HL-21 and HL-27 | 0.960346638655462 |
| HL-3; HL-8; HL-12 and HL-53 | 0.960346638655462 |
| HL-5; HL-8; HL-11 and HL-22 | 0.960346638655462 |
| HL-8; HL-9; HL-10 and HL-45 | 0.960346638655462 |
| HL-8; HL-10; HL-31 and HL-53 | 0.960346638655462 |
| HL-8; HL-22; HL-26 and HL-51 | 0.960346638655462 |
| HL-10; HL-11; HL-13 and HL-37 | 0.960346638655462 |
| HL-15; HL-21; HL-25 and HL-53 | 0.960346638655462 |
| HL-1; HL-5; HL-25 and HL-53 | 0.960313813025211 |
| HL-1; HL-3; HL-10 and HL-12 | 0.96031381302521 |
| HL-1; HL-5; HL-23 and HL-33 | 0.96031381302521 |
| HL-1; HL-8; HL-10 and HL-33 | 0.96031381302521 |
| HL-8; HL-12; HL-26 and HL-33 | 0.96031381302521 |
| HL-1; HL-5; HL-9 and HL-27 | 0.960280987394958 |
| HL-1; HL-5; HL-13 and HL-32 | 0.960280987394958 |
| HL-1; HL-5; HL-33 and HL-37 | 0.960280987394958 |
| HL-1; HL-8; HL-10 and HL-25 | 0.960280987394958 |
| HL-3; HL-5; HL-11 and HL-22 | 0.960280987394958 |
| HL-3; HL-10; HL-13 and HL-53 | 0.960280987394958 |
| HL-4; HL-8; HL-15 and HL-21 | 0.960280987394958 |
| HL-5; HL-8; HL-11 and HL-40 | 0.960280987394958 |
| HL-5; HL-8; HL-21 and HL-26 | 0.960280987394958 |
| HL-5; HL-11; HL-26 and HL-27 | 0.960280987394958 |
| HL-8; HL-11; HL-21 and HL-53 | 0.960280987394958 |
| HL-10; HL-11; HL-13 and HL-49 | 0.960280987394958 |
| HL-10; HL-11; HL-27 and HL-53 | 0.960280987394958 |
| HL-10; HL-21; HL-32 and HL-53 | 0.960280987394958 |
| HL-1; HL-10; HL-12 and HL-22 | 0.960248161764706 |
| HL-1; HL-10; HL-23 and HL-47 | 0.960248161764706 |
| HL-1; HL-10; HL-35 and HL-47 | 0.960248161764706 |
| HL-3; HL-5; HL-10 and HL-22 | 0.960248161764706 |
| HL-4; HL-5; HL-10 and HL-21 | 0.960248161764706 |
| HL-5; HL-8; HL-12 and HL-26 | 0.960248161764706 |
| HL-10; HL-26; HL-35 and HL-53 | 0.960248161764706 |
| HL-1; HL-4; HL-5 and HL-31 | 0.960215336134454 |
| HL-1; HL-5; HL-9 and HL-25 | 0.960215336134454 |
| HL-1; HL-5; HL-11 and HL-23 | 0.960215336134454 |
| HL-1; HL-5; HL-25 and HL-51 | 0.960215336134454 |
| HL-1; HL-5; HL-33 and HL-40 | 0.960215336134454 |
| HL-1; HL-8; HL-10 and HL-32 | 0.960215336134454 |
| HL-1; HL-10; HL-13 and HL-22 | 0.960215336134454 |
| HL-1; HL-10; HL-27 and HL-35 | 0.960215336134454 |
| HL-8; HL-10; HL-22 and HL-26 | 0.960215336134454 |
| HL-8; HL-18; HL-26 and HL-51 | 0.960215336134454 |
| HL-8; HL-21; HL-22 and HL-53 | 0.960215336134454 |
| HL-10; HL-11; HL-13 and HL-15 | 0.960215336134454 |
| HL-3; HL-10; HL-15 and HL-21 | 0.960215336134453 |
| HL-4; HL-8; HL-18 and HL-26 | 0.960215336134453 |
| HL-1; HL-5; HL-7 and HL-10 | 0.960182510504202 |
| HL-1; HL-5; HL-25 and HL-40 | 0.960182510504202 |
| HL-8; HL-18; HL-26 and HL-33 | 0.960182510504202 |
| HL-3; HL-10; HL-18 and HL-53 | 0.960182510504201 |
| HL-1; HL-4; HL-10 and HL-27 | 0.96014968487395 |
| HL-1; HL-5; HL-27 and HL-32 | 0.96014968487395 |
| HL-3; HL-8; HL-12 and HL-45 | 0.96014968487395 |
| HL-3; HL-21; HL-26 and HL-32 | 0.96014968487395 |
| HL-4; HL-5; HL-17 and HL-45 | 0.96014968487395 |
| HL-8; HL-18; HL-26 and HL-31 | 0.96014968487395 |
| HL-8; HL-21; HL-26 and HL-32 | 0.96014968487395 |
| HL-3; HL-10; HL-37 and HL-53 | 0.960149684873949 |
| HL-5; HL-8; HL-11 and HL-53 | 0.960149684873949 |
| HL-5; HL-11; HL-17 and HL-45 | 0.960149684873949 |
| HL-1; HL-3; HL-5 and HL-7 | 0.960116859243698 |
| HL-1; HL-5; HL-13 and HL-23 | 0.960116859243698 |
| HL-1; HL-5; HL-23 and HL-26 | 0.960116859243698 |
| HL-4; HL-5; HL-13 and HL-17 | 0.960116859243698 |
| HL-4; HL-8; HL-22 and HL-26 | 0.960116859243697 |
| HL-8; HL-25; HL-26 and HL-27 | 0.960116859243697 |
| HL-1; HL-4; HL-5 and HL-9 | 0.960084033613446 |
| HL-3; HL-8; HL-11 and HL-36 | 0.960084033613446 |
| HL-1; HL-5; HL-22 and HL-32 | 0.960084033613445 |
| HL-3; HL-10; HL-11 and HL-22 | 0.960084033613445 |
| HL-3; HL-10; HL-21 and HL-27 | 0.960084033613445 |
| HL-3; HL-26; HL-31 and HL-53 | 0.960084033613445 |
| HL-4; HL-5; HL-8 and HL-26 | 0.960084033613445 |
| HL-4; HL-5; HL-25 and HL-26 | 0.960084033613445 |
| HL-5; HL-8; HL-11 and HL-39 | 0.960084033613445 |
| HL-8; HL-10; HL-45 and HL-53 | 0.960084033613445 |
| HL-8; HL-13; HL-25 and HL-53 | 0.960051207983193 |
| HL-1; HL-5; HL-26 and HL-40 | 0.960018382352942 |
| HL-1; HL-5; HL-31 and HL-35 | 0.960018382352942 |
| HL-1; HL-5; HL-33 and HL-53 | 0.960018382352942 |
| HL-1; HL-5; HL-45 and HL-47 | 0.960018382352942 |
| HL-1; HL-3; HL-8 and HL-35 | 0.960018382352941 |
| HL-1; HL-3; HL-10 and HL-25 | 0.960018382352941 |
| HL-1; HL-3; HL-10 and HL-36 | 0.960018382352941 |
| HL-1; HL-5; HL-26 and HL-36 | 0.960018382352941 |
| HL-1; HL-5; HL-27 and HL-36 | 0.960018382352941 |
| HL-1; HL-10; HL-32 and HL-47 | 0.960018382352941 |
| HL-3; HL-8; HL-11 and HL-45 | 0.960018382352941 |
| HL-3; HL-18; HL-26 and HL-51 | 0.960018382352941 |
| HL-5; HL-8; HL-10 and HL-26 | 0.960018382352941 |
| HL-5; HL-10; HL-11 and HL-12 | 0.960018382352941 |
| HL-5; HL-11; HL-13 and HL-21 | 0.960018382352941 |
| HL-8; HL-21; HL-23 and HL-53 | 0.960018382352941 |
| HL-8; HL-21; HL-26 and HL-56 | 0.960018382352941 |
| HL-8; HL-25; HL-26 and HL-47 | 0.960018382352941 |
| HL-8; HL-26; HL-32 and HL-35 | 0.960018382352941 |
| HL-10; HL-13; HL-26 and HL-28 | 0.960018382352941 |
| HL-10; HL-18; HL-26 and HL-32 | 0.960018382352941 |

TABLE 10
bacterial species and combinations of 2 to 20 bacterial species giving the best AUC in
the method of the invention.

| combinations of bacterials species | AUC |
|---|---|
| HL-1 | 0.936055672 |
| HL-1 and HL-5 | 0.955685399 |
| HL-10, HL-1 and HL-5 | 0.964778099 |
| HL-8, HL-3, HL-53 and HL-26 | 0.975380777 |
| HL-10, HL-26, HL-8, HL-53 and HL-3 | 0.976070116 |
| HL-53, HL-8, HL-13, HL-3, HL-26 and HL-37 | 0.97761292 |
| HL-37, HL-26, HL-10, HL-8, HL-21, HL-53 and HL-11 | 0.979713761 |
| HL-10, HL-5, HL-26, HL-25, HL-53, HL-22, HL-8 and HL-17 | 0.980370273 |
| HL-26, HL-37, HL-21, HL-10, HL-5, HL-17, HL-16, HL-8 and HL-3 | 0.981026786 |
| HL-15, HL-11, HL-27, HL-35, HL-8, HL-22, HL-47, HL-26, HL-10 and | 0.983652836 |
| HL-37 | |
| HL-28, HL-21, HL-5, HL-27, HL-26, HL-17, HL-3, HL-38, HL-40, HL-37 | 0.981026786 |
| and HL-25 | |
| HL-8, HL-45, HL-35, HL-53, HL-17, HL-26, HL-3, HL-18, HL-15, HL-10, | 0.985556723 |
| HL-37 and HL-40 | |
| HL-33, HL-13, HL-10, HL-28, HL-36, HL-17, HL-8, HL-3, HL-22, HL-53, | 0.982405462 |
| HL-35, HL-5 and HL-27 | |
| HL-56, HL-17, HL-21, HL-35, HL-40, HL-26, HL-12, HL-13, HL-45, HL-3, | 0.983193277 |
| HL-5, HL-10, HL-8 and HL-27 | |
| HL-31, HL-11, HL-25, HL-10, HL-35, HL-12, HL-28, HL-37, HL-5, HL-15, | 0.981026786 |
| HL-33, HL-17, HL-51, HL-27 and HL-40 | |
| HL-33, HL-51, HL-39, HL-27, HL-56, HL-31, HL-23, HL-10, HL-18, HL-4, | 0.981617647 |
| HL-11, HL-8, HL-21, HL-45, HL-5 and HL-17 | |
| HL-45, HL-27, HL-47, HL-5, HL-51, HL-8, HL-26, HL-3, HL-53, HL-37, | 0.982602416 |
| HL-13, HL-11, HL-38, HL-17, HL-23, HL-1 and HL-28 | |
| HL-31, HL-11, HL-33, HL-49, HL-38, HL-28, HL-36, HL-21, HL-22, HL-4, | 0.982208508 |
| HL-37, HL-45, HL-27, HL-15, HL-51, HL-8, HL-17 and HL-56 | |
| HL-39, HL-18, HL-56, HL-28, HL-36, HL-45, HL-49, HL-7, HL-17, HL-35, | 0.981551996 |
| HL-33, HL-11, HL-5, HL-8, HL-10, HL-12, HL-15, HL-25 and HL-22 | |
| HL-47, HL-5, HL-15, HL-36, HL-37, HL-35, HL-44, HL-11, HL-8, HL-17, | 0.982536765 |
| HL-31, HL-18, HL-13, HL-21, HL-51, HL-4, HL-28, HL-45, HL-33 and HL-3 | |

### REFERENCES

[0186] 1 Jorgensen, T. et al. A randomized non-pharmacological intervention study for prevention of ischaemic heart disease: baseline results Inter99. Eur J Cardiovasc Prey Rehabil 10, 377-386, doi:10.1097/01.hjr.0000096541.30533.82 (2003).

[0187] 2 WHO. Obesity: preventing and managing the globalepidemic. Report of a WHO consultation. Tech. Rep. Ser. 894 (World Health Organisation, Geneva, 2000).

[0188] 3 Treuth, M. S., Hunter, G. R. & Kekes-Szabo, T. Estimating intraabdominal adipose tissue in women by dual-energy X-ray absorptiometry. Am J Clin Nutr 62, 527-532 (1995).

[0189] 4 Matthews, D. R. et al. Homeostasis model assessment: insulin resistance and beta-cell function from fasting plasma glucose and insulin concentrations in man. Diabetologia 28, 412-419 (1985).

[0190] 5 Manichanh, C. et al. Reduced diversity of faecal microbiota in Crohn's disease revealed by a metagenomic approach. Gut 55, 205-211, doi:gut.2005.073817 [pii] 10.1136/gut.2005.073817 (2006).

[0191] 6 Li, R. et al. SOAP2: an improved ultrafast tool for short read alignment. Bioinformatics 25, 1966-1967, doi:btp336 [pii] 10.1093/bioinformatics/btp336 (2009).

[0192] 7 Oksanen, J. et al. vegan: Community Ecology Package. (2012).

[0193] 8 Rajilic-Stojanovic, M. et al. Development and application of the human intestinal tract chip, a phylogenetic microarray: analysis of universally conserved phylotypes in the abundant microbiota of young and elderly adults. Environ Microbiol 11, 1736-1751, doi:EMI1900 [pii] 10.1111/j.1462-2920.2009.01900.x (2009).

[0194] 9 Qin, J. et al. A human gut microbial gene catalogue established by metagenomic sequencing. Nature 464, 59-65, doi:nature08821 [pii] 10.1038/nature08821 (2010).

[0195] 10 Arumugam, M. et al. Enterotypes of the human gut microbiome. Nature 473, 174-180, doi:nature09944 [pii] 10.1038/nature09944 (2011).

[0196] 11 Benjamini, Y. H., Y. Controlling the false discovery rate: a practical and powerful approach to multiple testning. Journal of the Royal Statistical Society 57, 289-300 (1995).

[0197] 12 Jensen, L. J. et al. eggNOG: automated construction and annotation of orthologous groups of genes. Nucleic Acids Res 36, D250-254, doi:gkm796 [pii] 10.1093/nar/gkm796 (2008).

[0198] 13 Kanehisa, M., Goto, S., Sato, Y., Furumichi, M. & Tanabe, M. KEGG for integration and interpretation of large-scale molecular data sets. Nucleic Acids Res 40, D109-114, doi:gkr988 [pii] 10.1093/nar/gkr988 (2012).

[0199] 14 Jiang, D., Huang, J. & Zhang, Y. The cross-validated AUC for MCP-logistic regression with high-dimensional data. Stat Methods Med Res, doi:0962280211428385 [pii] 10.1177/0962280211428385 (2011).

1) A method for determining whether a subject has a reduced gut bacterial diversity, said method comprising:
a) detecting from a gut microbial DNA sample obtained from said subject whether at least one gene from at least one bacterial species from Table 1 is absent in said sample, and
b) determining that the subject has a reduced gut bacterial diversity, if at least one gene from at least one bacterial species from Table 1 is absent in said sample.

2) A method for determining whether a subject has a reduced gut bacterial diversity, said method comprising:
a) detecting from a gut microbial DNA sample obtained from said subject whether at least one gene from at least one bacterial species from Table 2 is present in said sample, and
b) determining that the subject has a reduced gut bacterial diversity, if at least one gene from at least one bacterial species from Table 2 is present in said sample.

3) A method according to claim 1 or 2, characterised in that it comprises a step of determining from a gut microbial DNA sample obtained from said subject wheter at least one gene from a bacterial species chosen from the list consisting in HL-1, HL-57, HL-53, HL-4, HL-54, HL-2, HL-3, HL-8, HL-10, HL-45, HL-22, HL-26, HL-9, HL-5, HL-11, HL-14, HL-13, HL-18, HL-12 HL-21 from table 1 is absent in said sample.

4) A method according to anyone of claims 1 to 3, characterised in that it comprises a step of detecting from a gut microbial DNA sample obtained from said subject whether at least one gene from each of the bacterial species of any of the bacterial species combinations indicated in table 7, 8 and/or 9 is absent and/or present in said sample.

5) A method according to anyone of claims 1 to 4, characterised in that it comprises a step of detecting from a gut microbial DNA sample obtained from said subject whether:
at least one gene from each of the bacterial species HL-1 and HL-5 from table 1 are absent in said sample, or;
at least one gene from each of the bacterial species HL-10, HL-1 and HL-5 from table 1 are absent in said sample, or;
at least one gene from each of the bacterial species HL-8, HL-3, HL-53 and HL-26 from table 1 are absent in said sample, or;
at least one gene from each of the bacterial species HL-10, HL-26, HL-8, HL-53 and HL-3 from table 1 are absent in said sample, or;
at least one gene from each of the bacterial species HL-53, HL-8, HL-13, HL-3, HL-26 and HL-37 from table 1 are absent in said sample, or;
at least one gene from each of the bacterial species HL-37, HL-26, HL-10, HL-8, HL-21, HL-53 and HL-11 from table 1 are absent in said sample, or;
at least one gene from each of the bacterial species HL-10, HL-5, HL-26, HL-25, HL-53, HL-22, HL-8 and HL-17 from table 1 are absent in said sample, or;
at least one gene from each of the bacterial species HL-26, HL-37, HL-21, HL-10, HL-5, HL-17, HL-16, HL-8 and HL-3 from table 1 are absent in said sample, or;
at least one gene from each of the bacterial species HL-11, HL-27, HL-35, HL-8, HL-22, HL-47, HL-26, HL-10 and HL-37 from table 1 are absent, and at least one gene from the bacterial species HL-15 from table 2 is present, in said sample;
at least one gene from each of the bacterial species HL-28, HL-21, HL-5, HL-27, HL-26, HL-17, HL-3, HL-40, HL-37 and HL-25 from table 1 are absent, and at least one gene from the bacterial species HL-38 from table 2 is present, in said sample;
at least one gene from each of the bacterial species HL-8, HL-45, HL-35, HL-53, HL-17, HL-26, HL-3, HL-18, HL-10, HL-37 and HL-40 from table 1 are absent, and at least one gene from the bacterial species HL-15 from table 2 is present, in said sample;
at least one gene from each of the bacterial species HL-33, HL-13, HL-10, HL-28, HL-36, HL-17, HL-8, HL-3, HL-22, HL-53, HL-35, HL-5 and HL-27 from table 1 are absent in said sample, or;
at least one gene from each of the bacterial species HL-56, HL-17, HL-21, HL-35, HL-40, HL-26, HL-12, HL-13, HL-45, HL-3, HL-5, HL-10, HL-8 and HL-27 from table 1 are absent in said sample, or;
at least one gene from each of the bacterial species HL-31, HL-11, HL-25, HL-10, HL-35, HL-12, HL-28, HL-37, HL-5, HL-33, HL-17, HL-51, HL-27 and HL-40 from table 1 are absent, and at least one gene from the bacterial species HL-15 from table 2 is present, in said sample;
at least one gene from each of the bacterial species L-33, HL-51, HL-39, HL-27, HL-56, HL-31, HL-23, HL-10, HL-18, HL-4, HL-11, HL-8, HL-21, HL-45, HL-5 and HL-17 from table 1 are absent in said sample, or;
at least one gene from each of the bacterial species HL-45, HL-27, HL-47, HL-5, HL-51, HL-8, HL-26, HL-3, HL-53, HL-37, HL-13, HL-11, HL-17, HL-23, HL-1 and HL-28 from table 1 are absent, and at least one gene from the bacterial species HL-38 from table 2 is present, in said sample;
at least one gene from each of the bacterial species HL-31, HL-11, HL-33, HL-28, HL-36, HL-21, HL-22, HL-4, HL-37, HL-45, HL-27, HL-15, HL-51, HL-8 and HL-17 from table 1 are absent, and at least one gene from each of the bacterial species HL-49, HL-38 and HL-56 from table 2 are present, in said sample;
at least one gene from each of the bacterial species, HL-18, HL-56, HL-28, HL-36, HL-45, HL-17, HL-35, HL-33, HL-11, HL-5, HL-8, HL-10, HL-12, HL-25 and HL-22 from table 1 are absent, and at least one gene from each of the bacterial species HL-39, HL-49, HL-7 and HL-15 from table 2 are present, in said sample;
at least one gene from each of the bacterial species HL-47, HL-5, HL-36, HL-37, HL-35, HL-44, HL-11, HL-8, HL-17, HL-31, HL-18, HL-13, HL-21, HL-51, HL-4, HL-28, HL-45, HL-33 and HL-3 from table 1 are absent, and at least one gene from the bacterial species HL-15 from table 2 is present, in said sample.

6) A method according to any of claims 1 to 5, characterized in that it comprises a step of detecting from a gut microbial DNA sample obtained from said subject whether at least one gene from the bacterial species HL-1 from table 1 is absent in said sample

7) A method according to any of claims 1 to 6, characterized in that it comprises detecting the number of copies of at least one bacterial gene from said bacterial species in the sample.

8) A method according to claim 7, characterized in that it comprises detecting the number of copies of at least 10, 20, 30, 40, or at least 50 bacterial genes from said bacterial species in the sample.

9) A method according to any of claim 7 or 8, characterized in that said bacterial genes are chosen in the list consisting of sequence SEQID 1 to sequence SEQ ID 2900.

10) A method according to any of claims 1 to 9, characterized in that the presence or absence of the bacterial genes according to the invention is detected by the use of a nucleic microarray.

11) A method according to claim 10, characterized in that the nucleic microarray is an oligonucleotide microarray comprising at least one oligonucleotide specific for at least one gene having a sequence selected from SEQ ID NOs 1-2900.

12) Method for the in vitro risk assessment of developing metabolic disorders, preferentially type II diabetes, hyperglycemic syndrome, heart diseases, insulin resistance or hepatic stasis, comprising the steps of:
a) Determining whether said subject has a reduced gut bacterial diversity with a method according to any of claims 1 to 11;
b) If the subject has a reduced gut bacterial diversity, assessing the risk for said subject to develop said metabolic disorders.

13) Method for the in vitro risk assessment of developing immune disorders, preferentially sensitivity to nosocomial pathogens in elderly, allergic asthma in neonatal subjects, atopic dermatitis or type I diabetes in a subject, comprising the steps of:
a) Determining whether said subject has a reduced gut bacterial diversity with a method according to any of claims 1 to 11;
b) If the subject has a reduced gut bacterial diversity, assessing the risk for said subject to develop said immune disorders

The application's sequence listing, which the Patent Office published only in electronic form, follows.

SEQUENCE LISTING (2900 sequences)

SEQ ID NO: 1 - DNA, 1713 bp, Unknown
  Unknown gut bacteria
atgacaccatcagaatggagtttccgtatgaaacacacgttgaaaatactgatcccgatcctgctgatccttgcgctgctgatcggcgcgtgctggtttttcctcatcgcccgccgcgatctgacggagagcgtgtttacctactggggcaatcatttttataacaacggccgctacggccgcgccatcacctgctacaagctcgccatgcacttcgccccgaaggacgccgagcttgccatctggctctcgaacgcttacaaacggagcggcaactatacgaaggccgaatataccctcgtcaacgccatcacgcagagccccgacgcggccgacctctacatcgccctgtccaagacctacgtggagcaggacaacctccttgacgccgagaccatgctctgccgcatcaccaacgacgccgtccgcacccagatcgacgccctgcgccccgccgcacccgtgatcgagccggagagcggcacctatacggaatacatcgatgtcaccatcaccgggaccgagggcaccgtctacgccgtctgcaacagcgatttcccggccgaggagacggacatctataccggccccatctccctgaccgcgggcgagagcaagatcgtcgcgctgagcgtggcggaaaacggcctcgtgagcgacgcggtctacgccggctataccgtcggcagcgtcgtggagccggtcacgctggcggacgcggggctggacagctatgtccgtgagctgctcggcaagacggctggcagcacgctgatgacggacgagctctgggccatcgaggagctggacctgcccgataccgtcgcctcgctggaggatctgccgtacttcaccggcctgcgcacgctcgcgctgcaccatagcagcgcgtcgatggacctgtcggtcctcgcccagctgccgacgctgcgcacgctggacctgtccggctgcacgctctcgtcggcggcgatgagcaccatcgtctcactgccggagctgacgagcctgaacctctccggctgcgccgtcatcgacatcaacgccctgattggcctgcagaagctggaattcctcgacctttccaacaacaccatctccgacctcaccgccctgtccgccctgcaggcgctcaaggagctgcatctgaccaacaaccccatcacctcgctcgccaacctcaaaaactgcacgcagctggagatcctctacgcgaaccagtgctccatcacgcgcatcgcgggcctggccgaccatacggcgctcaaggagctgtatctggccaacaaccagatcgcggatatctccgtcctcgcctcctgcacggcgctgcagacgctggacctgtcgttcaacgcggtcacggatatctccatcgtttccgagctcaggcagctggtcgacctcaacgtgagcaacaaccagatcaccgtcttcccggctgtggacgccgatacgccgctctggcacgtcgatatcagccacaaccagatcgaggatctgaccggccttgcgggcaacctctccgtcaacttcatcaacgccgactataataagatcaagtccatcgcaaagctcgaggcgtgcgtcatgctcgttaagatgaacctctgggataaccccgtgaacaccgacgaggtcaagaagctgcaggacgtcggcatcatcatcaactataaccccgaatacaaggaaacggacacagaagcctga

SEQ ID NO: 2 - DNA, 1746 bp, Unknown
  Unknown gut bacteria
atgatcaaacgtttggcggcctgtatccgggaatacaaaaggccgacgatcctgacccccgtgtgcatggtgggcgaggtcgtatgcgagtgcacgatcccgctgctgacggcggatctgatcaacgcgatccagaacggctgcacgatgcagaccattctgtccttcggactcaagctgttcgtcatcgccatgctgtcgctggggttcggatcgttgtccggctggttcgcggcagaggccgcggcgggctttgcgaagaatctgcggcatgatctgtattatcaggtgcagggcttttcctttgcgaacatcgaccggttttcgacctcgtcgctcgtcacgcggctgacgacggacgtcacgaacatccagaacgcgttcatgatgtgcatccgcatcgcggtgcgcgcgccgatgatgctggtgttcgcggtggtgatgtccgtccgcgtgggcaagcagctggcgctcatcttcgccgggatcgtgccggtgctggggttcgcgctgtttctgatgatccggagcgcgctgccgctgttcaaggcggtcttcaagaaatacgacgcgctcaaccactccgtgcaggagaacgtgcaggccatgcgcgtggtcaagagcttcgtgcgcgaggactatgagacggagaaattctccgccgcctccgactccgtgcggaaggatttcctcaaggcggagaaaatcctggcgctcaactcccctgccatgcagttctgcgtgtacacgtcgatgatcctcatctcgtatttcgcggcgaagctcatcgtcacgtcgggcggaacgtatctgggcgtgggaagtctgacgagcatgatcacgtattccatgcagatcctcatgagcctgatgatgctctcgatgatcttcgtgatgctgacgatggcgcaggcctccggcaagcgcatctgcgaggtgctcgacgagacgagcagcctgcagaacccggcagagccggtctatgatgtgaagaacggcgacgtggattttgaccatgtcaactttaagtattcggcggcggcgaagcgcagcgcgctttcggacgttgatttccatgtgagatccggccagaccgtcggcatcattggcggcacggggtcttctaagacgagtctggtgcagctcatctgccggctgtacgacgtgacggacggcagcgtgcgggtcggcggcgtggacgtgcggcagtacgatctggagacgctgcgcaaccaggtcgcggtcgtgctgcagaagaacgtgctgttctccggcacgatcaaggagaatctgcgctggggcgacgcgaacgcgtcggacgaggagctgcagcgggcctgcgagctggcgtgcgcggatgaattcatccagcagatgccggacaaatacgacacctatatcgagcagggcggcacgaacgtcggcggcgggcagaagcagcggctgtgcatcgcgcgggcgctgctgaaaaagccgaagattttgatcctcgacgactcgacctccgctgtcgacacgaagaccgacgcgaagatccgcgcggcgctgcgctcggagatcccggagacgacgaagttcatcatcgcgcagcggatctcgtccatccagaacgcggatctcatcctcgtgctcgagggcgggcagatcgacgccatgggcacgcacgagcagctgctggcttcgaaccggatctaccgggaagtctatgaatctcagaacaaggcgggaggtgctgacaatggctaa

SEQ ID NO: 3 - DNA, 1251 bp, Unknown
  Unknown gut bacteria
atgaaaatcaaaaatgttgtctgcgcaccaggacgtaccggcttctattttgacgatcagcgcgcgatcaagcgcggcgcggggcacgacgggatgttctatatcggtcagcctgtcaccgagggcttttccgccgtccgtcaggcaggcgaggcgatctcggtcatgctgatcctggaggacggccaggtcgcttacggcgactgcgcggcggtacagtattccggcgcaggcgggcgcgatccgctgtttttggcgaaggattttattcctattattgagcagtacatcaaaccgtgtctggttggccaggaagcggacaatttccgtgcgcttgccgcaaggatggaagccatcgaggtcggcggcaagcggctgcatacggcgatccgctatggtgtttctcaggcgctgcttgacgccgttgcaaaggcgagcgggcgcatgatgtgtgaggtcgtggcggatgaatacggctgcacggtatcggatcacctgattccgatctttacccagtccggggacgaccggtatgataatgcggacaaaatgatcatcaagggcgcgcaggtgctcccgcacgcattgatcaacaacggggagacgaagctcggcgcgcacggcgaaaagcttcaggagtatgtggcgtggcttcgtgaccggatcttggcgcagcgtctggacgagcactatgccccggtcctgcatatcgatgtctacggtacgatcggcgcagccttcggaaatcataactacgcagccatggcggattatctggcggtcctggagcagaccgcaaagccgttccacctgcggatcgaaggaccgatggactgcgactgtgaccgcgaaacgcagatggaggcgctcgcggggctgaccgcggagctggaccggcgcggcatcgatgttgagctggtcgctgacgaatggtgcaatacgctcgaagatatcaagcttttcgccgatcacaaagccggtcacatgatccagatcaaaacgccggatctcggcggcatcaacaataccatcgaggcagtcctctactgcaaggaaaagggcatcggtgcatatcagggcggcacctgcaatgagaccgaccgctctgcgcaggtctgcgtgcagtgcgccatggcgacacagccggcacagatcctcgcaaagcccggcatgggtgtggacgaaggctatatgatcgtctataacgagatgaaccggatcctcgcgctgcggaaggcaaaggcagaataa

SEQ ID NO: 4 - DNA, 990 bp, Unknown
  Unknown gut bacteria
atgcagaaggagcaggttatcatgcgcggaatcccgtctttgatcacagagatccgaaagaaagtctttaccgaggtcgcccggatggcatactccggcgactacaccgatatggaggatatccccttcaagatcgtccccggccagagcccgctgcaccgcgaatcggtctttcttgagcgcgccatcgcgggcgaacgcgtgcgtcttgcgatgggtctgtccctgcagcccgtacagacgcgcacgcttctgaccgagggcatggaccaggccgccatcgccgagcagtattacgagccgccgctcgtcaacatcatcccctacgcctgccacgcctgcccgacgcggcagtaccgtgtcaacgagctgtgtcagggctgtctcgcctcctcgtgccagcgcgtgtgcccgaagggcgcgatcaaatttgtcaacggcaagagccgcatcgaccagaaactgtgcatcaagtgcggcaaatgcgccagatcctgtccgtacaacgccatcacctacctcgagcgcccgtgtcaggccgcctgcggcatggacgccatcggcgtcgacgaatacggcaaggcctgcatcgactatgaccgctgcgtctcctgcggccagtgccttgtgagctgcccgttcggcgcgatcgtcgacaagagccagatctatcaggtcatccgctccatgctcgagggcaacgaggtcgtggccatcgtcgcgccgtcgttcgtcggccagttcggcaaggacgtgaccgtgccgaagttcctcacggccatgaagcagctcggctttgccgatgtggtcgaggtcgcggtcggcgcggatatctgcacgatcgaggaagcgcgggactttatggaaaaggtcccggaggagcagcggttcatggcgacctcctgctgcccgtcgtggcggatgatggccagacggctgttccccgccgaatccggcaacatttccatgacctacacgccgatggtctat

SEQ ID NO: 5 - DNA, 1221 bp, Unknown
  Unknown gut bacteria
aaaaagatcatcgcattgctgcttgcagcgatcatggtgctcggtctggctgcctgcgcatccaagacggagcccgagaccaccaccgaaccggaaaccaccaccgaaaccgctcccgagaccacggaagaacccgccgctgaggagcccgcagctgaagaagagaccccggctgaagagcccgctgccgacgctgcttactccgtcgccatgatcaccgactacggtgataccaccgaccagtccttcaaccagaccacctacgaggcctgcaaggagttctgcgaggccaacggcctgcagtttaactatttcaagcccgccggtgactccgacgccgagcgtgtcgccatgatcgagtccgcgatcgacgagggctacaacgttgttgtgatgcccggctacgctttcgcaggcgccatcaaggaaactgccgacatctatcccgaggtcaccttcattgcgctggacgtcagtgccggcgatctgggcgatgactacaccctgcccgccaacctctactgcgctgtctatcaggaagagctgtgcggctacatggccggctacgcagctgtgaagctccgctacaccaagcgcggactcctgggcggcatggctgtccccgctgttgtccgttacggcttcggctatgtgcagggcgttgacgctgctgccaaggagctcggcatcacggtcgacctcaagtacgcttacggcaaccagttcgttggcgacgctgacatcaccgctgcaatggacacctggtatcagggcggcacggagattgtcttcgcctgcggcggcggcatctatacctccgcggctgaggctgctgccaaggtcggcggcaagatcatcggcgtcgacgttgaccaggccggcatcatcgacggcgattacggcgaaggcatgaccgttacctccgcaatgaagggccttgctcccaccgtcaagcatctgctctccgaagtcgtggccggcaactttgccaactacggcggcaagatcgaaacgctgggcctcgtctccgccaacccggaagagaactacgtccagatcccgaccgcttccacgcagttcgaagacggcaagttcacccaggctgactacgaagcgctcgtcgctgccatgttcgccggcgatgtcaccgtctccaacgacatcacggctatgcccgctgtcaccaacgtcaccgttgaggacttcggcaacctgaagtaa

SEQ ID NO: 6 - DNA, 1446 bp, Unknown
  Unknown gut bacteria
atgaataagcgggcgatcgtctatgtgctgggcgcggtgctgctgatcggggccgcgctgatgctgccgccgctgctcgtggcgctgatctaccatgaggtaagcggctggtatttcctctgggtgatgctgggggcggcggtgctcggcgcgctggccctgcggctgggcggcggcaagcgggccgtcatgtacgcaaaagaagggctgatcgcggtggcgctcagctggatcgtgctttcgctcgtcggcgcgctgccgttcacgctttcggggcagatcccgttttatctcgacgccgtgttcgagatgatctccggctttaccaccaccggctcgagcatcctgcccgcggtggaggagctcgacaagtgcatgctgttctggcgcagcttttcgcactggatcggcggcatgggcattctggtgttcatgctggccatcgtccggatggacggcggccaggccatccacctgctgcgggccgagagccccgggccgacggtctccaagatggtgccgcggatggccgattcgtccaagatcctctacgggatctattttggcctgacggtgctgcagatcctcttttatctggccggcggcgagccgctgcttgactcgctctgcaatgccttcggcacggccggcaccggcggctttgccatccgcaacgattccttcgcctcctacagcgcctacacgcagacggtcacgaccgtcttcatggccctgttcggcgtcaatttttcgatctatttcttcctgctgcgccggaaattcgacctggcgtggaagaatacggagctgcgctggtacgtgtcgatcattctcggctcgacgctgctcatcacctgcaacatcatgaagctctacggcggcgatttcggcttcagcctgcatcacgcggcttttgccgtctcctccgtcatcaccacgacgggctttggcacggagaactttgacctgtggccggagttttcccgcgtgatcctggtgctcctcatgatcgtcggtgcgagcgccgggtcgacgggcggcggactgaaggtctcgcgcgtggtcatcctgatgcgcgcggccaaggcggagctgcgcaagatcctgcacccgcacaccgtgaaggtcatcaccgtcgacggcaagcccgtctccggcgagacggtccgggccgtgagcacctattttatcctgtacgtgctcatcgctgcggcgtcggtgctgctcgtctcgctcgacggctacgacggctcgaccacgctcacggccgtcatggcgacgttcaacaacatcggtcccggcctcggcctctgcggcccggcgggcaacttcgcgttcttttctccgttcgcgaaggtgatcctgtgcctcgatatgctgctcgggcggctggagctgtacccgatgctggtgctgctgatgccgagcacgtggagaaagaaataa

SEQ ID NO: 7 - DNA, 657 bp, Unknown
  Unknown gut bacteria
ttggacgcgaaattactggacctgctggagcagatcgcaaaggcgatcgcagcacaattcggcagcaactgcgaagtggtgatccacgagctttccggcaaaagcgcctattcctcgatcgtcgcgatcgaaaacgggcatgtgaccggccgcaaggtgggcgacgggccctcccatgtggtgctggagcagctggggcacgaggatgacagcgcaaaggatcagcttgcgtatctgacgcgcacaaaggacggaaagatcctgaaatcctcctctgtgtatatccgtgacgagtccggaaaggtctcggggatcctggggatcaactatgacatttccatgatgcagctgtttgaaaactccctgcatgacttcatctcagccgatcagcatgcgagccgcgagcccgagcgcatcaccctcaacgtggccgatctgctcgacgacctcatccggcaggcggacgaactggttggaaaaccggtcgcgctgatgaccaaagacgacaaggtcaaggccatccgctatctcagtaattccggcgctcttctgattaccaaatccggcgataaaatagcgaagcatttcggcatatccaagtacactctctattcatacctagataacagtaaaacaggaggaacaaacgaactatga

SEQ ID NO: 8 - DNA, 1176 bp, Unknown
  Unknown gut bacteria
gaagacgccgtcaacgagatcttccccgagatctacgaagctgccattgtcaagcaggagctcaaggccgtcggccagccctccgttaccgatatgcagacccccgaagacggcagcgtcgtgctgaccgtttccactgagctctaccccgaggtcaccctcggcgagtacaagggcatcgaggtccccaaggagaccgtttccatctccaaggccgaagtcgacgcagagctcggccgcatgcaggaccgcaacgcccgcatcgagaccgttgaccgcgaagccaagaccggcgacaccgtcattctggactttgaaggctttgtcgacggcaagcccttcgacggcggcaaggccgagggctataccctgacgctcggctccggcgcgttcatccccggcttcgaagatcagctcgtcggcctgaaggccggtgaagagaaggccgtcgaggtcaccttccccgagagctacaccaaggagctggccggcaaggccgcgaccttccagtgcaagatccacgaggtcaaggagaccatcaagcccgagctcgacgacgagttcgccaaggacgtctccgaatacgacacgctggccgccctcaagaagagcatcaaggccgacctcgccaagaagcgtcaggaagctgttgaccgtgactttgagaacgaggctgtcgttctggccggcaagaacatgacctgcgacatccccgcctgcatgatcgacgagcaggtcgacaagcacctcgagcagtttgcctatcagctgcagtcccagggcatgaagatggaagactacgtcaagatgatcggcggcgacgtcaagggcatgcgcgattccatgcgcccgatggcggagcagaccgtccgcagcaacatcctgctgagcgagatcgtccatcaggagaacatcgacgtgaccgacgaggaagtcgaagaagagctgaagaagctggccgagcagtacaagatggagctggacaagatcaaggaaatgatcgacgtcgaggccgtcaagtccgatctcaagggccgcaaggctgtgaagctgatcgtcgacaatgccaagcccgtcgagaaggaaaaggaaaagaaggccgccaagaaatctgccaagaaggaagacgaggctgccgaagctcccgcagaagaggctcccaaggctgaggaataa

SEQ ID NO: 9 - DNA, 1653 bp, Unknown
  Unknown gut bacteria
cagcagatgatccaggagaagatccacgaatacgggctgaccggcgtagtcatctgttcgtgctcccccagaatgcacgagcagacgttccgcaagacctgtgaaaaagcaggtctcaacccctatatggtccagatcgccaacatccgcgagcagtgctcctggatccacaagtacaaggaggcgggcacggaaaaggccatcatcctcggccgggccgccatcgccaaggtacatctgaacgcgccgctgaccgcgggcagcagccccgtgaccaagcgggcgctcgtcatcggcggcggcatcgctggcatccagacggcgctcgacatcgccgaggccggatttgaggtcgatatcgtggaaaagcagccgaccatcggcggcaagatgacccagatcgacaagaccttcccgacgctcgactgcgccgcgtgcatcctgaccccgaagatggtcgactgcgcacagaacgagaagatccacatctattcctactccgagatcgaatccgtgggcggcttcgtcggcaacttccacgtgaagatccgccgcaaagcgcgcttcgtcaaggaagacgtctgcaccggctgcggactttgcaccgagaagtgcccgcagaagaaggtcccgaacgaattcaacctcggcatggacaaccgccgcgccatctatatccccttcgcacaggccgtgccgaaggtcgcgaccatcgatcccaactactgcagcatgctcaaaaacggcaagtgcggtgtgtgcgcaaaggtctgttccgccggcgcgatcgactacaagcagaccgacaccttcatcgagcaggaatacggcgccatcgtcgccgcgacgggcttcaaccccatcgacctttccaaattcgatgaattcgcctacagccagagcccggacgtcgtctcgagcctggaatttgagcgcctcatgaacgccgcgggcccgacgagcggcacgctcctgcgcccgtccgacggcacgcacccgaagaccatcgtcttcgtccagtgcgtcggctcccgctgtgacggtgtggagaagggcaagccctactgctccaagatctgctgcatgtacacggcgaagcacgccatgctctgccgcgaaaaatacccggacaccgacgtgtacgtcttctacatcgacgtccggacccccggcaaaaactttgacgagttctaccgcagagccgtcgagcagtacggcgtgcattacatcaagggcatggtcggcaaggtcacgccggagggcggcaagctcaaggtgcaggcgtccgacctgctcgagaaccggcagctgcacatcgacgccgacatggtcgtcctcgcggccgccatcgagcctgacaagtccgcccggccgctcgctacgatgctgacggcctccatggacaccaacgactttttcaccgaggcccatccgaagctccgcccggtcgaaagcccgacggcaggcgtgttcctgtccggcatgtgccaggggccgaaggatatccccgagacggtcgcacaggcgtccgccgcggcggcgaaggtcatcggccttctgtgcaaggacagcctgacctgcaacccgtgcgtggcgcagccggatgagatgatgtgcaacggctgctccaactgtgaaaaggtctgcccctac

SEQ ID NO: 10 - DNA, 843 bp, Unknown
  Unknown gut bacteria
atggaaaagaaaaaaggcctctccctgcagacgatcctgaccatcgcgggcatcgccctcatctacgtgctcgccttcctgctcgaccgcatcccgggcgtgcccatcatgctcacgacggttttgcgcaagggcgcgatctattccctcgtcgccgtctccatgaacctgctcaacggctttacgggcctgttctccctcggacaggcgggcttcatgctggtcggcgcctatgccttcgccgccatcaacatctcgagcggcatccgctcgacggtgtatcagtactatgatccgctgctcaaattctccctgaccgagacgctgcagaacgccctcggcaatacggcgggcaccgtcctcggcgtgttcgtttcgctgctgctggcgggcctgctcgccgcggggctggcgtacctcatcggcctgcccgtcctgaagctcaagagcgactatctggccatcgccacgctcggcttcgccgagatcatccgcgcgctggtccagctcgaggcgttcgcgcccgtcgccaacggctcgcagctgctgcgcggcttcccgtatttctccgataccttcatgccgttcgtgatcgtcggcatctgcatcgccatcgtcgtgctgctgatcaactcgacctacggccgcgccttcaaggccatccgcgatgatgagatcgccgccgaggccatgggcatcaaccttgcccaccacaagcgcatggcattcatcatctcctcgttctttgccggcatctccggcgcgctgctggccatgtaccagaccacggtccaggccaacacgttcaaatcggccatgacgtatgagatcctgctcatcgtc

SEQ ID NO: 11 - DNA, 978 bp, Unknown
  Unknown gut bacteria
atgatcgtggatattacctaccccattgagacctggccgaagcagaatgagctgacgcacatcaccgagggcatcaagcagtccaccggcggctcggtctgcaacaccatttcggacctcgcaagactcgatccccagcttccgctcgtggcctccggctttgccgggcatgacgccgagggcgatttcgtcctgcaggagatgggaaaatacaagaatatcgacctttccatggtcaagcgcaacggccgcacgtcctttaccgcggtcatgtccaacaaccagacgaaggagcgcaccttcttccagcacgcgggcgcgaacgcctactacggcgaggacgacatcgactgggataagctcgacgtcgatatcttccacattggctatatcctgctgctgccgcatctggacgagccggacgcggaatacggcacgaagatggcgcggcttctgcaccgggcgcagaaggccgggatgaagacgtccatcgacgtcgtctccgaggcgggcgagcgctttgcgcggctcgtgaccccggcgctcaaatacaccgactactgcatcatcaacgagcttgagacccagcagaccacgggcgtgctgctccgcggagaagacggcgtgctgcatgtggaaaacatgaaggccgcgctgcagaagctccacgagctgggcgttgcgaagtgggccgtcatccactgcccggagatcggctgcggcatggacgagaacggcaattactatgagtttgagagcctgaagctcccgaagggctatatcaagggcaccgtcggcgcgggcgacgcgttctgcgcgggcgttctgtacgcggcggagacggatatgccgctgccggaggcgctgaagctcggcgcttgcagcgcggcggcctccctcagcgaggtcagcgcgtccgacggcgtgaagacgaaggatgaagtcctgaagctgtacgagctgtacggcaagaaataa

SEQ ID NO: 12 - DNA, 567 bp, Unknown
  Unknown gut bacteria
atgacaaccttctccgagcagttccctatcgtatttcaggccctgaatgtgggctttttgcagacgctcaagctgttttttgtgacgctcatcggcgcgatcccgctgggtctgatcatctccttcggctccatgagccgctggtcgccgctgggctttctgcgcccgtatctgaaaaatctccccaaggacggcaagctcacctggtggcagaagacgcagctatggttcgcggtcgacttccggcccatccgcctgattgtgcgtttcgtcatctgggtcgtgcgcggcacgccgctgatgctgcagctgctggtgttctactacttccccggccttgtgctgcacaagaatatctggggcagcggcgaggcagggcgcttcctcgcatcgtcgatcgcgttcatcttcaactacgcgtgctatttctccgagatgttccgcggcggcatccagggcgtcccgaaggggcagcaggaggctgggcaggtgctcggcatgacgagcacgcagatcttcttcaaggtgacgctgctgcagatggtcaagcgcatcgtgccgcccatg

SEQ ID NO: 13 - DNA, 1449 bp, Unknown
  Unknown gut bacteria
atgcctgaaatcaaactcgaacacgtcaccaagcgctgggccaagttctacgctgtggaagacctgaatcttaccattgagaataacgcgttcgtcacgctgctcggtccctccggctgcggcaagaccacgacgctccgcatgatcgcgggtctggagaccccgacgtcgggccgcatcacgatcggcgacaaggtcgtcttcgacagcgacctcggtatcaacgtcccggccaacaagcgcaaggtcggcttcctgttccagaactatgcgctctggcccaacatgacggtctaccagaacatctccttcggcctctccaacatcaaagaggagctcccgaagatcgacttcgaggccaaaaatgctgcgcgtctggctcagatcctccagactccgtccgatgtgaccgcggttctggacgagtgccgcgacaaggacggcaagctggaagaaaagaaggccgtcctcaagctcatcgacgcctttacgctctcgcagtacacggcgaagaagctcttcggctatcatctggagaacggggccgatcgcgccgccgcgatcgccgcactgcaggcaaaggtcgacgcagcccataaggccgcgaaggacgccggctgcacgctggacgaggagttccgcttctgcagggacggcagcgtcgtcaagcagacgagaaagctcacgaaggaggagatcgacctctccgtccgccgcgtcagccgcatcgtcaagattggcatgttcatggaccggtatgcggccgagctctccggcggccagcagcagcgtgtcgccatcgcaagaacgctcgcgccggagcccacggttttgttcatggacgaaccgctgtcgaacctcgacgcgaagctgcggctcgagatgcgctatgagctgcagcgcctgcacgtggagaccggctcgaccttcgtctacgtcacgcacgaccagatggaggccatgacgctcgccacgcagatctgcctcatcaataacggcgttctgcagcagtatgaagcgccgctggaggtctatcatcacccggcgaacctctttgtcgccgacttcgtcggcaacccgtccatcaactttgtcgaagccaagggcaagcaggcggccgacggctcgctgaccctcacggtcctcggtgggctgacagccagattccgcccggcaaaggcgctcgagctttccaagtggttcgcagaccgcgacgcagctgccgccaagaaagccgccgacctcaaggagaaggccgcgcagaagggctacgtcgaaaagggcaacaaggatgaggtcttccgctatcatatcgcaaaggtcgacgaggaagacgactcccttgcggagcttcccgagatcacgaacgaagattttgtcctcggcatccgcccggagttcctcgacatcgcggacgaagggaacctccgcggcgagatctacggcgcc

SEQ ID NO: 14 - DNA, 1020 bp, Unknown
  Unknown gut bacteria
atgggcggcgacaacgccccggatcagatcgcgctcggtgcgatccaggccgcgaaggactttggctgcgaggccgtactggtcggccgcggcgaggccattttgcaggcgctcaaggaccaagggatcgagacgcttcccaagggcgtggagatcgccaacgccgacgacgtcgtcgatatgcacgacgacccggcgacggtcgtgaaaaagaaaaaggattcctccatggtcgtcggactgaccatgctcaaagagggcggcggcgacgcgttcgtctccgccggctcgacgggcgcactgctctctgcggcgacgctgatcgtccggcgcgtcaagggcatccgccgcgcggccatgggcccgcagatcccgacgaagaccggccgggagtgcgtcctcatcgactgcggtgcaacggcggactgcacgccggagtttctgctgcagtttgccttcatgggctcgtattacgcggaaaaggtcctcgggatcgaaaacccgcgcgtggcgcttctcaacatcggcgcagaggactccaagggcggcgagctgcagaaggccgtttacccgctgctgaagcaggcgggcgaggccgggaagatcaacttcaccggcaacatcgaagcgcgtgacgtgccgctgggcggcgcggacgtggtcgtttccgacggcttctccggcaatatcctgctcaaggggatcgagggcatggcgcttttcatggcctccatgatgaaggacatgttcaagaaaaatctgctgaccaagctggccgcgcttttgtgcatggacggcgtcaaggcgttcaagaagaaaatggactaccgcgagaccggcggcaccgcgctgatcggcctcaacaagcctgtcatcaaggcgcacggctcgtccgacgcgctggccatccgcaacgccatccggcaggccatcggcgccgtcgaggcggatgtcgccgggacactggcagcaaatatcgaccatatggtcgttccaaaggagtatcaacatgctgagtga

SEQ ID NO: 15 - DNA, 1347 bp, Unknown
  Unknown gut bacteria
atggcgacccgtcttccgtattccgattttgccgatatcctgccggaaatgaacaaggccggctactattcggtggaatgctggggcggcgctacgttcgactcctgcctgcgttacctgggcgaggatccctggcagagactgcgcgacatccgcaaggccatgcccgacaccaagctgcagatgctgcttcgcggccagaacctgctcggctacaagcactatcatgacgacgtcgtcgagaagttcgtcgagctgtccatcaagaacggcatcgacatcctgcgtatctttgacgcactgaacgacttccgcaacatcgccaccgcgctggaagctaccaagaaatacgcgaccaagaacaccgtcgcctccggctgtatctcctacacccagagcccggtccacacggtcgaaatatatgtcgagatgtgcaaggagctcaagaacatgggcttcgacaccatctgcctgaaggatatggccggcaccatgagcccgtacgaggccgagcacctcatcaagggcatcaaggacgccgtcggcgatgttcccctcatcctgcacacccactgcaccaccggcatggcttacatgaccgtgacgaaggccatcgagtccggcatcgacgtgatcgactgcgcgacctcctgcttctccaacggcaccagccagccctccaccgagaccatgttctacgccctcggccagtacggcatcgagactggcctcaatgaggacgtcatcaacaaggtcaacgactacttcaagcccatcaagcagaagtacgtcgattccggccgcatcagcgccaagtccatggcgaccgacgcgcaggcgctggtctacaaggtcccgggcggcatgctctccaacatgatcgccaacctgaccgacatgaaggccatggataagttcgacgccgcgctcaaggagatccccgaagtccgcaaggatctgggctatcccccgctggtcaccccgctgagccagatggtcggcaaccaggccgttaccaacgtcctgatgggcgagcgctacaagatcgtctccaaggaagtgcagaactatttcaagggccagtacggcatcgcgcccgcgcctgtctctgaagagctgcaggccaagatcctcggcgagggcggcaagcccgtcgactgccgcatcgaagacgccaagcgcaccggcgaagacttcaagaaagccaaggaagccctcggcgatctggcgaagagcgaagaggatgtcatgagctacatctgctatccggatcaggccatgaagttcttcgaagaccgcaaggccaaggaagaaaacgtctgcacctacgtcatcgaagaagcataa

SEQ ID NO: 16 - DNA, 1329 bp, Unknown
  Unknown gut bacteria
ctgcgtctgcgcggcacgcgcggaaaagcgctgaaaacaaaggagcacggaacagtgaacacttatatagtaaagggagatatctgcttcagccggagcatggatgagatcgtctgtctggagcagggcagcatcgttgtggaaaacggccgcatcaccggcgtctttcagacgctgccggcgcgctatgccgcgctgccggtgctcgattacggccatcggctgatcctgcccggtatgtccgacctgcatgtccacgcgccgcagttcgccttccgcgggctcggcatggatatggagctgctggagtggctcaacacctataccttcccggaggaatccaaatacaaggacctggactacgccgaaagggcgtatggcagcttcgcctcgcatctgctgcgcagcacgaccacgcgcgcggccatcttcgccaccatccatgtgcccgcgacggagcttctcatgcagaagctggacgcgatggggctggaatgcttcgtgggcaaggtcaatatgaaccgcaactcgccggtctacctgcgcgagatctccaccaaccaggccctgcgcgccaccgagcgctgcatctgcgagacgaaggcgcgctatgcccatgtcaggcccatcctgaccccgcgcttcatcccgtcgtgcacggacgatctgatgttcgggctggcgcggctgcgggtgaaatacgacctgccggtgcagagccatctgtcggaaaactattcggagatcgcctggatccgcgagctgtgcccgcgctcgaagaactacggcgacgcgtatgagcagttcggcatgttcggcggcggatatccgtgcatcatggcacactgcgtccactcgaacgaggacgagcaggcgctgatgcagaaaaacggcgtgttcatcgcccattcgccggaatcgaacatgaacctcgcctccggcgtcgcgccgatcaataaattcctcgataacggtctgcaggtcggccttgcgacggatatcgccggcggcagccacgagagcatgctccgcgccatgacccacgccatccaggcctcgaagctccgctggcggctgtatgaccaggacgtgaagcccctgtcgtttgaccgcgcgttctatcttgccaccatgggcggcggcgcgttcttcggcaaggtcggctcgttcctggacggctacgaatttgacgccgtcgtgctggacgacgcggcgctggaccatccgcaggagctttcggtccgcgcccggctcgagcgcgcggcctatctggccgacgaccggaacctcacggccaaatttgtcgcggggcagaaaattctcggttga

SEQ ID NO: 17 - DNA, 882 bp, Unknown
  Unknown gut bacteria
atgaagaaaaaacgctatttttcccgcacggtctgctttctgctctgcgcggtgttcgcgctgttgtttttgctgccgacggttctgaccatcacgaactccttcatgacgcagagcgagatcacggccagctacggccaggtctttgaaaacgccaacgacggcaagagctacatctccaagaccattgaactcaaattcatccccgacaaggtcagcttcacccagtatttcaccgtcctgctcaaaagcccggactatctgctgaaattctggaactccgtcatcctgaccgcgccgatcgtcttcgcgcagctcatggtcgcgtccatcgcggcctatggctttacccgctggcgcgggaaggtgcgcgacagtctgttcttcttctatgtgatcctgatgctcatgccgtatcaggtcacgctggtccccaactatctggtgagcgactggctgaagatcctcaatacccggtgggcgatcttcctgcccggcgcgtttgcgccgttctcggtctttctgctcaccaaattcatgcgccgcatccccatggctgtcatcgaatcggccaagatcgacggcgcgaacgagtggcatatcttctggaacatctgcctgccgcagtgccggagcgccctctattccattgcgatcctggtgttcatcgacaactggaacatggtcgaacagccgctgatcctgctcaacgacgtggagaagcagccgctttcgatgttcctgtccagcatcaacgccggcgagatcggcatcgcctttgccgccgccgtcatctatatgatccccggtctgctgctgtttctgcacggcgaggcgtatctggtggaaggcatcgcacattctggctctgtgaaaggataa

SEQ ID NO: 18 - DNA, 1347 bp, Unknown
  Unknown gut bacteria
atgacccacacgataggcatgatctcgcttggctgcgccaaaaatcaggtcaatgccgagcatatgctctggctgctgcggcaggcagggtatgagatcagccccgaccccgacggtgcggagctcgtcatcgtcaacacctgcggctttatcgagtccgcaaagaccgaggccatcgacaacattctcgccatggcgcagctcaaggcggagggccggatccagaagatcctggtcaccggctgtcttgcgcagcgctatcaggaggagattctgcaggaaatgccggaggtcgacggcgtgcttggcaccggctcctactttgacgttgccaacgcggtcgggcaggtgctgagcggcaaacgctacaagcgcttcgacgatatcaatgcagaccagtcggaggatggccgtatcctgaccacgccggagtattatgcctatctgaagatcgccgagggctgcgacaaccactgtgcctactgcatcatcccgaagctgcgcggcaagctgcgcagccgcccgatcgaggagctcgtcaaggaggcggagcagcttgcggccgacggcgtcaaggagctgatcgtcgtcgcgcaggataccagccgctacggtctcgatctctacggcgagcggaagctcgcggagctgctgcggcagctgtgccggatcgacgggcttgtctggatccgcgtgcactatctctatccggatgagatgtcacaggagctgattgacgtgctggcgaacgagccgaagatcgtcaagtatctggatatcccgatccagcacatcaacgacgatatcctccgccgcatgaaccgccgcggcaacggcgaatacgtcaaggagctgttcgccaagctccgccgcgagatcccaggccttgtgctccgcacgagccttatcaccggccttcccggcgagggcgaggcggaatttgcccagctctgtgactttttgaaggaatacaagctcgagcgcgtcggtgcgtttgcgttctccccggaggagggcacgcgcgcggcagagatggaatatcctgataccgagatcgcccggcagcgcgcggacatggtcgccgagatccagtcccgcatcatggacgattacaacgaatcgtgcatcggcaagaccatgcaggtcctgtgcgagggctacgatcccgatgaagagagctattacggccggacctttgccgactcgccggatattgacgggaagatctggttcacggcggaaaaacatatcaagaccggtgactttgccgacgtccgtgtggtggacgcctatgacggtgagcttgtcggtgtgctggaggaagaatacaatgacgactgcgagtaa

SEQ ID NO: 19 - DNA, 1383 bp, Unknown
  Unknown gut bacteria
ggcaagtcgaccctcggccgcaccatcctccagctctaccatcagacctacggccgcacgatgtactatggaagatcgctggacgatctggcgccgaagtacgtcatcgacaccgtcaaaaacctcaaatcacgccgggccaagctccacgagctggagcagaagcgcgataagctcgaggccgagtacgccaagctctccgaaacggagcagtatgccaagcacaccgagctcgacaccgcgcgcaagctggccgaggacgcgctgctcgacatcacaaagatcgtcggcggcttcctcgtggtcgatgatctcgatcccgtgatcgcggcctattccaaggactacggcatcgcgcgcaagatctccgcgctcgaggaaaggcggcaggcgctgcaggtcgacgtcgacgacgcgcagtacgcgaagaagaccgccgaagaggcgggcaagtccgaaaagtccggccagctcgaaaaggcacaggaaaagctcaagcagtgtgacgatcagatcgccgcgctgcggcagcagctggacgctggccgccaggagatcgaggcgctgcgccagccgtatgccagcgatcccgaattccagaagtatgaggcctaccgcgacgacggtatcgaccttgcccgactggagtacaacgagatgcgccgcctgcgcagcgatatgcagctcattttccaggatccgtattcctcgctgaacccgcgcatgagcgtcggccagatcatcagcgagggcatgcaggcgcacaacatgatcaagaaaaaggacgcccgtatgcagcagctcgtcctgaacatcatggacgaatgcggcctcgcaccgtacttcctgcaccgcttcccgcaccagttctccggcggccagcggcagcgcatcggcatcgcccgcgcgctcgccacgaacccgaagttcgtcgtctgcgacgaggctgtttccgcgctggacgtgtctattcaggcccagatcatcaacctgctgctcgacctcaaggagcaccagaacctgacctacatgttcatcacgcacgacctgtccgtcgtcaagtacatctccgaccgcgtcggcgtcatgtacctcggcaacatggtcgagctggcggaggccgacgagatcttccaccacccgatccatccgtacaccgaggccctgctcaacgccatcccgacgacggataccgtcggcgcgaaggagctctccatcctcgaaggcgatatccccagcccggtcaacccgccgaagggctgcaaattccacacgcgctgcaagtactgcacagagatctgcacgcaggtcgtcccggcgtgggaagaggtccggccgaaccatttcgtcgcctgccatcataagctcgaagtcaaggagtaa

SEQ ID NO: 20 - DNA, 1194 bp, Unknown
  Unknown gut bacteria
atggtcagtgaaaaaatggtcgcctggggcagccagggctgcgtcatccgggatctcgccgcctacggcgagcagcgcgccgccgtcgtcggcgcggaaaacgtgttcaactttaccatcggcaatccttccgtcccggcgccgtcctgcgtccggcagacgatcgagcacctgctgcagaccgtcccggccgagcagctgcacgcctatacggccgcgccgggccttgcgtccgtccgcgcgaagatggcggcgtatctcgagaagacgttcggcgtcggctaccgcgcggaggacgtgtatatgacctccggcgcatcctcggcgctggcgatgctggcctatgcgctgctctcgccgggcgacgaggtgctgacgctcagcccgtatttctcggagtacaagctctacgccgaggccgcgggcggcacgctcacggccgtgccctcgaacccggaggatttccagatcgatctggacgccttctccgctgccatcagcgagaagaccgccgtcgtcctcctgaactccccgaacaacccttccggtgtcatcctctcccgccggagcatcacaaagctggcggagctgctggagaaaaaatcagccgaatacggccaccgcatctacatcgtcgccgacgagccctaccgcgagctggcctatgacggcgaggaggtgccgttcatccccgccatctacaaggacaccatctactgctattccttcagcaagaccctctcgctgcccggtgagcgcatcggcttcctggccatccatccggagctgaccgactacgcgcgcgtccgcgcggccatctacggcgcgggccgggcgctcggctatatcaacgccagcacgatgttccagctcgtagcggcggaatgcgtcgggcagacggcggatatctccgtctacaagcagaaccgggatctgatccatacggcgcttctggatatgggctatacctgcgtgaagccttcgggcgcgttctatcttttcctcaaaacgccggagccggacgcgaccgcgttctgcaaaaaggcgatggcgctcgacctgctggtcgtgccgggcgacgaattcggctgcccgggctacgtccgcctggcctactgcgtccccaaaaccatgctcgagcgcagcctcccccgcttccgccagctcgccgaccaatacggcctcaaaaaataa

SEQ ID NO: 21 - DNA, 498 bp, Unknown
  Unknown gut bacteria
gcctatgacaaccggccgctcaccttcgacgaatttacagaccgcatccatcaggccatctacgtctccgccacgcccgcggactatgagcgcagccgcgccgggcagatcgccgagcaggtgatccggcccacgggccttctcgaccccgaggtcttcgtgcgccccattgaggggcagatcgacgatctcatcggcgagatcaacgccacgaccgacaagggcgagcgcacgctcgtcacgacgctgacgaagaagatggccgaggatctgaccaaatatctgaccgaaaacggcatccgcgtgcgctacatgcactcggacatcggcgcgatggaacgcatggagatcatccgcgatctgcgcatggcgaagttcgatgtactggtcggcatcaacctgctgcgcgaggggctcgacctgcccgaggtctcgctcatcgccattcttgacgcagacaaggaggggttcctgcgctccgagacgagcctcatccag

SEQ ID NO: 22 - DNA, 1932 bp, Unknown
  Unknown gut bacteria
gaccacggcgtcatgtacggcacgatcgacttttaccgcgcagcaaagaaggccgggatcaagcccatcgtcggctgcgaggtctatgtcgcccgccgcacgcgcttcgacaaggtccacggcgtcgacaaagaaccctaccatctcgtcctcctgtgtgaaaacgagaccggctaccgcaatctcagctatatggtctcgctcggcttcacggagggcttttataaccgcccgcgcgtggatatggagctgctgcgcgagcatcacgagggcctgatcgccctgtccgcctgtctggctgggcgcatcccgcagtcgatcatgcaggacgacctgcaggccgccgagcaggcggcgcgcgagtatgccgaagttttcgggccggaccatttttatctggagctgcaggatcacggcatcccggagcagcggaccgtcaacgcacagatccgcaagctcgccgaaaaactgtctctgccgctcgtcgtgacgaacgacgcacactatctgcgcaagtcggacgcgaaaatgcaggacgtgctgctctgcatccagaccggcaagaccgccgacgacccgaaccgcatgaaatttgagacggaggaattctatctcaagagcgaagaggagctgcgcgagctgttcccggatgtgccggaggcgtttgacaatacagtaaaaattgcggagcgctgcaatgtggagtttacgttcggcaagtatttcctgccggaattcaagctcccggagggcgtgacgagcctttcgtatcttaagcagctctgccgcgagggctttgacgagctctacgggacagagcacccggaatatatgcagcagctcgactacgagatcgacatgatcgagaagatgggctttaccgattacttcctcatcgtgtgggatttcgtgcgctttgccaaatcggccgggatcccggtcggccccgggcgcggcagcgccgcgggctcgatggtcacctactgcctgcatatcaccgagatcgaccccatgaaatacgggctttatttcgagcgtttcctcaacccggcgcgcgtgacgatgcccgatatcgatatggacttcggtgacacccggcgcgccgaggtcgtcgactacgtccggcgcaaatacggcgaggaccatgtcgcacagatcgtcaccttcggtaccatggctgcgcgcggctccatccgcgacgtcggccgcgtgatgaacttcacctacgccgagacggacgcggtggccaagctcgtgccgccgacgccgcacatgacgctggcggacgcgctgaagcagtcgccgcagctgcggcagatgtacgactctgacgaacgggtcagggaactggtcgacacggcaaaggccatcgagggcatgccgcgcaacacctcgacgcacgccgcgggcgtggtcatcaccaagctcccggtctatgactatgtgccgctggcgacgaacgacggcacgatcgttaccgaatacaccatgacgacgctggaggagctcgggctcctcaaaatggacttcctcggcctgcgcaacatcaccgtcatcgacgatgccatccgcgatatccgtaagaccgagccggacttctccatggcccgcgtcaccgacaacgaccccaaggtcatggacatgctcacgcagggccggaccgccggtgtgttccagatggaatcgaccggcatgacgggcgtgtgcatgggcctgaagccgcagtcgatcgaagatctgtccatcatcgtcgccgcctaccggccgggcccgatggaatcgatcccgcgcctgatcgcctgcaagcaggatccgtcgctcgtcaaatacaagcacccgatgctgcagcccatcctctccgtcacctacggctgcatcctctatcaggagcaggtcatcgagatcttccgcaagcttgccgggtattcgctc

SEQ ID NO: 23 - DNA, 1323 bp, Unknown
  Unknown gut bacteria
atgcaggcgcagcggatgacggagcccggcgatacggtcgtatgcgcagtgtcgggcggcgcggattctgtgagcatgctgcacgtgctgctgtcactgcaggacacgctcgacatccgggtagaagccgcgcacttcaaccatcacctgcgcggcgcggaatccgaccgcgacgaggcctttgtccggcagctgtgcgcctcgctcggcgtgccgctgcacacgggcggcggcgacgtgcaggcgcgggcggcgcagacgcatgaatctctggaagaggctgcgcgcaagctccgctacgcgttctttgacacactccccggccttgtcgccacggcgcacacgcaggacgacaatctcgagactgtgctcctgaacctcacgcgcgggaccggccttgccgggctgaccggcatcccgccgaagcgcggacggctcatccggccgatgctggtctgcacgcgggcgcagatcgaggcgtgtcttgctgagcacggattttcttatgtgaccgacagcaccaatctcctgccggacgcccggcgcaaccggctgcgccagcgcgtgatcccgcttctgcgggaggaaaaccccgccgtcgcacagaccgtcttccggacctgcgcgctgctccgtaaggatgacgcatatcttgatacgcgggcgcgcgaggcgctgcaggctgctcaattgccggacggtgtcagccgcagtgcactttccgcttggccggaggctgtgcgcacccgcgcagtccggctgctgctcgagtcgatccatgcgcccaatctgacgcagcggcatatcgatgcggtcgaccggctgctgttcgcttcgtgcccctccgcttctgtctcgctgccgggcggctttgccgcgcggctggaatatgacaggctgtacctgacggaccgctcccctgccgcttccttttcacccgtgacactttcgccgggcgagacagtgctgatcccggcgctcgggctgcgcgtcgaatgccggatcgaagaaaattttcaggaaaaagcaaaaaccctctccacttttgcagtcaaatatgataccatagagcaaactccccggatcacgatccgtccgcgtcaggcgcatgacgtcatgcgcacggcaggcggcacgaaatcgctcaaaaagctgctgatcgaccgcaaggtccccgcagcacgacgtgcgctcatgccggtggccgctgacgcatccggtgttctgggcgtttatgggatcggcgtcgatctgggccgcgccgcggctccgggcgaacgcgcggtcatcatcacaatcgaagaaacagagaaagaggattag

SEQ ID NO: 24 - DNA, 1836 bp, Unknown
  Unknown gut bacteria
gcgccggaggaccgcttcccggccgcgctggatgatgcgctcgtcagctatcagtatctgctctcgaaggggtatccggccaaccagatcctgctgtgcggcgagtctgcgggcggcggactgatctactgcctgtgcctgcggctcaagcagcggaagctgccgctgccatgcgggctgatcggcatctcgccgtggaccgatctgaccggctccggccagtcctatatcgacacccgcgacatcgacccctccatgacgccggagctgctgcagttttacgcggcgtgctataccgaccatccggaggacccgctgtgttcgccgctgttcggcgatctgacgggctttccgccgtcgctgctgttcgtgggcggggacgaggtcatgctcgacgacacgcgggtgctgcacgaaaagctgctggccgcgggctgccggagcaggctcatcgtcgcgccggagcgctggcacgcgtatgtgctgtattatctcaatgagaatatgtcggatttcgacacgatcaaccagtttatgacgcgtgtgctctccccggcccggaagctgcggtggatgcggctggacaacgccgcgaagatctaccccgcggccaagcggcgcaactggacgaactacttccgcctctccgccacgctgacagagccggtcgacgtgcaggtgctgcgcgcggcgctggacgttacggtgcggcgcttcccgtcgatcgcggtgcggctgcgccggggcgtgttctggtattatctcgaggagatcagcaaggcgcccgccatcgaggaggacaagagctacccgctcgtccacgtgccgttcgacgacgtgcgcaggtgcgcgttccgcgtgctggtgtataagaaccggctggccgtggagtttttccacgccgtgaccgacggcacgggcggcctcatcttcctcaagacgctgacggcggaatatctgagccagaaatacggcatccagatcccggcggagcgcggcgtgctcggccggctggaggatccgggtcccgaggagctggaggacagcttcctgcactatgccggtaacgtcaccgccagccgcaaggaggccaccgcctatcagctctccggcacgccggagccggacggctttctggatctcacgacgctgatgctgccggtggacgccgtaaaggccaaggcgaaagagtttggcgtcagcgtgacggagttcatcgcggccgtcatgatgaaggccatcagcgacctgcagaccgagaaggtgccgcggcggatgcgccgccggcccgtcaaggtcctgctgccggtcaacctgcgcgggctgttcccgagcaggacgcttcggaacttcgcgtcctacgtgacgccggagatcgacccgcggctgggcgactattcgctcgcggagatctgcaagatcgtgcgctaccgcatgggtctggagaacgacgcgcggatgatggccgccaagatcgccacgaacgtcgcgagcgaacgctcggccgtgctgcgggcgatgccgctgtttatcaaaaatatcgccatgaaggccgttttcgacctggtgggcgaatgcaaatcgtgcctgtgcctgtccaatctcgggctggtacagctgccggacgcgatggcgccgtatgtcgcgcggatggatttcatcatcggcgtacaggcaaaggcgccgcacaactgcggcgtcgtcagctgggacggcacgatgtatatcaacatgatccgcaacatccgcgagccggagctggaatcccatttttaccgtgtcctgcacacgctggggctgcccgtcaaggtcgagagcaaccagcgctggacgtga

SEQ ID NO: 25 - DNA, 1359 bp, Unknown
  Unknown gut bacteria
atgggaaaagggggatttgcgttgcggttgcggatgaaacggatgctgctggccgtgctggccgcggcaatgtcgctggtcctgtccggctgctttgtcaagaccgtcgacgagctgtacacgctccctaagcactctgatgaatataaccggctggaacaggccatcgatcaggtcatgtccagccagaacgcgtcctacgccgcgccggtctccggcatgaaccagcagtcggtccagctggccgatctggacggcgacgggacggaagaggcggtcgctttcctgaaaacgacgggcgacaagccgctcaaggcctgcatcttttcccgcgtcgatgaggattatcagctcatggacgtgatcgagggcgacggtaccagctttgcgagcgtggaatacgtgccgctgaccggcggccccggtgttgagctggtcatcgggcggcagctttccacggacgtgctgcagtcgctgtgcgcgtattcgtacaccggcgggcacgtggtcgagctgctgagcacgaattactcggaataccgctgcgtcgatctcgacgaagacgggcggacggatctgttcgtcctccgctttgacgcggagcagccgcagggcgtggccgagctctaccgctggcagggcgaccagatggagcgcgagccggaggcgtatctgacggccggcgcgtcgccggtcaagcgcattgtgtccggtgatctgatggaagatgtcccggctgtctttgtggcgagcgcctatgaagagaacgggcttgcgaccgacgtgtttgccttccgggacggcgtgttccgcaacattaccgctgccgacccgggcagcgcgctttccaccgtgcgcagctattacgtctacgccaccgatgtggacagcgacggactcatcgagctgccgcagatccttccgctgccgtcggctgcgggctcggaggagaactacagcgtcatcagatggtataatttagacctgcagggccgcagcacaccgaagatgacgacctatcacagcttttccggcggctggttcttatccctgccggaccggtggcagaaccggctctgcatcacccgcagcgaagaggtcggcggtgtccgcggctacgtcttctccgagtggaaggatgagacgcacacggagctgatcttcaccatctatgccttctccggcgacgaccgggcgcagctcgcttcgtctgacggccggttcctccttgccgagaagggcgatatcacatacgcagcgcagcttgcagcagggaagtgggcaggcgagctttccgagcagacgctcagaggcatgttccactttattcatattgactggaattcgggagagacgtga

SEQ ID NO: 26 - DNA, 924 bp, Unknown
  Unknown gut bacteria
atgagtatgttgaaagaggcttttgcagccggtaaatttggcgtcaccgccgaaatggcgcccccgaagggttatgatttttctgagcagctcgaagctgccaagctcctgaacggcaaggttcacggcgtcaacgtgaccgatatgcagtccgccagcctcaaggcctccagccttggcctgtgcgtcgcgctcaagaacgcaggcgtcgagcccattttgcagatgaccggccgtgaccgcaaccgtatggcgatcatgggcgatatcctctccgccgccgccttcggcatctacacgatgctcgcgcccacgggcgaccatcccgtcgtcggcgactgcccggaatccaagccggtctacgacctcgattccgtcggcattctgaagatgctcacgaagatggagcagaccaactgcgactgcggcggcaacgagatcgccggcggcgcgccgaagttctacaagggcgcttccgtcaccccggtctacgaccccatcgagctgcagatcaacaagctgcgccagaaggtcgaaaacggcgcggagtacatccagacccaaggcatctttgatcttgagaccttcaagcgcttcctcgacaaggtcgacgcggcgggcatcaagacccacatcatggccggcatcatcccgctgaaggccgccggcatggccagatacatgaacgagaatgtccccggcatcgccgtgccgcaggatatgatcgaccgtctggccgcagccgccgccgagggcaaggaaaagggcgtcaagggcctgcccatgcagctcggcatcgagatggccgcagagatgatcgccaggatcaaggatgagcacctgtgcgacggcgtgcacatcatggccatcggcgcggaaaagaacgtcccgaccatcctcgaaaaggccggcgtgacgatctga

SEQ ID NO: 27 - DNA, 876 bp, Unknown
  Unknown gut bacteria
ctcggcatcgacgaggatacgcccatcgacgccaagatcctctccggcgcgatcgaaaacgcacagaaatccgtcgagagccgcaactatcagtccagaaagagcgtcctggaatacgacgacgtcatgaacgtgcagcgcaagatcatctacgagcagcgccggcaggtgctcgacggcgaggatctgcagaagaacatccggtccatgatgaagttctatgtggacacctatgtcgccagcgccttcggcgagcagccgaagctggccgacaagcagcatttcttcgaaatgatgacgcatttcgagcccatcttcttccccaccggcacctggctcatctcggacgcggagctgcagacgctcacgcgtgaggccgcggaggagaagatcctctcgctcatgcagcgcgcgtacgcgaagaaggaggagcagttcacctcccccgtcatgcgcgaggtcgagcgggtcgtgacgctgcgggtggtcgacgagttctggatggaccacatcgacgccatggacgatctgcggcagggcatccgcctgcgcgcctacgcgcagaccgaccccgtcatcgaatacaagcgcgagggctttgacatgttcgaggccatgaacgacgcgatcaaggaggagatcgtccgccgcgtcttcctcgtccggctcaagacgaacgaggagatcaagcgccagcgcgtggccaaggtcaccggcgagggcgcgggcggcgacaagacggtcagacgccagcccgtcgtcaagaagatcaaggtcagcccgaacgatccctgcccctgcggcagcggaaagaagtacaagaaatgctgccgcgataaggatctggctgccgagcgcggccagcagacgaactga

SEQ ID NO: 28 - DNA, 720 bp, Unknown
  Unknown gut bacteria
gtgtcccgcatcccgtcgctcgtcagcaagctcgtctcctcgctggcctccggcgcgatcaagtggtacaccgcgatcctgctcgtcatcggcatgctgctgatcgttgtgttcatcgtgttcatcacgaactccgagcgccgcgtccccgtccagtacgccaagcgtgtggtcggccgcaagatgtacggtggtcagagcacgttcctgccgatcaaggtcaacatgtccggcgttctgccgatcatcttcgcgcagtccattgcgacgctccccgcgacgatcgttgccttcaccggcaccggcagcagctccttctggacctggatgaacacctatatcttcgacacgaagagcgcgttctacatcgtctgctacttcctgctgatcattgcgttcagctacttctatgcgacgatccagttcaaccccatcgaaatcgccaataacctcaagaagaacggcggcttcatccccggcttccgcccgggcaagccgacttccgacttcatcctgaaggttatcaacaaaatcacgctcttcggcgctctgtatctggcgatcgttgcgatcctgccgatcatcgtcggtatcgtgatcaagaacggcagcctcgcgatcggcggcacgtccgtcatcatcgtggtcggcgttgcgcttgagacggtcaagagcctcgaggcccagatgctcatgcgtcactacaaaggcttcctggag

SEQ ID NO: 29 - DNA, 1416 bp, Unknown
  Unknown gut bacteria
atgagaaaaacgaagatcgtctgtaccgtcggcccggccagcagctcggaggaagtctttgcagagatgtgcaaggcaggactcaacgtcgcgcggctcaatttttcgcacggcacacacgaggagcatcagcagaaatttgacatgatccataaggtccgcaaggcgctcggcctgcccatcgccatcatgctcgacaccaaggggccggaataccgcatctgtaccttcaaaaacaaaaagatcctgctccaggacggcgacgcctttaccttcacgacccggcaggtcgagggcgacgggacaattgtcggcgtcagctatgcggggctggcgaacgatctttcggtcggcgatacggtattggtcaacaacggactcgtgatcttcacggtcgagcgcattgagggcacggagatccactgtcgtgtcgtagtcggcggcgagctgtctgaccgcaagagcatgtccttcccgcacaaggtgctcgagcaggtctatctcagcgaacaggacaaggacgatctgctgttcggcatccggaacgggatcgatttcgtcgcagcgtcgttcgtctcgcggcggcaggatgtgctggatgtgcggaacttcctcgacgcgaacggcgggcaggacatcgagatcattgccaagatcgagaaccagacgggcatcgacaatgtggaggagatttgcgaggtctgttccggcatcatgatcggccgcggagacttgggcgtggaggtgccgtttgcggagcttccggccatccagaaatacctcatcaccaagtgccgcctgctcggcaagcgggtcatcacggccacggaaatgctcgaatccatgatccacaacccgcgcccgacccgtgcggagatctccgacgtggccaacgccgtctatgacggcacgagcgcggtcatgctctccggcgagtccgccgcgggcaagtacccggtcaagaccgtgcagaccatggccgagatcgtggaggagacggaaaagcacatcgactacgagacgctgttccgcaaggaggagttccagatcaagaacatggtcgacgccatctcgcacgcgacgtgctgcatggcctgcgacattggcgcaaagacgatcgtggtcagctcgctctccggcgcgacggtccggatggtctcgcgcttccgcgtgccggtcgacatcgtcggcatggcgacgaacgagcgcgtgtggtaccggctcgcgctctcctggggcgtccagccgatcttgtgcgaggagacgtttacctcgaccgacgtgctgttctacaacgccctgcacgcggccaagaaggccatgcacctgcacaagggcgacaacatcgtcatgactgccggcaacaccaacggtgcttccggcaacacgaacctcatcaaggtcgaaacgatctga

SEQ ID NO: 30 - DNA, 1461 bp, Unknown
  Unknown gut bacteria
atgtcgtttgcctcgctccccttcgtcgggctcgtggcagcgggcgtgatcctctattatctggtgccgaagaagctccagtgggtcgtgctgctgctggcgagcatggtgttctacctcgcaggtggggtcaaaagcgccgcgtggctcgtgctcgtcgccgccgtcacctggctgaccggactgctgcttgcccggcagaacgcccgccccgcgcccgacaagcagacgaaggccgccgtgcggcacgtcaaaaagtgcatctgcgccgtgtgcgccgttttgtgcttcgggcttttgtatctgatgaaatactggaacttcacggcctccgccctgccgtccgccctcggggacaagctgccccggtgggattttgtcgtgcccatgggcctgtcctatttcatctttcaggccgtcggctacgtgatcgacgtgtaccgcggaaagacggacgcgcagaaaaatccccttcgctacggcctgttcgtctccttcttcccgcagatggtacaggggcccatcagccgctatgaccagctcgcgccgcagctgacggccgagcggcgtcttgactggcgggatctcaaattcggcatccagctgtgcctctggggctacttcaaaaagctcgtcatcgccgaccgggccgccgtgctggtcaacgccgtcatcaaggacaactgcccctacggcggcgcagtcatcgcgagcggcattctgttctactgcattcagctctactgcgatttttccggcggcatcgacattacccgcggcgtcgcgcgcctgttcggcatcgatatggcggagaacttccgccgcccgatctttgccacgtcgctcaccgactactggcggcgctggcacattaccctcggcgcgtggatgcgcgactatgtgttctaccccatctcgctctccaggggcttcggcaaactctcccgctgggccagaacgcacatcggcggcacggcgggcaagatcttcgccacgtcgctggcgacgttcatcgtctacttcatcatcggcatctggcacggagcgaatttccgctacatcgccttcggcctgtggaacggcgtgctcatcacggcgtctttgctgctggaaaagacgttcctgcgctggaaggctgcgctgcatgtgaacgacaagagtgccggctggcgcgtgttcatgacgctgcggacggcactgctggtgttcatcgggcggtattttacccgcgcgccgcggctgcggagcgtatttaccctgctgaagaccaccgttctgcacccgcagccggggcagctgttcgacgggacgctcttgtcgctgggacttgcgaagacggattttctcgtcatcgcgctgggcctcatcgtcctgctggtgctcgagagtctgcaggagcgcggcgtgcagatccgcgcggggcttgaaaagaagtccggctttgtgcagtgggccgccatg

SEQ ID NO: 31 - DNA, 507 bp, Unknown
  Unknown gut bacteria
atggcacagtatgcgctggtcaaatgcaatatcaacggcaaggacgtggaaaagatcgttgacgtccgcgcaagtctgacggacatgctccgcaatgacttccggctcacgtccgtcaaaaagggctgcgaggtcggcgagtgcggcgcatgcaccgcgctcatcgacggcgaagccatcaacacctgcctgtacctcgccgtctgggccgagggcaagcacatcatcacgctcgagggtctcatgaaccccgacggcacgatctccgatgtccagcaggcgttcatggacgaaactgccatccagtgcggcttctgcacgcccggcttcatcctgaccgccaccgagatcgtgaattccggcaaggaatacaccgacgacgagctccggaagctcctctccggccacctgtgccgctgcacgggctaccagaacatcttccgcgccgtcaaaaaaaccatgctccgccgcctcggcaaaaccgaagaagcagagaacgtccgctga

SEQ ID NO: 32 - DNA, 924 bp, Unknown
  Unknown gut bacteria
atgcctattatgatcccgaacggcctgccggccgccgcgacgctggcagaagagaatatcttcgtcatgaacgagacccgggccgtcacgcaggacatccgcccgctgcagatcctcgtgctgaatctgatgcccacgaagatcgccacggagacgcagctgtcgcgcctgctcggcaatacgccgctgcaggtcgagctggagctcatccatacggacagccacgaatccaaaaacacctcgcgcgagcatctgctcaagttctaccagacgtttgaggacgtgaaggaccgctggttcgacggtctgatcatcacgggcgcgccggtggagcagatgccgtttgagcaggtcgaatactggccggagctctgccggatcatggagtggagccgcacgcatgtccacagcacgttccacatctgctggggcgcgcaggcggcgctgtattaccactacggcatcaacaaaaccgatctgcccgaaaagctcttcggtgtctacccgcaccgggtcgagcggcgctcgtcgatgctcatgcggggctttgacgatgtgttcatggtgccgcattcgcggcatacgaccgtccggcgcgaggatatcgagcgctgcagcaagctgaagatcctcgcctcgagcgagcaggcgggcgtctacgccatggcgaccgagggcggccggcagatcttcatcaccggccactccgaatatgacgcgaggacgctggaggcggaatatctgcgcgacaaaaatgcggggctgcccatccacgtgccggaaaactattacccggacaatgacgacacgaagccgcccgtggtctcgtggcgcagccacgcgaatcttctttaccagaactggctcaactacttcgtctaccagaccacgccctatgacctgtcggccatccggcccgtttaa

SEQ ID NO: 33 - DNA, 867 bp, Unknown
  Unknown gut bacteria
atgaacaacaaggtgcgcgattttctcgcctccatgtgcttctccggcccgagctttctcgggatgctggcgttttatatcatcccgttcctgatcgtcatctattattccttcaccgtgggcctgaccgaccacagcttcgccgggctcaagaactacatcaacgtctggcagaacggcgcgttcaagatcgcggtcaaaaacacgttcacgttcacgggcctgtccgtgccgttggcggtggtgctgtcgcttggcctcgcgctgctgctcgaggcgcggatccccctcaaaagcgagttccgcaccttctttttaagccccatgatggtccccattgcgtccatcatcctcatctggcaggtgctgttccactataacggcgtcatcaacgaattcctgcaggtcttcggcgcggataagatcgactggctgaaatccgactattgcatggtcgtcatcgttgtgctgtttttgtggaagaacctcggctacaacatgattttgttcatggccgcactcagcaatatcccgcgcgagctgctcgaggtcgcggaggtcgagggcgcgtcggcggcctatcagttcttccacatcaagctccgctatctctcgccgacggttttgttcgtgacgatcctgtccatcatcaactcgttcaaggtcttccgcgagatctatcttctcaccggcaattacccctacgacgggctttacatgatgcagcatttcatgaacaacatgttcaactccgccgactaccagcgcctgtccgccgcggcggtgctgctggcgatcgtcatcgtcatcctcatcgcccttttgttcttcgtggagaacatcttcggaaaggacgtggaaggatga

SEQ ID NO: 34 - DNA, 954 bp, Unknown
  Unknown gut bacteria
atcgtcaacgaatacggcaaatttgccctgcatctcatcccctccggcatctgcctgccgggcgtcgtgaacgtcctcggcaacggcgtcgtcatcgacctcgagagtctgtgcggcgagatcgagaccctgcagaaggccggcgtcagcgtcacgccggaaaacttcaagatctccgaacgcgcgaccatcgtcttcccgtaccaccgcgcgctcgacgggctggaggaagcgcgtctgaaggacaagaaatacggctccaccctgcgcggcatcgcgccggtctattccgacaagtatcagaagaagaccatcatgatgggtgagctcctgtacccgaagtacctcgaaaagcggctggccagcatcctcgagtggaagaacctgaccatccagaacgtctacggcgcggaagcctacaagcttgaggacatgctcgcctggtgccaggagttcggctcgaagctcgcgccctatatctgcgacaccagcaagtacctctatgaggcggaaaaggccggcaagaacatcatgtttgaggcccagctgggcgcgctgcgcgatatcgacttcggcatcttcccctatacctcctcctcttcctccaacgcgggctacgcctgcgtcggcgcgggcatcccgggcagtcatgtcgaccggaccgtcggcatcgtcaaggcctactccacctgcgtgggcgagggcccgttcaccgcggaatggttcggcgaagaggccgagcagctgcgcgtggcaggcgcggaatacggcgcggccaccggccgtccgcgccgtgtcggcccgatcgacctggtcgccacccgctacggctgccgcatccagggcgcgaccgaggtcgcgctcacgaagctcgacgtgctgtcctacatgaaggagatccccgtctgcacgcagtacgaagtaaacggcgagaagaccgatgatttccccttc

SEQ ID NO: 35 - DNA, 1383 bp, Unknown
  Unknown gut bacteria
atgactggcattggattgatcattgtcttcattcttgccatcgcactgatgatcttctgcatcagcaagctgaagatccatccgttcctcgcgatcatggccatttctctggtattcggcctgatcgccggtattccgctggtcaaccccacggacgccgacggcaccaccgtcagcggcattgccaacgtcatcggcgccggcttctcgggcacgttctcgagcatcggcatcgtgatcatcttcggcgctctggtcggtacgctgcttgagagcaccggcgcggcgctcaaaatggccgactgcgtggtcaagctcgtcggcaaaaagcatccggagcttgccatcgagctcatgggctggatcgtctccatccccgtgttctgtgacagcggcttcgtcgttctgaaccccatccgcaaggctatggcccgccggaccggcgcgtcgagcgtcgcgatgtccgtcgcactgtccatgggcctgtacatcagccactgcttcattccccccacgcccggccccatcgcggctgccggtacgctgggctgcggcgataatctgctgctggtcatgggcctcggcgctctgtgctccatcccgccgctggtcgcgggctacttcttcgcaaagtacatcggtaagaaggtcaaggctgccgacgacatcgtcgcggacggcgacgtcaagacctatgagcagctcgtggccgagttcggcaagctgccgagcggctggctcgcatttgcgccgatcgtcctccccatcatcctgatgggcctggcctccgcgttctccatggcgggcgtcaaggcggatttcatcagcttcctcggcacgccgatcatcgccctggctgtcggctgcatcattgccatcatcagcctctttgccgccaataagggcaaggacttctacaagctcaccgacgacacgctgaagaccgtcggccccatcctgttcgtcaccgctgccggcggcgtgctgggcaaggtcctcgcgtcctccgacatggtcaacttcatcaaggacaacgcggagatcttcgagagcatcggcatcttcttcccgttcctgctggccgccatcctcaaatccgcgcagggctcctctaccgtcgccatcaccaccacggccggtatcgtcgcgccgctgctgccggtcctggggctggattccccggcgctgtcctgcctgacggtcatcgccatcggcgcaggtgccatgacggtgtcgcacgcgaacgactcctacttctgggtcgtcaccaacttcggcgagatgaccccgcaggacggctacaagacgcagacgctcggcacgctcgtcatcggcgtcgtgtccatcatcggcgtgtttatcgtgtccctgttcctgcactga

SEQ ID NO: 36 - DNA, 519 bp, Unknown
  Unknown gut bacteria
atgaacagaaagtatcgcaagactgttatcgcgggcaactggaagatgaacaagacgccgacggagaccaaggcgtttatgaccgagttcaaggccatcatgcccaagggccgctggtgtgacgtggcgctgtgcgtgccggccgtctgcatcccggctgctgtccgcgccatgcgcgagacccgcgtcggcatcggcgctgaaaactgcaacgccaacgcctccggcgcctacaccggtgagatcgcggccaacatgctgctcgacgccggctgcaagtacgtcatcctcggccactctgagcgccgcgccatgggcgagacgaacgcggacgtgaacgccaaggtcctcgccgctctggacaacggcctgatccccattatgtgcgtcggcgagagcctcgagcagcgcgaagccggcatcaccgaggaatggatcaccatgcagatcaagaccggccttgcctccatcggcgaggacaagatccgcaagatgatcatcgcctacgagcccatctgg

SEQ ID NO: 37 - DNA, 456 bp, Unknown
  Unknown gut bacteria
atggcggagggcgtgaagatcgccgcaagaaatcagaaggcctttcatgaatatttcatcgacgaaaaattcgaagccggcatcgagctcaccggcactgaggtcaagtccatccgtctcggcacgctgagcctcaaggaggcctggtgccagatcaaggacgggcagctctatatccggcagatgcatatcgcgccctatgagcagggcaacatcttcaacaaggatccgctccgtccccgccggctcctcatgcacaagcgcgagatcatgcgcctgttcggccgggtcaagcaggacgggtatgcgctcattccgctctcggtgtacttccgcggcagtctcgtcaaggtcgaggtcgcgctggcccggggcaaaaaactctacgacaagcgggaggacgccgcgaaaaaagacgccaagcgtcagatcgaccgcgcaatgaaaggacggtaa

SEQ ID NO: 38 - DNA, 930 bp, Unknown
  Unknown gut bacteria
gccgagatcggcctggccggcatgcagttccatgacgacgacgcagttcccgacatgaacaacatgaccgagaagcagatcatcgactacgccaaggacgtcaaggcgatgctcgacaagtacggtctgttcgcagagttcgtcgctccgcgtctgtggttcgacaagcgcacgaatgacggcggcttcaccgcttcccgcaaggaagaccgcgaattcgcccagtggcgtgcccgccgctcctgcgatatcgccaaggcactcggcaccaacaagatccagctgtggctggcccgtgaaggcaccctgtgtgctgaaggcaagaaccccgtcgagatgaccctccagctgcgcgacgcgttcaacgacatcctgacctatcgtgacgatgcgctgatcctcgttgagccgaagcccaatgagcccatcgaccgctccatctgcggcactgccggccacgctctggctgtcggcgcttacaccgtcgatccgaaccgtgtcggcctgtgcatcgaatccgcgcactccatcctcgccggcctcgatcccgccaacgacatgggcttcgcgctggctctcaacaagctgtggggcgtccatctgaacgaccagaacggctgccgttacgaccaggacaagtccttcggcgtcgacaacctgcgcaacgccttcaaccaggtcaaggtcctgtacgaaaacaactacggcgaccgcggcaacttcgaatgcgtcggtcttgacgtcaaggccatgcgtacccagcccgatgaggactgctatcgtcacctcatcaactccaagcgcatctttgagctgctgctggacaaggtcaagcactttgactatgagttccaggctgcctgcgtcaaggagcagaacttcgagaagctcgaaatgtacgtcatggagctcctcatgggcatcaagtaa

SEQ ID NO: 39 - DNA, 1017 bp, Unknown
  Unknown gut bacteria
atgaaaaagaatcagatccttgccctgctgctggcggccgtgatgctgctggcagtcctgaccggctgcgccgcaaagaccgagcccgcgcagaccgaacccgcgcagaccgagaccgctccggccgaagaacctgcgcccgccgaagaagcggaacccgccgaagaaccggctgaagaacccgcggaggagtccgccgccgtgaccctgaccgacatgaccggccgggagatcaccctggacgagcccgcgacccgtatcgtcgccctgaccccgtcagactgcgagatcctctacgccatcggcgcgggcgatctgctggtcggccgcggcaaatactgcgactatccggcggaagtgaccgagatcccggctgtcgagtccggcagcgacaccaacatcgagcagatcgtcgagctgcagccgcaggtcctgctcatgagcaccatgtcccagaccgacgagcaggtccagcagctggaggctgcgggcgtgcatgtcgtcgtgagcgacgcgcaggatattgaaggcgtctacaccgccatccacatgatcggcgagctcgtcggcaagcaggatgaggcggcttccgtcgtcgagtccatgcagaagaccttcgacgagatcaaggccaacgccggcgacggcagcaagaccgtgtactttgaggtctccccgctgcagtacggtctctggacggccggcaccggcaccttcatggacgagatcgccaacatgatgggcctcaagaactgcttcgcggacgtgaccggctggagcgagatctccgaagagcaggtgctcgagcgcaacccggattacatcgtgaccatctccatgtactacggcgaaggccccaccccggaagaggaaatcctggcccgtccgggttgggagaatgtcaccgccgtcaagaacggcaagatcctcaacctgcagaacaatgagctctcccgtccggctccgcggctggccgagggcgcgcaggcgctgtatgacttcgtctacggcgagtaa

SEQ ID NO: 40 - DNA, 762 bp, Unknown
  Unknown gut bacteria
atgatcccacatctgcatccgcacgcgggcgactgcgaacacgcctgctgtttgaagatcgagcatctgtccgtccgcatcggcggagaggcgatcctcgacgatatcaacctgcacatgcactgcggccagatggtcgcgctgatcgggccgaacggcgcgggcaaatccacgctcatccgcgccattctcggccagcgcgactacgaggggaagatcaccttccatgaggcctccggcaagcagacgaagctgcgcatcggctacgtgccgcagagcccggcctttgaccgcggcgacccggtgagcgtgatggatctgttcacctgctgcattttccgccgtcccgccttcctgcggccgacgaaggccatgcgggaaaaggtcctcgcgtgtctggagaatgtccacggcgatgcgctcatcgacaagcgcatcggcgcgctgtcgggcggcgagctgcagcgggtcctgctcgcgctggcgctcgagccgatgccgaacatcctgatcctcgacgaaccgctctcgggcgtggacgtggagggcatgagcctgctcatggacatgctcgatgagatccggaaaaaatttgacctttcgatcctcatgacgacgcacgatttttccatgctcgagcggtactgcgaccaggtcgtgctgctgcaggggaagatcctccggcgcgggacaccgctggacgtgctctcgtccgacgaattcgcaaaggcattccacatgggaggaggcgcacaggcatga

SEQ ID NO: 41 - DNA, 678 bp, Unknown
  Unknown gut bacteria
atgatttatttactggaagacgacgactccatccgcaagctcgtcctctacgggctggacagccagggctttcaggccaagggcttcgcgctgccgtcggaattctggcgggcgatggacgccgagatgccggagctcgttctgctcgatatcatgctgccggaggaggatggcctgtccatcctgcgcaagctccgcgcccggcctgcgaccaagcggctgcccatcatcatgctgaccgcgaaaaattcggagtatgaccgcgtcatcggtctcgaccacggggcggacgattttgtttccaagcccttctccatgctcgagctcatcgcgcgcatccgcgcggtcctgcgccgggcagagcccgcacaggcgagcggcgatttttcgctcggcctgctcttcgtctccccggaccgccacgaggtcaaggtcggcggcaaggatgtgacgctgacgaacaaggaattcgaacttctgtgcctgctgctgcggaacaagggcatcgtcctcacccgcgcaacgctgatggaccgggtctggggctttgaatccgaacgcgagaaccgcacgctcgacgtacacatccgcacgctgcgcgtcaagctcggcgaggccggcagctatatcgagaccgtgcgcggcatcggctataagatcggaggcgaaaacgcatga

SEQ ID NO: 42 - DNA, 807 bp, Unknown
  Unknown gut bacteria
agcctcggcaacggcgtcgatcccgccgacgtattcaagaagtacggcgcggatatctgccgtctgtgggcaggctcggccgactatcatgtcgacgtgcgctgctccgacgcgatcttcaagcagctgagccagaactatctgaagttccgcaacaccgccaagtactgcctcgacaacctcaccgactttgaccccaaccacctgaccgcgcccgccgacatggaagcgctcgaccgctgggccatcacgaagctcaacgagctgctcgtccgctgcgaggccgcgtataaggattacgagttcctgaccgtctcccacgccgtcaatgatttctgcgtcgtgacgctctcgagcctgtatctggacatcatcaaggaccgtctgtactgcgacggcaaggattccgcctcccgccgctcggcgcagagcgctctgtggatgatcctcgacgccatgaccaaggtcttcgcgccgatcctcgccttcacctgcgacgagatctggctgcagatgccgcaccgcacggaggatgaccccagaaacgtcgttctgaaccagatgacgaagccctacgccgattacgccctgtccgaggccgagatgaccgcctgggagaccgcgttccgcctccgctccgacgtcaacggcgttctggagaccgcccgcgccgacaagcgcatcggcaagagcctcgaggcgcacgtcgccctgtttgcaaaggacgaggacaccaaggcagcgctggaggccgtcaaggccatcgacctgccggagatcttcatcgtctccaacgtcagcactaac

SEQ ID NO: 43 - DNA, 1698 bp, Unknown
  Unknown gut bacteria
atgaagaaacaaagatggctcagcctggtgctgatcctggcgctcgtcgtggggctgtgcagcgtgtgcgcggccgcggcggacgatcagaccgcagagcagcccgcgcaggaggcggcagacacggtcgcagaagcggaagctgcgcccgccgacgggacacagcccgatgcggctgcggcagaagcaaacacggaaactgccgaacagccggagcaggatgcggcggcagaaacggatgcggccgcagaggaagcgccggcggacggcacgcacatccacgcagtcaaccgcgaggacgcctgtgaggaaccggctttcgagccgctgacggtgcgcggcgggcagctggaaagcggctgctactctctgacggaggactggacgctggacgagccgctgtgtgtggcgaaaaacggcgtgcaggtgacgctctgcctgaacggctattccctctccctcgcagacggcgcggagggctgcatcatttaccttgccgtcagcgacgaaggggcggagccctcggtgctgaccatcacggactgcaacggggccgggacctcgagcaactactatgtcggcgaggccggtgagctgatctttgacgacgggagctttgcctggcaggaggcctatatcgcggcgaacgagaaaaacgcgctcgcgggcggccgcatcaccggcgcgacggccggagccatcagcgtgggcgactataaccagctgtatctgtccggcgtcaatatcatcgacaacgagggccggtacggcgcgggcgttgtcatcgcagcgcacgcgaaggccgtgatcgacagctgcgtcatcgcgggcaaccggctgacgggcgaaatgaaggcttcggagcggcagatcctgggcggcggcgtgtactgcgcgggcgaactggagctctgcggcacgacgaacctcaccggcaaccgcgcgcaggacgcgcagaacaacctttggctggatgagaccggcacggtaacgatcggcgcgctgggtcttgacaagcaggcacgcgtcggcgtcagcggccaggcggagcaggccgttttgaccggctacgcggatgatttctcggagaactttacgagcgacgatccgacgctctgcatcagcgccgtgcatgaaaacggctttacggacctgcagctgcaggaggccgtctataccctcacgctcgtgacggacgagaatgacgagcccgtcacactggaagcggaacagggcaagagccttgcggatctgtatgtcaacgaccccgaacgggaggacgccgcctttgacggctggtacacggaagacgaggaacccgtcgacacgcagcagccgctgcatctgacggcggatacgacgatctacgcgcactggacgcaggcttcggacgaagaagccgctcccctgcccgattacgatcctgacacgccgctgacgcggcaggaggcagcaaagacgctctatcagatggcaaagcagctggggctggacacagaggcaggcgcggacgttgatctgacgcagttcacggacgcggacgagatcgacgccgacgcggaggatgcggtccgctgggcctatgcctctgacctgctgacggaaaaggacgggaagttgcgcgtgcaggaggagctgagcagaaaagagctctcgcggatgctggaggatcttctggcgctgagcagcgcggattga

SEQ ID NO: 44 - DNA, 1485 bp, Unknown
  Unknown gut bacteria
atgcttgattcttatatttccgccctctgccgctatgccgagcgcacggggctcctccagccggaggatctggtctttgcgcgcaacgcgctgctcgaggcgctgcagctcgattccttcgacgaagccgccgccccggcagaggcctcgctggccgatattttgcaggtgctgaccggcgatgccgtcgcccgcggcgtctgcccggacaaccaggtcgcccgcgacctgttcgacacgaagctcatgggggtgctgacgccccggccgcacgaggtccgcacctgcttccatacgctctaccagatctccccgcagaaggcgaccgactggttctaccgcttcagccaggacaccaactacatccgccgcgaccgcatcgcgaaggacaaaaagtggacctacgcctgcgaatacggcgagctggacatcaccatcaacctctccaagcccgagaaggacccgcgcgccatcgccgcggccaagctcgcgccgcagtccggctaccccaagtgcgccctgtgcgcggagaacgagggctacgcgggccgcatgaaccatcccgcccggcagaaccaccgcatcatcccccttgagctggacagcggcagctggtatctgcagtattccccgtacgtctattacaacgagcactgcatcgtcctcaacgccgagcatacgcccatgcgcatcagcgcggcgacgttccgccggctgctggactttacgaagctgttcccgcattatttcctcggctcgaacgcggatctgcccatcgtcggcggctcgattttgagccacgaccatttccagggcggccactataccttcgccatggaaaaggccccggtcgagacgccggtctcgtttgccggattcccggacattgcagccgggatcgtcaaatggccgatgtccgtcctgcgcctgaccggcagcgatccggaccggctgtgcctgctggcggagaagatcctgactgcctggcgcggctacaccgatgaagccgccatggtcttcgccgagactgacggcacgccgcacaacaccatcacgcccatcgcccgccgccgcggggaagattttgagctggatcttgtcctgcgcaacaatctcacgacgccggagcatccgctcggcctctatcacccgcacgagcagctgcaccacatcaaaaaagaaaacatcggcctcatcgaggtcatgggtctggctgtcctgcccgcgcggctggacaaggagctggcgcttctgaaggacgcgatcctctctggccgcgacctgcgcgcggacgagacgctgcagaagcacgccgactgggctgaggcgctgcagggccgctatacctttacgccggagaataccgagcagatcctgcagcaggaggtcggcgctgtcttcatgcaggtcctcgaagacgccggcgtctacaaacgcacccccgaaggccaatccgccttcctccgcttcaccgccagcgtgtaa

SEQ ID NO: 45 - DNA, 1089 bp, Unknown
  Unknown gut bacteria
atggaaaaattcagagtcggtgtcatcggcgctgcgggtatggtcggccagcggttcgtcctgctgacggcgaatcacccctggttcacgcccgtcgttcttgcagccagcgcacacagcgcaggcaagccctacgccgaagcgatcggcgaaaaatggcacatggcggatccgattccggagagcgtccgctccatggtcgtgatggatgcagaggccgacgcagaggagatcgcaaagcaggtcgacttcgtgttctgcgccgtcaatatgaaaaaagacgagatcaaggcgctcgaggagcgatatgccaagctcgaatgcccggtcgtctccaataattcggctcaccgccacaccccggacgtcccgatggtcgtgcccgagatcaatgcggaccacatccgcatcatcgacgcccagcgcaagcgcctcggcaccaagcgcggcttcatcgccgtcaagtccaactgctcgctgcagagctacgtgcccgcgctgcatccgctcatgaagtacggcatcgaaaaggcgctggtctgcacgtatcaggccatttccggcgctggcaagacgttcgatacgtggcctgaaatgctcgacaacgtcatcccctatatcggcggcgaggaagaaaagtccgagcaggagccgatgaagctctggggccatatcgagggcgatcagatcgtcaacgcagcggggccgaacatcaccgcgcagtgcctgcgcgtgccggtctccgacggacatatggctgcctgctttgtctcgttcaagggtgagaagccgtccgtcgaacagatcaaggctgactgggccgcgttctccggccgcgcgcaggaattggagctgccgtcggcacccaagcagttcctgcactactttgaagagccggaccgcccgcagacgaagcttgaccggatgatcgaaggcggcatggcggtctccatcggccgtctgcggccggatacgcagtacgactacaagttcgtctgcctgtctcataataccctgcgcggtgcagccggcggcgcggttttgctggcggagctgctctgcgcggaaggatatatcacaaagaaataa

SEQ ID NO: 46 - DNA, 609 bp, Unknown
  Unknown gut bacteria
atgacaaacaaggtcatcaccatcagccgccagtttggcagcggcggaagaagcatcggcaaggcggtggccgagaaactcggcatcccctattacgataaggagctggtcgacaaggtcgcaaaggagagcggcttctcgcacgagttcatcgaggagatcggcgaatacgcctccgtcaccagcagcttcctgttcaacatcgccgtgtcgtcccacccgatggggctgatcgacaccatgtccgtgtcggataagctctacgtctgccagacaaacgtcatccgcgatctggccagcaagggcccgtgcgtcatcgtcggccgctgcgcggatttcaccctgaaggaccagccggactgcctgcacatcttcgtccattccgacatgcagcaccgcgccgcccgcgtgcgcgagcgctacggcgagaccagcaagcccatggaaaagcgcctgcaggagaaggacagcaagcggaaggtctactacaagcactacaccaaccgcaactggggcgaggccgagaactacgacatctgcctcgacagcggcaagctcggcgtcgacaagtgcgtcgagatcatctgcgacatcgcgcagatgaaataa

SEQ ID NO: 47 - DNA, 915 bp, Unknown
  Unknown gut bacteria
accgctgctgagactcccgccgcttccgacggcgcgctcatcaaggtcggcatcatcaacaacgaccccaacgagtccggctaccgcaccgccaacgacaaggacctgaaggccatgttcaccgaggaaaacggctatgacgcttccttcgcctacagcctgaagaacgacgagcagatcgctgccgcccagaagttcatccaggacgaggtcgactacctgctcatctccgctgccggtacctccggctgggattccgtcctgcaggacgcgcaggccgccggcatccaggtcatcctctttgaccgcaccatcgacgctgacgagagcctctacgttgcttccatcgtctccgacatggccaaggaaggccagaccgctgttgactggctcgcttcccagaacctcgagacctacaacatcatccacatccagggcgtcatgggctccgctgcccagatcggccgcaccggcgcgctcgacgagcaggtcgctgccaacgacaactggaacatggtgacccagcagacagccgagtggaacgccgagactgcccagcagatcgtccagtccgtcatcgactccggcaaggaattcaacgtcatctacgccgagaacgacgacatggccaagggtgctgtcgcggcgctcgacaaggcgaacatctcccacggcgtgggcaaggacgtcatcgtcatgggcttcgactgcaacaagtgggcgctcgaagagctgctcgccggcaactggaactacgacggccagtgcaaccccttccaggcttcctacatcgacgccatcatcaaggacctgcaggccggcaaggctcccgctgaaaagaccatcatcatggacgagaagggcttcgatgcttccaccatcacgcaggaagacgtcgacaactacggcatctga

SEQ ID NO: 48 - DNA, 1359 bp, Unknown
  Unknown gut bacteria
atgaaatacgcaagtcagatcccgcgggagaccatcgcccgcctcgaggcgatggccgccgaagatcctgtgcgcttctgccagccgcatccgtgccccggcgtctattcctcgcgggaggaagaggaattctggtgctacaaatgctgggggcacgcgctggagcagcccatgcccggatctaacctcgcggagtttttccggcagcaggatctgcagttcccgctgcctgccggcttccgcgaggagcggcgcatcaccgtcagccacggctcggactgcatggcagtcgactgcatctgcgatgcgtacacgccgcacctgttcgattccatcgcggacttctacctgaccaccgacctgccgacggcaaatctggaatcgacggtctatcccgccgcgcccttcggccgcaaccagccgaaggtcctgcccggccagaccaggacagactgcaatccgcgcatgaacacgtccgccgggatgctggaccggtttgtgaacgccgggatccgctatttctccacggcgaataaccactgctatgactatgacgaggcgggcctgctcgcaacgctcgacgagcttgaccgccgcggcgcggcgcattccggtacgaaccgcagtccgcaggagcagacgcaggcgctcgtgctggacgtcggcggcgtgcgcgtcgcggagctgagcgcgaccttcgacctcaacgaccgtgcgtatgaaaagaagtggctcctgaatgaggtgcgcttcaacgacaccccgtgcgattttacgctcatcgaacagctcatcgcctcggcaaaggcgcagaaggcggacatcatcacgctgcatgcacactggggctgggaattcgagctgtatccgcaccccaagactgtggaatacgcgcacaagctcgcggaaatgggcgttgatgtgatcgtcggcacgcatccgcatgtctcacagccgatggaaaagtacacctatacgcaaaacggtgagcagcgcagctgcctgatcttctactcgctcggcgacttcgtcagctttcacccgcagagccgcgacagccgcatcacctatgtcccgcgttatacgctcgcaaagggagagctggacggcaggccgaggacctttgtcactggtcttcagatcctgccggtctacatcctgactgcggcggacgcggaggaaaactacgatgtgcgcctgctccgtttttccgacgtgctggcggacagaccggatgcagacggcgcataccgctatcccctctgcgattgggagcgtgcagatctgccgcgcctgcatgaaaaggtcctgcacgggatcctccttccggcggatcaccgggaactgctcgtaccatag

SEQ ID NO: 49 - DNA, 1083 bp, Unknown
  Unknown gut bacteria
gccgtcatccacgcgaatgtcgagggcgcggtcacgtacaaggccctgctctatatcccggccaaggcaccgtatgatttctacaccaaggacttcaagaagggcctgcagctgtactcctccggcgtgatgatcatggaaaactgcgccgatctgatgcccgactgcttccgcttcgtgcgcggcggggtcgactcgcaggatctgagcctgaacatctcccgggaaatgctgcagcatgaccggcagctgaagttcatcgcggggaatctcgaaaagaagatcaaggctgagctgcagaagctgctggacaacgaccgcgagaaatatgagaagttcttcgccgccttcggcccgcagatcaaagacggcgtgctggccgactacggcgcgaaaaaagaggcgctgcaggatctgctgctctactggtcgagcaaagagggcaagctcatctccctcaaggaatacgccgccgccatgccggaggatcagaagtatatctactatgccaacggcgagagccgcgagcgccgcggccagctgccgcagatggaaaagctgcagcagaagggctacgatgtgctgttcatgaccgacgaggtcgacggcttcgtgccgcagacgctgggcaagtatcaggagaaagagctcaagtccatcacggcgggcgatctcggtctcgagaccgaggaggaaaagaaggccgccgaggaaaagagtgaaaagtcgaagcagacgctggacttcgtcaaaaagacgctcggcgacaaggtcaaggacgtgcggctgagcgacaatctgggcagtcaccccgtgagcgtcgtcccggcggagggtatgacgtttgagatggagaagtatttcaagcgcgtggacccgaactcgggcatgaaggctgaccgtatcctcgaattcaacgccgaccacccgatcttcgccaagctgcagatcgccgtcgcgcaggatgagaagaaggccgaggatcttgtgaagatcctctacacgcaggcgctgctgatggccgatctgccggtcgaaaacgccggcgaatataccgatctcgtctgcagcctgatcggctga

SEQ ID NO: 50 - DNA, 942 bp, Unknown
  Unknown gut bacteria
atggcaaatacctataccgtcctgctctccgagctggtttcggaattcaatcttgactttttctacaagtccacggactttgacaagatccgcgtgactgttgacgatatcagccgcccgggcctgcatctggccggtttttttgaccactatgagccgatgcgcgtctacgtctgcggcacggtggagacggcctacctgcagaagctctcgccggaggagcggatcatcatttttgaccacttcctgtcctacaagtgcccggcgctgatcttcgcccgcggcttccagccgatgccggaatgcctggagatggcgaaaaaatacgacgtgaccgtgctcggcacgaaggacacgacgtcctatatcgtctcgagcctgatcacctacctcaagagcgccctggccccccgcgtaacccgccacggcgtgctggtcgagatctacggcgagggcatcctcatcaacggcgacagcggcatcggcaagagcgagacggccatcgagctcgtcaagcgcggccaccgcctgatcgccgacgacgccgttgagatcaaaaaggtctcgccgcatgagctggtcggctccgcgccgcctgtactcaagcactatatcgagctgcgcggcatcggcgtcatcaacgtcgcgaagctgttcggcatgggcgcggtcaaggaaagctccaacatcgacctcatcatcaacatggtcccgtggcgcgacggcgaagcctatgaccgcctcggcatggagacgcagtacaccgagatcctcgacgtgaaggtcccgtctatcacggtcccgatcacccccggacggaacctcgctgtgatctttgaggtcgccgccatgaataaccgccagaagcgcatgggctacaacgccgcggtggaatttaccgagcagatgagcaaatactttacctcccgaaatgacgactga

SEQ ID NO: 51 - DNA, 1185 bp, Unknown
  Unknown gut bacteria
atggatatctttgagaagtgctttgcgccgtccctggcgggggaattgaaggaaaagggcgtgtacccctactttcacgccctgcagtcccggcaggatgtggaggtgcagatggagggcaagcgccgcatcatgctgggctccaacaactatctgggactgactacggacccggaggtcatcgaggccggcatccgggcgctggagcagtacggcaccgggtgctctgggtcgcggttcctcaacggcacgctggagatgcatctggagctggaggcggagctggcgaggttcctgcggaagccgggggtggtgaccttcggcaccggcttccagtccaacgtgggcattatctccgcgctggtggggcggcacgactacgtgatctgtgaccgggagaaccatgccagcatctacgccgggtgccagctgtcctacggcaaaatgctgcgctatcgccacagcgacatggcggagctggaaaagtgcctgcagaaggtgccggagacggccggagcgctgatcgtcaccgacggtgtgttctccatgggcggcgacatcgccaagctgccggagatctgcgccctggcgaagcagtacggcgcgcgggtcatggtggacgacgcccatggcctgggcgtgctgggcgagggcggccggggcacggccagctacttcggcctggaggaccaggtggacgtgtacatggggaccttctccaagtcgctggcgtccctgggcggctatatggccgccagcgcggaggtagcggatttcgtgcggcacgcatcgcggccgttcatcttctcggcatccatcccgccggccaactgcgccacggcgctgacggccctgcggaagctggaggcgcatccggagctgccggagcgcctgcgcgccctgagcctgtatgcccggaaggggctgacggaccggggactgaccatccggccctcggcgctggaggcgcccacgcctatcatccccatctacacctatgagacgtaccggacgctgcgggtggcggcggagatctacgaccggggcgtgtatgtaaaccccacgctgccgccggccacaccggagggcgaggcgctgctgcggaccagctatatggccacccacacggaggccctgctggacgaggccatggacatcatcggggaggtgatggcccatgagtaa

SEQ ID NO: 52 - DNA, 1200 bp, Unknown
  Unknown gut bacteria
ggagcgatcatactgatgatagaaaaagctgaagtcacagcacttttgcagcagctcacggccatcaaaagcgaatatttccacgaggacgagatcatggcctttgccagggactggctgtgccggcaggaactgcccgcacagctgcacgaataccacgatgccaaggtcacagatttccatggaaaaaatgtcatcgccgttatcgacggcggcaggcccggaccggtcatctgcctgaacggccatctggacaccgtgcagctgtgcggcggttggacccgcgatccctacggcgagctggacggcgacaggctctatggtgtgggcgcgctggacatgaaatccggctgcgccgcgctgatggtcacggctgcccgcttcgccgccgcccacaagaccttcgccgggaagatcaagctggcgctggtctctgacgaggagggcccctacggcctgggcaccaatgccctcatcgaggacggctatctctctgacgtggacttctccatcatcaccgagccaagcgccggctttgacggcaagcccttccccgatgtctgcctgggcgcccggggcggctatggtctggagatccgcttctacggaaagtccgcccacgcggccaacccgggaaagggccacagcgccctgctggacgcggccaaggtggcgcaggcgctggagcaggtggactatatcgaggacccgcacctgggcaagggcacctgctgcgtggtgggcatcaatgccgacggcggcgcgtgcagcgtgccggacttcgccgtgctccgcctgttctggcacatcgtggtgggcgaaagcccggacaccatcgtccgcgagatcgaaaaggccgtgcagcgcgccggtatcaccgggcggtatgagatctgcttccgcgaagcaccgtctgagggctcccggggcttcatgccttacaccgtcccccaggacgaacccatgaccgtctccctgctggagtccatccgcaaggtcaccggcaaggaacccaccatctcctacttcgccagcatcggcgacttcaactacctgggcacacggctgggcgcgccggccatcatcttcggcgccgacggcgagaactatcacagcagcgacgaatacgtcctgctggactccgtccaccagaccgccgaggccgtttacgacttcctggagaaaacactgctgccctga

SEQ ID NO: 53 - DNA, 2094 bp, Unknown
  Unknown gut bacteria
atgaagaacatctggaatatctttcgcgccgactggcggcggctgacggccagtgtggtggcggtggtggtgctgctgggattgtgcctggtaccgtgcctgtacgcctggttcaacatcctgtccaactgggacccctacggcacggcgtccaccagccgcatcagcgtggcggtggccagcgaggacgcgggctgcgaggtgctgggtctggaggtgaacatcggcgcgctggtgctccaggggctggagagcaacgaccagatgggctgggtgttcgtggacagccgggcggaggccctggacggggtggagtccggcgactactacgcggcgctgatcgtgccggaggaatttaccgaggattttgtgagcatcctgtccggcgacctgcgccacccgcagatacagtattacgagaacgagaagaagaacgccatcgcccccaagatcaccagcaaggccaagaccgccgtgcaggagcagatcaacaccacggtcatcgtcaaggctgctgaggcgctgaccacggcgggctccgtgttcaaggccatggggctggattcggaggcgctggcggacggcattatggacaagctgaccggtgcgcggcaggagatggcgcagctgcagaaggtgctgctgtcgctgaaggacgtgatgaacggggcggacgggctgctgaccgcggcgtccgtgaccatcgcggacgcacggggaacggtggaggacgccgatgcggcggcgggcagcacggtgcagcttatcagcacgggcctgagcgcggcggacacggcgtacagcgacctgctgacggtgctgaacaacacggataaggtactgggcgacatcgaggatgccctgcggagtatggatacctctgccgccgacgaagcgctgaaggcggacctgcaccggaagatacaggcggccatcgccgcgctggaggaccagctggcgaccgccgaggacgaggccgtgaaggcgcagctggagacggccatcgccgatctggaggcgctggacgcgctggtggatacgctggagccgtcggccctgcagggaccggtgctggatatgctgcatcaggtgcggcaggagctgctggcggcggcggtgcagaccaataaggaggtcaacgaatacctgcacaccaccggggcacaggcccagaccacgctgcggtccgtccagcagctgctgggggctgtgggcggcagcctgggggaggtgtccggcacgctggacagctacgccgatgccataaccaccgtacagcctacgctggacgcgggcattaccctggccaacacggtggagacgtatctggcggacatcgaggacgatgtgcgccgggtgacggagagcgaagccttcaagcgctttacggagctgatggagagcagcgatgccgaaagcatggccgactacctcagctcgccggtgcagctgaacacggagatcatctatgagatcaaggactacggcgcggccatgtcgccctactacgtcatgctggcgctgtttgtgggcagcctgctgaccgccgtgatgctgaaggtaccggtgacccagccggagttcgtcgggtgccgggccgtggagcggtatttcgggcggttcgccaccttcttcctgatggccatggcccaggcgctggtgacggcctttggctgcctgtacttcgtggggatggagacggcggagccggcgctgttcgtgctggcctgctgcctgtgctcgctgaacttcgccagcatgaactacgcgctggtgtacgccctggacaacgtgggtatggcgttgtcggtcgttatcatggtcattcaggtggccgggtccggcggctcatacccggtacatgtgctgccgcagctgttccagaccctgtatcccttcatgcccttccactacggcatggatatgatccgggagacggtgggcggtatgtacggcgacacatacctgcgctgcgcgctggtgctgctgggcatgtgcgcgctgttcacggtgttcggcctgctggtgtactacccggcccgaagactgaacgcggctatcgctgccagcaaggaaaagtccggtatcatgtaa

SEQ ID NO: 54 - DNA, 1677 bp, Unknown
  Unknown gut bacteria
atgctggagctgctgcatattgagaatatcgctataatcgaggcggcggatatcgaattcgcaccggggttcaatgccctgaccggtgagaccggcgcgggcaagtccattgttatcgacagtctgagcgctgtactggggcagcggaccagccgggagctgatccgtaccggggccgaaaaggcgtttgtcagcgcggctttttccggtatggcaccggagctgacggaggagttgggcatccagccggaggcggatgggacgctgctgctgcagcgggagatccagaccgacggcaaaaacgtatgccgggtcaacggccgtccggtaacagtgggacagctgcgggcactgggtgcccgactgctgaatatccacgggcagcacgacgggcagcagctgctggacgaggagcagcacattgtgtatctggacagctttggcagggtggaaagtcttgcaattacatatgctgagaagtataagcactttacagatatacggcggcagatcggggcgctgcagatggatgaggcggaaaaggcccggcgggtagacaccctgcaatatcagatcgaggagctgaagcgggcgaagctgaagcccggcgaagaagaggaattgacagcgcggcgggggatgctccgcaacgcggagaagttcctggacgcggtggccggggcggactatgccctgaacggcgacgacagcggcggcggagcgctcagcgctctgcggcaggcccaggacgcactgggtggcgtacgccatttggatgacgctttcggccagctgtatgaacggttgggggaggcgtatagcgaggtctacgacatcgcggctaccgtggaggacaagcggggcgagctggatgtgtcgcccggtgagctggaccgggtggagagccggatggacctgctgtaccggctgaaaaagaagtacggcgcgaccgtggaggatatgctggactatcaggcccggtgcgaggcggagctggcgcagatcgaggatgccggcgacacgctggcgcggctggaacaggcactgttcaaggcggagaaggaggcacggcaggcggcgcaggcgctgtccgatgcccgaaaggcggcggcggatcggctgacggcgcagatactgacagaactacagcagctggacatggggaagatacgctttgcggtggactttgcagaaaagcctctggacagcgacggcatggacacggtacggtttttgatgtccgccaacatgggcgaggagctgcgtcccatccacaagatcgcctccggcggcgaattggcccggatcatgctggctatgaagaacgtgctcagtgagcaggatcacgtggggacgatggtgttcgacgaggtggacaccggcgtttccggtcgggcggcccagaaggtggcggaaaaaatggcgcgtatcagccgcagaaagcaggtgctgtgcgtgacccatctgccgcagctggcggctatggcggacacgcatttctccgtggagaagggcgagagaggcggccgtacctatacagaggtgcggcggctggacagagagcagcggcggcgggagctggcgcggctcaccggcggcagccatgtgtcccagaccatgctggacggggcagaggagctgctggtacaggcggagaaattcagggcggagctgtag

SEQ ID NO: 55 - DNA, 942 bp, Unknown
  Unknown gut bacteria
atgctcagcaatctgcaagtctgctttaacgccgtgatgcccctgtttcttattatgggactgggctacggggtcaagtgtctgggcggtatccgggtggaggacgtgcccggattgaacaagatggcgttccggttcttcatgccggtgatgctgttctggaacctgtacacctcctccatcgaccaggcgttacagccgaagctgctgctgttcgccgtgggggccacgctggggatgtacggcctgtccctggccatcgtactgcccacggagaaggactacgaaaagcagggcgtgaagatacagggtatgtaccgcagcaacctggccattatcggcctgccgctggccacggtgctggtgcccggggcggacatggggccggtggccatgctggcggccatcatcgtgccgctgttcaacgtactggcggtcatcaccctgacggcgttccggggcgagaggctgcccgccggaaggctcatcaaaatggtggccaccaatccgctgatcctgggctccgccgtggggctggtgttcctgggcaccggctggaggctgcctacggcgctggagtcggcggtgcaccaggtggccgccatgaccagcccgttcatgctgttcctgctgggggccttcttccggttcagcggcctgcgccggtaccggagggacctgatcgaggtgtgtctggtgcggctgttcctgatgccggcgctgctgctgacggcggcgtttctgatcggcatacggggcgtgggcttcgcggggctgatcagcgtgttcgccagcgccacggccatcgcctccttcaccatgacacagcagatgggcggcgacgcggagctggccggggacatcgtggtgtccaccagcgcgctgtgcatcgtgaccatgttcgcctggtcggtgctgttcaaggcgctgggcgcgttctga

SEQ ID NO: 56 - DNA, 1206 bp, Unknown
  Unknown gut bacteria
atgacacgggaggaacagcgcgcccggaaggcccagcaggaacggatgcggcaggtggagcgccggcataaggaagccgcccgcgggcagatggatctccccttcctgatcctgacgctgctgctgacggtcatcggcctgatcatgctgttttccgccagctttccccgggcctattacgacaccggggacggcacctactacttcaagcggcaggccgccttcgcggcgctgggtcttgtggccatgttcatcgtcagcaagatcaactatcagcggtggcgcggcgcaggacggctgctagtggggctggcgctgtttctgctgatactggtcatcatcccccacaacccgctggccatcaccgccaacagagccacccgatggctgggcatcaagggcgtgttccagttccagccgtctgagatcgccaagttagcggtcatcgtctacttctccgacaccatctccaaaaagcgggagaagatgctgacctggcggcagggcatcctgccctatgtggcgctgctggcggtcatcggcgtactgatgatgctggagccccacctgtcgggcaccgtcctgatcttcgccaccggcgcggtgctgatgatcgtgggcggcatacagggctggctggtggcggtgggcgtcggcggcgtcagcgcactggccttcctgttcgtgaagctggcggaggcgggcgtcatccgatacggcgcggcccgtatcgagatgtggcataacccttgggaggactactatggcgacggctaccagctggcgcagagcctgatcaccatcggctccggcggcctgctgggcgtgggcctgggccggggacgacagaagttcctgtacctgccggagcagtacaacgacttcatcttttccgtgatctgcgaggagctggggctgatcggcgcctgcgtcatcatgttgatcttctccatgctgatactgcggggcttctggatcgccctgcatgcccgcgaccgcttcggcgcgctgctggtggtgggcgtgatgacccacctggccttgcagacatttctgaacatcgccgtggtatcgggcttcgtgcccaccacgggcatctccctccccttcttcagctacggcggcacggcgctgtgtttgcagctggtggagatgggcatcgtgctgagcgtatcgcgacagataccggcggcacgggcgggataa

SEQ ID NO: 57 - DNA, 1095 bp, Unknown
  Unknown gut bacteria
atgaagaaacgaagcggcatcgcgccgctgatcgccatcggcggcatactgctggcgctgtctgtcggcagcttcttcctgacgccggaccgggcattctcggagaacgagaaccgctatttgcagctgacgcccagactcacctgggaccgcatcatgtccggcgactttatggaggacgtggaggactataccagcgaccagatcgtcttccgggacttctggaccgccgcccggtcggtgctgcagcgggccgagggcaaggaggacatcagcggcacctatctgggcgcggacgggaggtactttgccaaggtgaccgacgacagctttgactgggtaaggctggagaagaacgccgggtatatccgggatttctttgccgccagcggtaagccctgcacggcgctgatcgtgcccagcccggccggaattctgagggatatgctgccggagaacgcgccgtatttcaacgaggacaaggccttcggccggctgggtgatattctgggcggtacgctactggacagccgggaaacgctatcggcggtggacgacccctactaccacacggaccacccctggaccaccatgggcgcgcaggcggcctatacactgtgggcacaggccacggggcacaccgcccgcagctatgacctgacgctggccacggacagcttccgcggcacgctgtactccaaggtgctgctgccggacagcgtatacgacagcgtgtactacgcgccggagatcacggtggagagcgtggtgtgcgacgggaaagacggcgcgctgtacgacctgtccgccctggagcagaaggataagtatgagctgtttctgggcggcaactacggccagtgcgccatcaccaccggcacggagaacgggaagcacttgctgctggtgaaggactccttcgccaattccttcgtaccgttcctcaccggcgactatgagaccatcaccatgatcgacctgcggtactaccggggcagcatggcagagctggcggcggaggccgacgatattctggtgctgacggaggtcacgaacctggcgggctcgggagactatttcaagctgagtaagtga

SEQ ID NO: 58 - DNA, 741 bp, Unknown
  Unknown gut bacteria
atgctggaattgcagaatatctgctaccgggtgtccacccccgagggggagcaggacatcctgaaaaacgtatccatcaccatccccgaccataagctggtcgtcttcaccggccccaacggcggcggcaagaccaccctggccaaggtcatcatgggcctggtgcagcccacctccggccgcgtgctgtacaacggcgaggacgtgacggacctgtccatcaccgagcgcgccaagcgcggcatcagctacggcttccagcagccgccccgcttcaagggcatcaccgtccatgacctgctgcttctggcggcgggcgaggacaagctcagcaaggacaagtgctgcgcctatcttaccaaggttggcctctgcgccaacgactacctggaccgcgaggtggacgtgtctctgtccggcggcgaggtcaagcgcatcgagatcgcccccatccgggcccgccgcggccagctgatgattttcgatgagccgggggccggcatcgacctgtggtccttcgcccggctgactgagaccttcgagcagatccaccgggagggcgcggccaccatggtcatcatctcccatcaggagcgcatcatcaagctggccgacgagatcgtcgtcatcgccggcggccagatcgcccaccgcggcaccacggaggagatcttccccctgatcctggccgacacgctgggcagctgtcccgtactggagagaaaggagggcgcgcaatga

SEQ ID NO: 59 - DNA, 759 bp, Unknown
  Unknown gut bacteria
atgagcattacgctccgtcatgccgccgcctgctatcaagccccggacggcgaggtggaggcggtacgggacgtgtccttcacggtggaggagggcgcgttcgtcagtttagtggggccctccggctgcggcaaatccaccctgctcagcgccattgccggtctggagcccctcagcggcggcgctatcgagatcgacggccggacggtacagggcacgtcgccaaaaatcggctttatgccccagcgggaccagcttttcgagtggcggaatatatgggacaacgtgacgctggggctgacggtccgtggtgagaaggacccggcggcctatgcacacgtgtcccgcctgctggagcgctacgggctggcgtcctttgccaaaaagaggccctgccagctctccggcggtatgcgccagcgctgcgccctgatccggaccctggccactgagccggagatattgctgctggatgagcccttttccgccctggactaccagacacggctggcggtgtcggcggatatctggcgcatattgcagcaggagggcaaaacggccctgctggtcacccatgacatcgctgaggcggtgagtatgtccgaccgggtggtggtgctgtcccgccgccccgccgtggtgaaggcggagatggacatgggtgcgctgcgtggtctgccgccgctggagcgccgggacacgccggaatttcaccggtacttcaacgccatatggaaggagctggacgttcatgcctga

SEQ ID NO: 60 - DNA, 963 bp, Unknown
  Unknown gut bacteria
atgaacatatttgtcatcggctgcgggcggtggggttccctcatcacctggtatctggatcacatcggccatcatgtgacgctgtacgggcggcagagctcgccccgtatgcagtcctttctggccacccggcaaaacgatctgctgacgctgccagactccgtggggctgaccaccgacctgcgggacgtggagcaggcggagacggtcatcatctccatcggctcccagagcctgcgttctctgctggcagaggcccccatgcaggccctgcgaagcaagacggtggtgctgtgcatgaagggcctggagatgggcaccggcgaacggctcagcgttatcgccggatcactgctgcatgagagcaacaccgtggcggtctggctggggccgggccatgtgcaggagttctaccggggcgtacccaactgcatggtcatcgacagcgcggacggggaggtcaagcggcggttggtgaacgctttttccggcgacctgatccgtttctactatggcggcgacatgatcggcaacgaggtaggcgccgcggccaagaacgtggtaggcatcgcggcgggttttctggacggcgtggagatgtccagtctgaagggcgcgctgatgagccggggtacccgggaggtggcgcggctgatcaaggctatgggcggcaatgagctgtcagcctacgggctgtgccatctgggggactatgaggccacggtgttctcgccctacagccataaccgacagttcggcgagtccttcatccgccatcaggactatcaccggctggcggagggctattacacagtggaggcactgatggtgctccgcgaaaagtacggcgtggagctgccgatatgcatggcggtacacaacatcctgtacgaaagcgccgatccccgggcagagctgagtgccctgctgcggcggggcctgcgggcggaattcgacgactga

SEQ ID NO: 61 - DNA, 834 bp, Unknown
  Unknown gut bacteria
atgaccattacaaccgaccagctgacgcagtttcgcgccctgctgaaaaacgaggagaaatccgccgccaccctgaacaaatacctccgcgacatccagcgcttcgccctgtggttgggcgacacgccgctggagcgcgacgccatgctggactacaaggccgaccttatgcgccactacgccgccggcagcgtcaactccatcctggccgcgctgaaccgttttctccgcatgatcgcccgcgaggactgccgcgttcaccgcctgcggatccagtaccaggcgtacagccccgaggaacgcgagatcaccgcccaggagtacgccgatctggtccgtaccgcccgggagacaggccgcgcccgcctggcgctggtgctgcagaccatctgcgccaccggcatccgcgtcagcgagctgcccgccatcaccgccgaggccgcccgccgcggcgtagccgtggtgcggtgcaagggcaaatcccgccgcgtgctcatccccacccgcctgcaaaagaagcttctgcgctatatgaagcagcaccgcatcgccttcggcccggtgttcgtcacccgcagcggcgcacccctggaccgcagcaacatctggcgcgagatgaaggccctgtgccgcgccgccggcgtctccgacaaaaaagtgtttccccacaacttccgccacctgttcgcccgcacgttctaccggctgaacaaggacctggccaagctggccgacctgctgggccacagcagcatcaacaccacccgtatctacatccgcaccaccagcgccgagcaccgccgctgtctcgagcgtatgcgcctggtgctgtaa

SEQ ID NO: 62 - DNA, 1140 bp, Unknown
  Unknown gut bacteria
atggcacaggaaaaacgagattattatgaggtcctcggcgtcagcaagggcgcatcggaggacgagatcaaaaaagcatataaaaagctggccagaaagtaccacccggacatgaaccccggtgacaaggaggccgaggagaagttcaaggaggtcaacgaggccaacgaggtgctgtccgacccggagaaaaaggcccggtacgaccagttcggcttcgcgggcgtggatcccagctacggcgcgggcgcaggcggcggcgcgtatggcggtgcgggcggcttcgacttcggcgatctgggcgatatcttcggcagctttttcggcggcggctttggcggcggccagcgccgcaaccccaacgcgccccagcggggcgagagcatccgcgccagcgtgtccgtgacgttcaaggaggcggccttcggctgcgagaaggacgtgaccgtggagcgcagcgagcagtgcgctacctgcaagggcagcggctgccagccggggaccacgccggagatctgccccgactgccgcggcagcggccaggtgcaggtgcagcagcggacgcctatgggcgtgtttgccaccagccgtccctgccagaagtgtcacggcaccggccgcattatccatcagccctgtaccgactgcggcggacagggtcgggtgcggaaacgcaagaccatcaaggtcaacatccccgccggcatcgaccacggccagaccatctctctgcggggccagggcaacgccggcaaaaacggcggcagcgccggcgacctgctgatcaccgtgatggtgcagccggacgagacattccgccgggagggcgtggacgtgttctgcgacgcgcccatcaccttcgcccaggcggtgctgggcgccacgctggagatccccaccattgacggcaaggtgaaatacgacctgccggagggcacccagacgggcacggtgttccggctgcggggcaagggtatcccggtgctgaacggcagaggccgcggcgaccagtatgtcaccgtgaacgtagagacgccgcgaaatctgacgaaggagcagaaggaggccctgcggagcttcagcgatatgctgggcgagagcaactacgaaaagcgcaagagcttctttaagaagaaatga

SEQ ID NO: 63 - DNA, 2061 bp, Unknown
  Unknown gut bacteria
atgaacgagaaatacagcgctctgtttacccccgggaagatcggcaacgtggagatcaagaaccgtatcgtgcagccctctatgggcggtacgtccctgttcggctggctggagccctgtcacttcgataaggaagcggcctaccacatcctgaaccgcgcccagaacaacgtgggcctggtgctgccgggtatgcagtgtgtccgcgacaccatgggcggccgctggctgtaccagaacaaaaagatgttcaaggacctggccgagtggctgccggagttccacaagactggctccaagctgtttgtccagctgtccgccggtatgggccgttccatggccatcaacgagatcatggtcaagatgctccagaacaaggccttcggcgccgtgggcaagcccttcctgaacgtggactacatcaccgcctccgcctccgccacccccaaccgctggtatcccgagtgcaagtcccgccctctgaccgtggaggagatccacgagatggtggacgcctttgccaagaccgccaagctcctgcaggatgccggcgttgacggtgtcgagatccacgcggtgcatgagggctatctgctggaccagttcaccattgccaacatgaactaccgtaccgacgagtacggcggctccttcgaaaaccgctaccgcttcgctgtggagatcgtccaggccatcaaggccgtctgcggcaaggacttccccgtggccctgcgttactccgtggtgtccaagaccaagggctttggccagggcgccgttcccggcgaggagttcgtggagttcggccgcgatatggccgagtccgagaaggccatcaagtacctggaggatgccggctacgatatgttcgactgcgacaacggcacctacgatgcctggtactgggcccatcccccggtctatatgcccgagaactgcaacctctccgaggtggaacacatcaagaacttcacctccaagcccgtggtctgcgccggtaagatggaccccgccaaggccgccgaggagatcgccgccggacgtctggacgccgtgggcatcgcccgccagaacctggtggaccccgagtgggtcaataagatcctggaggaccgcgtagaggacatcaagccctgcatcaactgtcacaacgcctgctttagcttcaacaagtccaagagcacacccaatatgcagcccatggacgactctctgcacctggcccgctgcgccctgacgcccagcaccatgcagcacaacaagtacaagatcgttcccacccgcaagcccaagaaggtcgccattatcggcggcggtatcggcggcatggagtgcgccctggtgctcaagcagcgcggccacacccccgtcatcttcgaaaagaccagcgagctgggcggcctgtacatcaccgcctccgccatgagcttcaaggaggccgacaaggccctgctgcgctggtacgagcgtgagctgaagaagaacgacatcgaggtccgcttcaacatggagatcaacgcccccgccaccctgcgccgcgagtttgacgagatcatcgtctgcaccggctcccaccccaagaccctgccggtcaagggcttcaacaagaccatcaactttacccagctgctgttgaaccaggtggacgccggcgaccgcatcgtcttcttcggcggcggccagtcctcctgcgaggccgcctatgagatggtcctccagggcaagcaccccatcatcgtggagtacgccgacgacctgatcgccacccccggcacctgcctggccaacgcctccttcctccgcgagatgctggcgttcaagaaggtccccgtctacctgaacgccaccatcaccgagatcggcgacggcttcgtcatggtcaagcagcaggacggcaccgagatccgcatcgagtgtgacagtgtagtcaacggcatcggcttcgtgcccgcgcccatcgccgccgatgaccacaaggtctaccgtgtcggcacctgcgagaagtggggcaacctccgcaacgtcatctggggcgcctgggacgtctgtatgcacatctga

SEQ ID NO: 64 - DNA, 1659 bp, Unknown
  Unknown gut bacteria
atggcagaaaaattcaagatcattccccttggcggtctgaatgagatcggcaagaacatgaccgtctatgagtacggcggcgacatcatcgtggtggactgtggcatggccttccccggcgacgatatgtacggcatcgactgcgtcattcccgacgtcagctatctggtgaaaaaccgcagtcggctgcggggtctgttcatcacccacgggcatgaggatcacatcggggccatcccttatgtgctcaagcagatcaatatgcccatctactgcacgcggttcaccgcggggctgatcaagctgaagctgcaggagcatgggctggccagctctacgaagctgatcaccgtggagccgggtcagacggtgcgggcaggcaagttccaggtggagttcatccacgtgaaccactccatcgccgactcggtggccttcgccatccacacgcggatgggcgcagtcgtacacaccggcgacttcaagatcgactccacgcccatcgacggggaggtcatcgacctggcgcgcttcggtgagctgggcaagcagggcgtgctggcgctgctggcggactccactaatgtggagcgcccgggctataccatgagtgagcgcgccgtgggcgccacgttcaagcggcagttcaccgggtgcgacaagcggatcatcgtgaccaccttcgccagcaacgtgcaccgcatccagcaggtgctggacgctgcggcggcctgcggacggaaggtggccgttaccggccggagcatggagaacatcatgaaggtctccacggagctggggtacatgaaggtgcccaagaacacgctgatggacatcaaccgcatcaagggactgcccctgaaccagcaggtcatcgtgaccaccggctcccagggtgaggaaatgagcgccctgtaccgcatggcgttctccacccacaagcaggtggacatcggccccggcgacaaggtcatcatctccgccagcgccatacccggcaacgaagtgacggtggggcgggtcatcaatgagctgttccgcaagggcgcggacgtggtgtatgacaaggcggatatgctgcacgtgtccggccacgcctgccaggaggaactgaagatcatccacgcgctgacgaaacccaggttctttatccccctgcatggcgagcagcggatgctgcagatccacaagcgggtggccgagagcatgggcatggcccccaccagcatcgtggtggccgacaacggcagcgtcatcgagctgaccaccaagcacatcaagtgcgagaccaccgtacccgccggcgaggtgttcgtggacggcggcggcgtgggcgaagtgggcgccgtggtgctgaacgaccggaagctgctggcggaggacggcatggtggtcatcgtgctgcccatgtccagccacgaccaccagctgctgtgcccgccggagatcgtcacccgaggcttcgtgtacgtgaaggagtccgaggagctgctggaggatatgcgccgggtggccacggaggcggtggatggaatgtccgccaaaaagcgccgggacgagggcgacgtatgccgcactgtgcgctccgccgtgagcagctatctctataagcacaccaagcgcagccccatgatcatccccatggtgacaaagctgtga

SEQ ID NO: 65 - DNA, 1017 bp, Unknown
  Unknown gut bacteria
gtagacgcggtggcgtccatgctgtatctggactatgaccggcagggcggcgcgtggcgtcccaacaaggacggcggccgggagaacctggaggccatcgacttcctgcgtgagctgaaccgggcagcctttgccgccgacccggcggcgctgatggtggcggaggagtccaccgcgtggccgctggtcacctatccgccggagcagggcggtctgggcttcaacctgaagtggaacatgggctggatgaacgacctgtgccactatctgaagatggacccctacttccgccagttccaccaccgggacgtgacgttctccatggtctacgccttctcggaaaactacgtcctgcccctgtcccacgacgaggtggtccacatgaagggctctctccggggcaagatgcccggcgacgactggcggcagctggccggtgtaaggagtttctgggcctatatgctgtgccaccccggcaaaaagctgctgttcatgggcagcgagctgccccagtggcacgagtgggacttccgcggccagctggactggtatctgctggacgatcccgcctgccgggccagccatgagtgcctgcggcagctgaaccggctgtataagcgcaaccggtgcctgtgggaaaacgaccgggactgggacggctttacatggctggtggccgatgataaccacaacaacgtgctggtgtttctgcggcgggaccgcaggggccacgagctgatctgcgtggtgaatttcgcgccggtgccctgggacaactaccgcttcggtgtgccggcagcggcgcggtatgaggtgctgttcaacacggacgacgcctgctggggcggcagcggctgcgcccttccggcgggcagccggatcgacgtggacgagatcccctcccacgggcgggagacgtccctttccctgaccatcccgcccttgggcgcggtgctgctgcgccgggagggaaaacgcccccggaaaaaacagaacacaggaggtacgcaaggatga

SEQ ID NO: 66 - DNA, 879 bp, Unknown
  Unknown gut bacteria
atggagaccgcccgctgccgcgcctttctggccgctgccgagaccggcagcttttcccgcgccgccgagatgctgcgctacacgccctccggcgtcaaccagctggtcaccgccctggagaaggagatcggcttatccttgttcagccgcagcaccaagggcgtggcgctcacggccaacggccagctgctgctgcccgttatccgcgagatacttcaccaggaggataagcttttcgagctgtccgcccagatgaacggcctgctgatcggcaccgtcaccatcgccgcctattccagcatcgccacccattggctgcccgctgtcatccgggattttcaggagaactacccccacgtggagatcaagctgatggagggtatctggcaggaggtgtcccagtggctggaggagcgcaccgccgacatcggcttcctcagctatcaggagaatatgcccttcgagtggatcccactggccgaggaccccatgctggcgctgctgccgcggaatcacccgctggccggtgccgactgctacccgctgaagcggtgcgagcaggacagcttcatcatgcccgccctgggctgtgatgacgacgtggaggcgctgtttgcacgcaatcacgttgatcccaacatccgctataccaccatcgagaacttttccgccatgtccatggtggagcagggcctgggtgtcagcgtgatgaacaagctcatcaccgaaaagcgtatctgcgatgtcgccatgatccccatcgacccgccggccagcatcacgttgggcgcggcactccactcccgggcggacgcctcgccggccgtaaagatgttcctgaaatacgccgtccgtatgctgacaaagagcgccgtctga

SEQ ID NO: 67 - DNA, 1908 bp, Unknown
  Unknown gut bacteria
atggtcgacattcgcgtttcggggctggtgaagtcctttgatctggaaaagagaatactggacggactgagctttcaggtggacagcggggagcgcgtggggctgctggggcggaacggcgccggaaagaccacggtgttccgtatgctcaccggggagctggagccggacgagggcgaggtacagatcgccgctggccggcgggtgggactgatctcgcagatccccgtgtatccggaggggtacacggtggaggacgttttgcagacggccttcgcgcggatgtttcggatgaaggacgagatggatgcgctggccctgcggatggagcagggggacagcggcgcggatacgctgcggcggtacggcgagctgaacgccaaattcgagggactgggcggctgggacacggagacggcggtgaacaaggtggccaacggcctgagcatcccgagggaaatgcggcagcgggaattcgcgtgtttgtccggcggagagaagacccgggtgaacctgggacggctcattctggaggatacggacatcctgctgctggacgagcccacgaaccatctggacctgcaggccacggagtggctggaggggtatctgcggaggttccggggcacggtgctgaccatcagccatgaccggtatttcctggaccggaccgtgacgcggatcatcgagatacaggacggaaaagcggagttttacagcggaaattacagcttttatgccatcgagaaggaacggcggtatcaggagcgcatgaagcagtacctgaaggagcaggcgaagatcgcgcagctggaaaaggcggcggagcagatgcacctgtgggcgttcatgggcaacgacgcgctgcacaagcgggccttcagcatggagaagcgcatcgagcgtatgcggaccacggcgaagcccacaaaggcgcggaagctggaggcgcgcttccagagccgggagttcaagggcgacgaggtattgcagatcaagggcgtcagcaaggccttcggcgagaagcggctgtttgaggatgtgtatctgcggtgcgaggggggcgagcgcatcgctctgctgggcgagaacggcacgggaaagaccacgctgctgaatatgctgaccggcagcgagcgcccggacagcggcgttatacggctggggccggcggtgaaggcggcgtatctgccgcaggtgatacacttcgagcacccggagaggtccatgctggacacgatgctctatgagctggacatcacgccgcagtcggcgcggaaccggctggcggcgtatcagttcaccggagaggatgtgttcaagagcgtcagcgtgctgtccggcggcgagctgagccgcctgcggctgtgtatgctgatggacgagagcatgaatctgctgatactggacgagccgacgaaccatctggatatcgactcgcgggagtggctggagcaggcggtggaggccttcgacgggacgctgctgttcgtgagccacgaccggtatttcatcaaccggttcgccacccgcgtgtgggagctggccgggggcgtcatcacggactatcccatgggctttgcacagtaccggcaggccaaggaggaggagcacgccgccgcggcggccgcggtacaggtacagtccgctgcgccgaaaaagaacggcagccggggcaaccgggcccagcaggcggcgaaaaagcagctgaccatctgcgagacggctatcgccaggctggaggcggacagcgcgcggctggaggcggagatggcggagaacgcctgcgacgcggagaagctgaacgcgctgtatcaggaacagcaggacgtgcagaagcggctggagcaggagatggagcgctgggaagaactgagcctgcaggccgaggaacaggaggagcgataa

SEQ ID NO: 68 - DNA, 1020 bp, Unknown
  Unknown gut bacteria
atgtatatgagcgttttgattttgaaccgcgagcaggtcaagcaggtcatctccatgaaggaagtcatccaggaggtgcgcgaggtctatcgtctgaaatcccagggcaagtccgtgatctggccgctggtcaactatgaattcgtggacgagcacgccgccatggacatccgttccggctatatcaagggcgtacagctccacggcctgaagatgctgaacaactttcccgagaaccgggaaaagggcctgccgcccttcaacggcattatgatggtctacgactccaacaccggtattcccgtcagcgtcatggacgcctcctacgtcacctgtatgcgtaccggcgccgccggcgcgctgggcgtggacctgctggcccgcaaggacgccaagcacctgttcatcctgggtgccggcaagcagccccccttccagatcgccgccacgctgctgctgcgtccggccatcgacaaggtctacatcgccgaccccatgttccccgacaacgcggtgcagttcgccgcccacattgcccagcagctctccgatgacttcggcatcgacgcctccggcgtggagttcctgccagcgccggatatggccgccgccgtgggagacagtgacgccaacatcaccgtcacgccctcccgcaagcccatcatccagaaggcgtggctgaagcccggcacccatctgagctgcctgggctccgacatggaatccaagcaggagatcgagagcaccatcttccagggcgccgccttctacgccgacgaccgtgcccagtgcatccgcgtgggcgagatggagctgcccatcaagcagggcgttgtcagtgccgacgacatcaccggcgagatcggtgacctcatcgacggcaaggtccccggccgcaccagcgacacgcagaccaccatcttcgacgccaccggcctgtacattctggatctggccgccgccaaggtagccatcgaccgcgcactggccgagggcgtgggcttgcaggccgacctgtaa

SEQ ID NO: 69 - DNA, 1311 bp, Unknown
  Unknown gut bacteria
atgctgccgcaggcggtgcgatatgtgttggagcggctggaggatgcgggcttcgccgcctatgccgtgggcggctgcgtgcgggacacgctgctgggccgcacaccgggagattgggacgtgaccaccgccgcgcggccggagcaggtgcttacactgtttgacggctatgccatcccaaccgggctgaagcacgggacggtcacggtccgggcgggggagatgcacattgaggtgaccaccttccgggcggacgggacgtatacggaccatcgccggccggatcaggtgtttttctccgacaggctggaggaggatctctgccgccgtgacctgacggtgaatgccatggcgatggacctgcgcgggcatatcaccgatctgtatggcgggcgggaggacctggaggcgggtatcctgcggtgtgtgggagagccggaacaacgctttgaggaggatgcgctgcgtatcctgcggacgctgcgctttgccgccgtactgggattttcggtcgagccgcggaccgatgcggcgctgcgggtgaaggcgccgctgctgcgctgtatcgcgccggagcgtatcctgacagagatggataaactgctgtgcggcagtcacgtgctgccggtgctgctgaactggccggacgtgctggcgatgttcctgccggagatcgcgccctgcatgggcttcgagcagcacaatcgccatcatatctacgacgtgtgggggcacagcgcccacgcagtggccgccgtcccggcggaggtggtcctgcgctggactatgctgctccatgatatcggcaagccggcgtgctttacccgggatgaacagggcgtggggcacttttatggtcacccggccatctcggcggacctggcggcggatatctgccgccgcctgcggatggacaaccgcacggccgaacgcatcgtgacactggtgcgctggcacgaccgggatattgcccggacggagaaggctattgcccgcgccgtgtcgcagctgggagaggagacgtttcggcagctgctggaggtgaagcgggccgacaacgccgcccaaagcccggaggatcgctgccgtctggcggatatacagcaggcggaggatcttctgaacacgctgctggcgaagcggcagtgcttttcactgaaggacctgacggtgaagggcggcgacctgatggcgctggggctgcgggggcgagaggtcggtgatgcgctgcagtatctgctgaacgccgtgctggacggaacgcctaacgataaagagaccctgctgaagctggcggcggagagaaaatag

SEQ ID NO: 70 - DNA, 867 bp, Unknown
  Unknown gut bacteria
atgagttatatcgacgtaacgggcaagactgaggacgaggcgctgcgtaaaggccttgagcagctgggcatggaccgcgatgacgtgtctgtctccattctggagcgtgccaagaccggtttcctgggcatcggcgccacccccgcccgtatccgtatcacctatggccctgatgaagcggacgttgtcgcccccgccgaggtgaagatcatccccgagacccctgccgcccccaaagcggagcccaagcccgccgtccccgctaaaccggcggcgccaaaggctgacaagccccgtcaggaccgtcagagccgtcccgaccgcagcgaccgtccccgccccgaaaagaaggagcgtcctgcccctgtggccccggccatcgacctgcccgagtgtgatgacgataacgccaagcgtatcatcgccttcgtctccggtctgctccagcatatggacagtgccgccgaggtcaaggtctacgaggtggagaagggccgctacaaggtcattctggtgggcgagcgtctgggtcagctgatcggccatcgcggcgagacgctggatgccatccagcagctgaccaattatgccatcaacaccggcagcgacagcaagcgtgttcgcgtccagatggatgccgagaactaccgtgcccgccgtgagcagagtctggagagcctggcccgcaaggtggcgaccaaggtacagaagtaccgccgcagtgtgaccctggagcccatgaatgcctacgagcgccatgtgatccacgccgccctgcaggatgttcccggtgtcaccacttactccgtgggcactgagccaaaccgccgcgaggtggtctcctatgaccgcgcccaggcccgataa

SEQ ID NO: 71 - DNA, 906 bp, Unknown
  Unknown gut bacteria
atgatctcatttgcgggaaaggtaaaaaatgagctgtgccgcgtgggaattagccgccagtgctgcgcccgggctgagggctacggtgtgctgctgtacggcaacacgttcacgcccggagagatacggatcatcacggagaacggagacttcgccgcacggctgccaaagttgtttcagaaagcttttggggtaaaattcgaccgggtaccggaggaaatgaacggcaaaggaaagctgatcttcggcatcacagcgccggaaaagctggaaaagatcatcaacacactgggctatgatgcgcggcagctgacagcgctgcacgtgaacttcggaatactggaggaggactgctgccggacggcgttcctgcggggggcatttttggcgggaggcagcgtcaccgatccggagaagcggtaccatctggagctggccaccagtcatatgccggccagccgggaggtacaggcgctgatggaggagatggggttcctgccacgttccatacggcgcggcgcggatgcacttctgtacttcaagcagtcagagcacatcgaggactttctgacgaagatcggcgcgccggcggcggccatggatatcatgacggcgaaggtggacaaggagatacgcaacggcgccaaccgggctatgaactgcgatatggccaacgtaaacaagacattggacgcggcgcaggagcaggtgggcgccatcgagaagctgcgccgcagcgcccggtgggatacgctgccggaaaagctgcggcaaaccgcggcgctgcggctggaatatccggagctgtcgctggtacagctggcagagaagtgtgacccgccggtaacgaagtcgtgcatgaaccatcgaatgagaaagttgatggaggaggctaaggagctatga

SEQ ID NO: 72 - DNA, 1347 bp, Unknown
  Unknown gut bacteria
atgcgcgacatcaacggcagcaagcctaccagcttccccctggacgaggaaaagctctcgttcaagatcccctgtcccgaccggccgccccgggagaagatcctgaagctgggcagcatgatcaccaaccgcattggcctgaaggccaccgctgacgaccccgaatactgggggctggatgcgctggtgaccgatgagatggcggacgtggcactgaaaatgggtgtccgcaagcccaagaccatcgagcagctgatgaagctgacgaagatggaacgcgagcccctgcagaagctgctggacgaaatggcctggctgggtctcattgagtacaactgggagaacctggacggcaaaaacccgaaccacgagaagcggtacatcctgcccctgttcgtgcccggcagcgccgagtttttgaatatgcggcggagccagatcgacgcgcacccggaggtggcggcgttctttgagcgcatgaccatgctgcccctggagaagatcacgccgatggtgccccccggaggcgcgggcatcggtatgcacgtgatcccggtggagaaggccatcgagacggagcaggaggccatcgggctggagaagatctcctactggctgcacaagtatgaaggcaagtacgccaagagtatgtgctcctgccgcgccagccgcgccaagctcggcgagggctgcggcgacgatgtggagaactggtgcatcgccgtgggcgacatggccgactatgtggtgcagacccagcggggcgagtacatcacctatgacgaggcgatggccatattcaagcaggcggaggacaacggcttcgtccaccagatcaccaacatcgacggcgagcagaagatctttggtatctgcaactgcaacgtcaacgtctgcaacgccctgcggaccagccagatgttcaacacgcccaatatgtcccgcagcgcctatgtggccgcggtggagacggagaagtgcgtggcctgtgggcgctgcgtggagaactgtcccgccggcgcggtgaagctgggccagaagctgtgcaccaaggacggctatatcgagtatccccgggccgagctgcccgacgaggtgaagtggggcccggagaagtggagcgtcgactatcgggaccgcaaccgcatcaactgctacgacaccggcaccgcaccctgcaagaccgcctgccccgcccacatcgccgtgcagggctatctgaagctggcggcacagggcaagtaccgggaggctttgcagctcatcaagcgggagaacccatttcctgccgtgtgcggccgcatctgcaaccgccggtgcgaggatgcctgcacccgcggcaccgtg

SEQ ID NO: 73 - DNA, 1749 bp, Unknown
  Unknown gut bacteria
atgaccacgaaagattatcagacccgcagccccctgcggatattcctctcctacttcaaaccccaccggcggctcttcgccctggacctgtcctgcgcgttcctcatcgcctgcatcgacctggcgttcccgctggtgtcccgcgccgccatgtatacctggctgccccagcggcagttccgggtattcttcatcgtcatggcggtggtggtggccgcctatgtactgcgctcggcgctgtacttcgtggtggcctactggggccacaccttcggcatccgcgtggaggcggatatccgccgcgatctgtaccgccacattcaggagctgggcttcgacttctacgaccgcaaccgcaccggccagctgatgagccgcctgaccagtgacctgtttgaactgacggagctggcccaccacgggccggaggatctgttcatctccctggtgaccatcgtgggcgcgctggcggtgatgttcaccctgcgctgggagctggcgctggtactgctggtgctgctgcctgtcctgctgaccatggccctgcgccgccgccggcagatgagcgccgcctcccgggctgccaaggtcaagaccggcaccatcaacgccgccatcgagtccggcctgtccggcgtgcggaccaccaaggcctttgccaacgaagaagcccagcagcagcggttcgacgaggccaacgaggtgttcaagaccgccaagcgtggctttcacaaggagatgggccgcttcaacgcagtgatggagttctgcaccggcatattgccggtggcggtgatcgccgtgggcggctggctcatcatgggggagaaaatggactatgtggatctgatcaccttctccctatacgtcaccgccttcgtcagtcccatccgcaagctggccaacttcgccgagatgttctccaacggcttcgcgggcctgcaccgcttcattgagctgatggccaccgagccgtccattcaggacgcgccggacgcgcggcccctcgaacatgtacagggccgcgtggacgtgaacgacgtctccttcgcctacggcgaaaaggccgaggtgctgcacaacgtgacgctgcacatccccgccggcgagacggtggccctggtggggccctccggcggcggcaagacccccctgtgccagctgctgccccggttctacgacgtggacagcggcagcatcaccgtcgacggccgcgatgtccgcgccgtcacccagcgctccctgcgccgggccatcggcatcgtacagcaggatgtgttcctgttcgccgacaccatccgcgaaaatatccgctacggccgccctgacgccaccgacgctgaggtagagcaggcggcgcggcaggcggagatctacgacgatatctgcgccatgccagacgggttcgacacctatgtgggtgagcggggcgcgctgctctccggcgggcagaagcagcgggtggccatcgcccgggtgtttctgaaggccccgcccattctgatactggatgaggccacctccgcgctggacagcgtgacggaagcccgcatccagggcgcctttgaccgtttggcccgaggccgcacgacactgatcatcgcccaccggctgtccaccattcgttcggccgaccggatactggtgatacaggacggtgtcgtcgccgagcagggctcccaccaggaactcctggcaaggaacggcgtgtacgccacactgtaccgcacgcagaatttgggggcataa

SEQ ID NO: 74 - DNA, 753 bp, Unknown
  Unknown gut bacteria
atgaccctttttgattactatctgcgctatatgaccgaggtatgggagggcacgcgtcctgccccggagggaatcaccctgccggaaggcggcgatgagaacgcccgcatacaggcgctgggccagcagctacaggatatgggcatggccgcctttgtccgcgcctgcgccgcccaggacggcacggtgcttccggaggagctgttcgccgaaagcggcgaccttggcggttttgagctgtttcttcaaaacgcgggcaaggcgcaggaagcccctgccgcggaggaaaagaccgtgacccccgaccccgatgccgataagcacgcctttgaggtgtttctggactgcattgccatggacgacggtcttgtgcagtatctgatcgacgtgctgaagcgcatggaccgcaaggagtttttcaagctcagccagatcaccaccaagctggatctggacccggaggagttcctctactggctgggccgtcgggagacgtatgccgacgaggaggagcagggctgtgccgccgctatggaccacgccctgctgcggcttgcggatgagggacggctggatgtggtggccgccctgctcagcggcgacagaaaaaccttcgagaccttccgctgcgaggcaccggagcttatgcacgcacccatcgccaccttcgagtggtacgagaaaaactatctggatcgggactatcccatccgactcatcatgcgcctgaacggcgtacaatttcccaactga

SEQ ID NO: 75 - DNA, 780 bp, Unknown
  Unknown gut bacteria
atgaccaacattctgctggaaaagaagggcctcatcgccgtggcgaccatcaaccgtcccaaggcgctgaacgcgctgaattccgaggtcctgaccgacctggacgagctggtttccgccgtaaaggcggacgcggatatccgcgctctggtcatcaccggcagcggtgaaaaggccttcgtggccggtgccgacatcggcgagatgagcaccctgaccaaagagggcggcgaggccttcggcaagcacggcaacgatgttttccgcgccatcgagacgctgcccatccccaccatcgccgcggtcaacggcttcgccctgggcggcggctgcgagctgagcatggcctgcgatatccgtatctgcgccgacaccgcggtcttcggccagcccgagaccggcctgggcatcacccccggcttcggcggcacccagcgtctggcccgcctggtcagccccggcatggccaagcagctgatctataccgccaagaatatcaaggctgacgaggcctaccgcatcggcctggtcaacgccgtctatcccctggacgagctgctgcccgccgccgagaagctggccgagaccatcgccaagaacgcgcctatcgccgtccgcgcctgcaagcaggccatcaacgagggccttcaggtggacatggacaaggccatcgtcatcgaggaaaagctcttcggcagctgcttccagtctgccgaccagatcgagggtatgtccgccttcctggagaagcgcaagcacgagccctatcagaacaagtaa

SEQ ID NO: 76 - DNA, 804 bp, Unknown
  Unknown gut bacteria
atgatcgaaattgagaagcctcagatcgagtgtatcgaaacacccggcgacgcttcctatggaaaatatgtgatcgaacccctggagcgcggatacggaacgaccctgggcaatgcgctgcggcgcatcctgctctccagcctccccggaactgcagccaccagcatcaaaattgccggtgtgcagcatgagttctccaccatccccggtgtgaaggaggacgtgacggagatcgttctgaacgtgaaaaatctgctgacgaagctgcacagcgacgccgtcaagaccgtgtttatcgaggcggccggaccctgcgaggtcacggctggcgatatcaagactgacggcgaggtggaggtcctgaatcccgagctgcacattgcaacgctggatgtgggcgccactctgagcatggagatcaccttgagccacggccgcggctatgtctccgccgacaagaacaaggcggcgcgacccggcgtcatcggcgtgatccccatcgacagtatctatacccccgtgtacaaggtcaactacactgtggagagcacccgtgtgggcgcttccagcgactacgataagctgacgctggaggtctggaccgacactaccatcgctgcccgcgatgcggtgtccctgggcgccaagatcctctgcgaccattttgccctgttcaccgacctgtccgacacgctgggcgataagtccaccgtggtggagaaggcgcaggactccaaggacaagatgctggagctgaccatcgaggaactggatctgtctgtacgcagcttcaactgcctcaag

SEQ ID NO: 77 - DNA, 930 bp, Unknown
  Unknown gut bacteria
atgatcaccgatatcgacgccgctttgctggaaaagatcgccgatctgaccggcaagcccgtgggcgccttcaatatccgcaaggactccggctgcgaggcccgtcagtccaccgagcacattgctatcgatccccgcagcgacggaaagtccggcattgacatccgcatcaagcccggcaccaagggtgagaaatgctacatccccgtcatcatcagccacagcggcctcagtgagctggtctataacgacttctacgtgggcgacgactgcgacgtggacattatcgccggctgcggcatccacaactccggctgtgacgaaagccgccacgacggcatccacaccttccacatcggcaaaaattccaaggtccgctatgtggaaaagcacttcggcgagaaagatcccggccagaccggcggcaacatcatgaaccccaagaccgtggtctacctgggcgagaacgccaccatgcagatggagacgatccagatccgcggcatcgactccaccaagcgcgagacggacttcttctgcgaagccggcagcgaggtggtggtcaccgagcgcctgctgacccacggcgctcaggaggccgagagcgatatgcgtatcgagctcaacggccacgacgcccgcggccgcgtcatctcccgcagcgtggcccaggaccgttcccaccagatcttccacccggtgatggtgggcaacgcccagtgcttcggccacgttcagtgcgacagcatcatcatgggcgacgcccgcatcgagtccgtcccggccatcaccgccaactgtcccgacgcccaactgatccacgaggccgccatcggcaagatcgcaggcgaccagctgctgaagctggagacgctgggcctgacgccggaggaggcggaggagacgatcctcaagggcttcctggcataa

SEQ ID NO: 78 - DNA, 615 bp, Unknown
  Unknown gut bacteria
atgaacaccattttcatcggcatcgccggcggcaccggcagcggcaagaccacgctcaccgagcacctggctgcacgcttcggcagcgacatcagtgtggtacaccacgacaactactacaagcggcaggacaggcccttcgccgagcgctgcctgcaaaactacgaccatcccgacgccttcgacaccgacctgatgatcgaggacctgaaggcgctgaagcggggcgagaccatccactgccccgtgtacgactacgccatccacaaccgtaccgacgagacggtggagatcaagcccaccaaggtggtcatcgtggagggcatcctgatcttccagaacaaggcgctgcgtgacctgttggacatcaagatctttgtggagacagacgccgacgtgcgtatcctgcgccgcgccctgcgggacgtggaggaacgcggacggtcgctggagtccgtggtaaatcagtatctgaccaccgtgaagcccatgcacgagcagttcgtagagcccacgcggaagtttgcggacatcatcgtgctggagggcggacacaacctggtggcgctggatatgatcatgcagcgcatcgccggacatatcaaggagaactga

SEQ ID NO: 79 - DNA, 825 bp, Unknown
  Unknown gut bacteria
atgtctgagaataaatttaccccccgtgcagaggaagttctgcgtttgagccaggaggctgccgaggagctgggtcacggctacgtgggctccgagcatctgctgctcggtctgatccgcgaggaggacggcgtggcgcaccgcgtgctcagtgagttcggcgtcaccgatgaaatggtctgctccgtgctgcagcgcagcgtgggcaagggcgtttccggcgccgcgcccagccagggcctgacgccccgcgccaagagcgtggtggagctggctgtgtccgaggcgtcccgcatgggcagcagcgccatcggcaccgcccatctgctgatgggcctgctccgtgagggcggtaacatgggcctgcgtatcctgcgtaccgtgggcgtggaccccaataaaatgtacagtgctgtgctgaagaagctcaacgatatgccccgggctgccgccggcggcgcctccgcccctaaccgcgaggcggacaagaagaacaagacgctggccgagtacacccgcgatctgaccgaggccgcccgcagcggcaagctggaccccgttatcggccgcgataccgagatacagcgggtcatccagattttgtcccgccgcagtaagaacaaccctgtgctcatcggcgagcccggcgtaggcaagactgccatcgccgagggcctggccgagcgcattgccgccggcgatgtgcccgaggagctgctggacaagcgcatcctgtcgctggacctcagcggtatggtggccggaaccaagtaccgcggtgagttcgaggagcgcatcaagaacaccctgaatgaggtgaagaaa

SEQ ID NO: 80 - DNA, 1038 bp, Unknown
  Unknown gut bacteria
atgaaaaagtttcttgcactgctgctggcgctcgctatgacgctggccctcgtcgcctgcggcgagaagaaggacgacaccaagacggacggcgccggtgatggcgagaagacctacaaggtcgccatgatctgcgactccagcatcaacgacggcggttggggcgctgcctgctacaacgccatggtcaaggctgctgaggacaagggctggacctacgacgtcaccgactccatctcccaggatcagtattacgagaccatcgttgccttctgcaacctgggctacgacatgatctatgctcccggcaaccagtacaccgatgcggtcctgcaggctgctgaggagtatcccgacatcgccttcgctctgctgaacggcgctgagtccacccccgaaaaggccgctaacggcaatgtcgcgtctctgctgcccaacgctgagcagatcggctggatcgccggcgctctggccggtctgatgaccgagtccggcaagctgggcttcatcggcggtatggagctggataccaccaagggcaagatcgcgggcttcgaggctgctgccaagtatgttggcgagcaggagggcaagaccgttgagctgctggctgtcccctatgccaactccttctccgatgcccctaagggcaaggagttcgccactgagctgatctcccagggcgctgacgtgttcttcggcgatgcttccgccgttgactccggtgcccgtgaggccatcgacgccgccaatgagaaggccggcgccatcaagatctacgacatcggccagcctgccgatatcctgggtcagaacccctgcatcatttgctcccaggtcaccgataacgccgctatgatcggtgtctgcatggaggctgttgtggccggtaccttcggcggcaacaccatcttcggtacgctggagaacggtgccctgtccgccggtgccatcaataccgagctggttcccgctgagaaggtggagaagtataacgcctatctgcagcagatgatggacggcaccttcatgaagtaa

SEQ ID NO: 81 - DNA, 1476 bp, Unknown
  Unknown gut bacteria
atgaagctgaaccttcgcggtcacgatgaccgctacgccatcgagcagagcctgctggcctttttcccggaggagcgcccggtatatgagggcgaggacggggacagccacgcggaggtcacactgcatgagggcaatgtatatgccaccggggtcacgacactgacctatggcggcaaaacggcgcggggcgaggcccgcgttcggaccgcaggcgtttccgacgcatacgaacgggaacgcctgcgtcagcgtgcgctgaagctgtccttcttccgggcggcccgggacgtcaccggcgtgacgcccagctggggcgcgctgacgggcatccgcccggccaagctggtgcggaccatgctggaggacggcatgacccccgcccaggcggaccgggtgctgcgggacacatactgtgtctccccggcgcggcggcgtctggcgctggagagcgccgaggcgggtctgaaggccaggagcgacctgcgccccgaggacatctctctgtacatcggcatccccttctgccccacccgctgcgcctattgcagcttcgtatcggcgtcggtggaaaaatcctttaagctgatggagccgtatctggcggcgctgacggcggaggtggaggccgcgggccgcatggtgaaggaggcaggcctgcggatcaagtcgttctacatgggcggcggcacgcccaccaccctgtccgcagggcagatggacgcgctgctgacggcggtgaaccggaatttcgacctgtccgactgcgtggaatactgcatcgaggcgggacggccggacaccatcgaccgggagaagctgcaggtgctgctggatcacggtgcggaccggatcagcgtaaatccccagtcgctggagccccgggtgctctccgccatcggccggaagcacagcccggaggatatcgaaaaggccatggagctggccacgtccatgggcttcccccatgtgaacatggacctgatcgccgggctgcccgccgacacgccggagggctttcgccggacgttggatacgtgcctgaccttcggcgcggacaacatcaccgtgcacaccctgagtctgaagaagggcagccgcatcctgctggagggcctgcctatccccgcggcggaggacgtggcggccatgctggactacgccgatccggcgctgcgggaaaagggcttcgccccctattacctctaccgccagaaatatatgtccggcagctttgagaacgtaggctggtgcatatccggggcggagggcctgtataatatctacatcatggaggagctgcacagcatcctgtccctgggcgcaggcggctccaccaagatggtggacgcaaagcggaaccgcatcgagcgcgtgttccaccccaaattcccgctggagtatatccagcggccggaaaagctgacggagaatttagaggcgttccgccgcttccatcaggagatggcgcggtga

SEQ ID NO: 82 - DNA, 1245 bp, Unknown
  Unknown gut bacteria
atggcgaaggaaatcgtggtgatcggcggcggcgccgccggtctgatggcggccatcaccgcggcccggcagggcgcggcggtgacgctgctggagcccaacgaacggctgggcaagaaggtgaatatcaccggcaagggccggtgcaatgtgaccaatgactgtgaccgggagacgctgcttgccagcattcccggtaatgggcgatttttgtacggtgcgctgacacggttcacgccgcgggacaccatggcgtttttcgaggcgctgggcgtgtcgctgaaggtggaacgggggaaccgggtgtttccggtgtctgacagtgccttcgacatcaccaacgcgctggaacgggagctgaagcgccggaaggtgcggtgggtccgtgaccgggccgtatcagtggagacggcggatggcgcggtatgcgccgtaaaaggggagaaggaaacgtaccccgcgcaggcggtcattctggccacaggcggggtgtcctatcccggcaccgggtccacgggggatggctaccgcatagcggaggcactgggacacaccattgtgccgccgcggggctctctggtgccgctggtgtgcgcgggcgaggactgtccggctatgcagggcctgagcctacggaacgtggcagtgacggtatacaacgggaagaaaaaggcagtgttccgggatttcggcgagctgctgtttacccacttcggggtgtccggaccgctggtgctgtccgccagcgcccatctgcggcgctgggagggggagcactatacgatagagatcgacctgaagccggcgctggacgagcagaagctggacgcgcgggtgctgcgggacatcggagaaaatcccaaccgggagatggggaccatcgccgcggggctggtgccccacagcatggcgccggtggtgctgcgccgggcggggctgaccggaagcgaaaaggccaacagcctgacaaaggaacagcgccgggcactggtgcaggtgctgaagcactttacgctggaacttaccgggccgcggcccgtcagtgaggcgatcgtcaccgccggcggcgtgaaggtgggagaggtaacgccaaacaccatggcgtcgaagcgggtgaggggattgttttttgccggcgaggtgctggacgtggacgcctatacggggggctttaatttacagatcgcatgggcgacggggtatctggcggggctgagcgccgcagaaagcgaggaaatgacatga

SEQ ID NO: 83 - DNA, 1071 bp, Unknown
  Unknown gut bacteria
atgcaggagaagctgagcgcccttgcggcgcatttgacagaggtggagcagcagctggcagacccggcgatgtatacggaccgggagaagctgacggcgctgcgccgggagcagaaggagctggcgccggtggtggaatgctggcaggcgtatctgcgggcgcaggataccgcccgggaggcggaggagatgctgtctgacccggaactgcgggctttggcacaggaggagctggctggggcgaagggggatatggagcgcttgcaggaggagctgaagcggctgctgctgccgcgggaccccaatgacgagaagaacgtgatactggagatacgggccggtatcggcggggaggagggtgcactattcgccgccgacctgctgcggatgtacaccatgtacgccgagcgccggggctggacgctgagcatcgtcagtgagaacatgacggagctgggcggcgtgaaggaggtcagcgccgagatcgagggcgcgggcgcctggtcgcggctgaaattcgaggctgggacacaccgggtacagcgggtgccggagacggagtcctccgggcgcatccagacctccgccgccacggtggcggtgatgccggaggcggaggaggtggagttttccatcgaccccaaggacctacagatcgacacgttccgttcctccggcgcggggggacagcacgtgaacaagacggagagcgccatacgtatcacccatctgcccacgggcgtggtggtggagtgccaggatgagcgcagccagtacaagaacaaggatcgggccatgaagatcctgcgctcgaagctgtacgaggcggagcaggagaagcagaacgctgccatcgccgccacacggaagagccaggtgggcaccggcgacagaagcggcaagatcagaacgtataatttcccgcagaaccgggtcacggatcatcggctgacgggagacaataaaaacttcaacatttcggccatcattaacggtgatccggacgacatgatcgacgcgctcaccctgaacgatcaggcacagcggctgcaggagggaaaggaaagttga

SEQ ID NO: 84 - DNA, 708 bp, Unknown
  Unknown gut bacteria
atgagcgaccggctggcactgctggaacgagcccagcagggcgatgaccgggcggaggcgcagctgctgacggagaacgcgggattgatctggtccatcgtccgtcgttacaatggttgcggtgtggagacggatgacctgtatcagttggggtgcatcggctttgtaaaggctgtaaaggggtttgacctcacatacgggacgcagttttccacctatgccgtgccgaaaatcgccggcgagatacgtcggttcctccgggatgacggtccggtaaaagtgggccgcaccatgcgggaaaaggggcagacactttgggcggcacgggaacggctgcaagggcgtctgggctgtgagccaaagctgtcacagctggcagcggagaccggcatgacaccggaggagatcgccgccgtggatctggcgctgatcgcaccggactctctgcagcaggagaccgcggagggcctgacgctggagtccacactatgtgccgaggagcccagcgtctctctggtggagcgtatcgccctgcgggacgccatcgacgcactgccggagaaagaacggaagaccattctcctgcgctttttcaaggggttgacgcaggagcagaccgcccgcatcttacaggtatcgcaggtccaggtctcgcggctggagcgccgcagcctgcaaaagctgcgggacctgctggcagaggagtga

SEQ ID NO: 85 - DNA, 762 bp, Unknown
  Unknown gut bacteria
atgatcacgctcaagtcaccccatgagatcgagctgatgcgccgggcgggcaaaattaccgcggcagcccgtgccctggcacgggatatggtaaaacccggcgtcaccacagctcagatcgacaaagcagtgttccagtttatcaaggagcagggcgcaacgccctccttcctgcactacaacggctatccggccagtgtgtgcgtcagcgtcaacgacgagatcatccacggcatccccggcaaacgggtgctgcaggagggcgacatcgtcagcgtggacgtgggggcgttcatcggcggcttccacggcgactgcgccggcacctatccctgtggtcaggtgtccgacgaggcactgcggctgatccgggtgacgcagcagagcttctttgagggcataaagtatgcccgcgagggctatcgcctgtcggatatctccgccgctgtgcaggcgtatgtggaggcaaacggcttcagcgtcgtccgggaatatgtcggccacggcatcggacaccagatgcatgaggcacccgaagtccccaattacggcaagcccggccatggaccccgtcttctgcggggtatgaccatcgccgtggagcctatggtcaacgcggggacggccgctatcaggcagatgccggatggctggacggtgaggacagccgacgggaaaaacgccgcacactacgaaaacaccgtactgatcaccgacggggagccggagcttctgacggacccggagaagtcattggtgtga

SEQ ID NO: 86 - DNA, 1347 bp, Unknown
  Unknown gut bacteria
atggaaacttacggactggaaaagctgggtatcatcaacgccaaggcggtctatcgtaatctgacccccgcacagctgaccgagcacgcgctttgccgcggcgagggtacgctgtccaacaccggcgccctggtggtcaagaccgggaaatacaccggccgcagcgccaatgacaagtttatcgtggacacccctgccgtccatgacgacatcgcctggggcaaggtgaaccgtcctatcgagaaggccaagttcgatgccatccgcgccaaggtcatcgcctatctgcagggcaaggagatctttatctttgacggctttgccggcgccgatcccaagtacaccaaggccttccgcatcgtcaacgagctggccagccagaatctctttatccaccagctcctgcgccgctccacggccgagcagctgaaggattttaaggaggattataccatcatcgccgctcccggcttcaagtgcatcccggagatcgacggcacccgcagcgaggccgccattctggtggactacgaggcccacgaggtggtgatctgcggcacccagtacgccggcgagatcaagaagtccgtcttctccgtgatgaactatgtgctgcccaagcagggcgtgttccccatgcactgctccgccaacatcggcaagaacggcgacagcgccgtgttcttcggcctgtccggcaccggcaagaccacgctgtccgccgatcccaaccgtatgctcatcggcgatgacgagcacggttgggcggacgactccgtattcaacttcgagggcggctgctacgccaagtgcatcaacctgagccccgagggtgagccggagatctacaatgccatcaagttcggcgcgctggtagagaacgtggtcatggatcccgacacccgcgagttcgacttcgacgacgactccctggccgtcaactcccgcgtgggctatcccgtggagtatatccccaacgccgagctgtccggcatgagccccagcgttcccaagacggtcatcttcctgaccgccgatgcctacggtgtgttgccccccatcagcaagctggataagaaccaggccatgtactacttcgtctccggctttacctccaaggtagccggcacggagatcggcgtcaccgagcctgtgcctaccttctccacctgcttcggcgagcccttcctgcccctggatccctctgtctatgccgccatgctggccgacaaggtggagaaggccggcgcgaaggtttatcctggtcaacaccggctggaacggtaccggcaagcgcatgaagctcagctacacccgcgctatggtcaccgccgccctcaccggtga

SEQ ID NO: 87 - DNA, 1374 bp, Unknown
  Unknown gut bacteria
atggcacaagcattctttggcggcgttcatcccaacgacatgaaggccgcaaccaatgaaaaggccatcgaaaagctggcggcgccggctgaggtggtcattcccatgtctatgcacatcggtgcgccttgcaagcctattgtagcggtaggcgacaaggttaaaattggacagaggatcggcgaacccggcggatttgtttccgcccccatccacgccagcatctccggcacggtcaaggccgtggagccccgtcccttctctatgggcggcaagatgatgtccgtggtcattgaaaacgatttccaggatgaggtctccgaggaagttaagcccgtggcggatcccgacagcctgacgcccgagcagctggtggagatcgtcaagaacgccggcatcgtcggccagggcggcgcgacgttccccacccatgtgaagatctcttccggtctgggcaaggtggactatgtgatcatcaatgccgcggagtgcgagccgtacatcaccggcgaccaccgcacctgtctggagcgtccggagcaggtcattaagggcgcgaccctgctggccaagtgtttcggcgtggataaggtgtacatcggcatcgaggccaacaagcagaacgcggctgacgtcctgaacgccaagatcgcggagctgaacgcccccgtggtggtggaggtcctgcacacccgctatccccagggcgctgagaagcagctggtccaggccgtctccggccgtcaggtgcccagcggcaagctgcctgccgacgcgggctgctgcatcttcaacctgaataccacctgcgccatctaccgcgcggtgtatgagggtatgcccgtggtcaacaagatcgtcaccgtctccggctccggcgtcatcgagcccaagaacatcgagtgccccatcggcacccccattaccaagctgtttgacgcctgcggcggcctgaaggacgagacctacaagctcatcatgggcggcccgatgatgggcctggcccagtacgacgtggacgtctccgtgggcaagggcaccggcgccatgctggccttcgccgacaaggaggagcagtacgtcgaggatccccagtgtatccgctgcggcaagtgcgtgggcgtgtgccccatccgtctggagcccattttcatgtacaagtacctgatgaagggcgacgtggacacctggcagaacgtgctgcacggcatggactgcatcgagtgcggcgcctgcacctacacctgtcctgcccgcctgcccctgacccatgcgttccgtctgggcaagcaggaggtcaacaacgcgagaatggccgccaaggccaaggcggaggccgaagcaaaggccgctgccgaaaagaaggaggcgtaa

SEQ ID NO: 88 - DNA, 1005 bp, Unknown
  Unknown gut bacteria
gtgaaggaaatgcagctgacacagaaaaaaagacagcgcacggacctgctgaccgtggcggcggtggccgcactttttgtggtgatggcggcgctgctgtataccgggcacctgacccggcaggtaacgaatatgctggtgcccgttgcggtgtacatcgtgatggcggtgtcgctgaacctggtggtgggcctgctgggcgagctgagcctgggccacgcgggcttcatgtccgtgggactgttctccgggtgtctggtggcgatcgcgctgcacaccaccgccctgccgctgggcgtgcgcctgccggtgagtatgctggcgggcggcctgatggcggcggtcttcggactgctggtgggactgccggccctgcggctgcggggcgactatctggctatcgtgacgctggcctgcggcgagatcatcaagaacatcatcacaaacctgaacatcaccggcggcgcgctgggtctggacacctcctccatctacgccggggcgaaggaccttctcccctacggcgcggtgctggtgctgctgacggtggcggtgatgctgaacctgaagcggtccaagtacggtcgggccatcatggccatccgggacaaccgcatcgcggcggagtccgtgggattgaacgtcacatggtacaagctggcggtgttcgtcatcgcagcgttcttcgcaggctgtgccggcgtgctgtacggccactcactggccaacatcaaggcggctgcctttgattacaatatgtccatcgagatcctggtcatcgtggtgctgggcggcatgggcagcgtgccgggctccgtgatctcggccatcgtgctgacggtgctgccggaggcgctgcgcgaggtggcggactaccgtatgctggtgtatgccatcgtgctgatcctggtgatgcaggccacgaacaaccccacgatgaagcggttttttgcctctgctaaggaaaaactgacccccgggcgaaaggagcgtgcggcgctgtga

SEQ ID NO: 89 - DNA, 1080 bp, Unknown
  Unknown gut bacteria
atggctttgactcttatgaagggcagcgaagcgattgcagaagccgctattcgtgccggcgctcgctttttcttcggttaccccatcactccgcaaacggagatccccgaatatatgtccgcccgtatgcccgagatcggcggctgcttcctgcaggccgagagcgaagtggcggctatcaacatggtgtatggcgctgccggtaccggcgcccgcgtcatcacctcctcctccagccccggcgtgtccctgaagcaggaaggtatctcctactgcgcaggcgccatggttcccgctgtcatcatcaacgtgatgcgcggcggccccggtctgggtaatatccaggcatcccagggcgactatttccagggtgtcaagggcggcggcaacggcgactatcacctgctgaccttcgcccccgcttctgtacaggaggccatcgacctgatgatgatcgcctatgacaaggccgaaaagtaccgtatccccgtgctgttcctggcggacggcatcatcgctcagatgatggagcccgtggagctgcccgagatggtggattacaaggtagacccggagaagaagccctgggcctgcaccggctggaagcccggcgatgatcccgctaagcgcggcattatcaattctatctacatcgataccgagagcctggctgtccacaatgacgagctgcaggccatgtacaaggaagtcgttgccaacgagcagatgtgggaaagctacaactgcgaaggcgctgagtacatcattactgccttcggcaccgtggcgcgtatcgccaagagcgctatcgccgagctgaaggaaaaaggcattaacatcggcctggtccgccccatcactgtgtggcccttcccctatgacgctgtgcgtgaggcctgctgccagcccggcgtgaaggccgttctggacgttgaactgaacgaaggccagatgctggaggacgtaaagctggccatcaatggcgccaagcacgttgacttcttcggtcattgcggcagccagatgccctctaccgacgagatcgtcaccaagatcctgagcatgaaggagggtaaataa

SEQ ID NO: 90 - DNA, 879 bp, Unknown
  Unknown gut bacteria
atgaacatccagcgcgcctatgtggagatcaccaacctctgcaacctccactgcgacttctgcgccggccaccaccggccgctgatggccatgcgtaccgacgactttgcggtggcggccaaaaagctgcgtgccgtcacgcagtatatctatctccacgttatgggcgagccgctgctccacccggagctggggaaaattttggatacctgcgcccagctggacttccgtgtctgcatcaccaccaacggcacgctcctgcccaaaaagttggatatcctgcttgcctgccccgccctgcataaggtagccgtctctctccattccttcgagggcaaccacctgaacgtgcccctggaggactacgtcaccggctgtctccgcagctgccagaagctggccgccgctggggtcaactgcaccctgcgcctgtggaacagcggcatgccccaggccctgaacccggagatcgagcgcatccttggcgagctcaccgggcagaataccgcccacctccccgaggatatgctccacaaccgccgcctggccccccgcatctacatacagaaggacgagcacttctactggcccggcgacgagaacaacgactgccccgacgacacccagtactgctacggcctgcgccgccagctgggcgtgctgtgcgacggcaccgtgatcccctgctgtctggacagcgagggccggctggccctgggcaacattttccaccagagcctggactacattctcaacacgccccgggcccagcgcatccgccgcggctttgactgccgtgagcccgccgaggccctctgccgccgctgccactacgcctcccgctttaatatacctttaccacagagcaacaaaaagtaa

SEQ ID NO: 91 - DNA, 873 bp, Unknown
  Unknown gut bacteria
ttgactttatatgggaaatactatatcctattaggtcagaagaacatggaatggaggtttcccatgaataaagcagaattgtccggcgtgtgccgtcagatgcgccgggacatcatcaacatgaccgccaacgccggcagcggtcatcccggcggctccctgtccgcggtggagctggtggccagcgtattctataaccatatgcgtatcgaccccaaaaatccgcattgggcggaccgtgaccgttttgtactcagcaagggccatgctgccccctgttactacgcggttctggcggagttgggctttatcagccgcgatgagttcaagaacttccggcagctgcacagcatcctgcagggccacccggactgcaagaaggtccccggtgtggacgcctccaccggctccctgggtcagggctgctctattgccgtgggtatggcgctgggcgccaaggtgcagggcaaggacaccaaggtgtttacgctgctgggcgacggcgagtgtcaggagggccagatctgggaggctctcatgtccgctgcccactataagctggacaacctgacggtcattatcgacaacaacgggctgcagatcgacgggcgcaacgatgaggtcatgtctctgggcgatatgcccgccaagctgcgggcctttggctttgatctgcatgagatcgacggtcatgacctggacgccattgaggcagcgctgggcgcacctgtgacgcctggcaggcccaaggctatcttggcccacacggtcaagggtaagggcgtatccttcatggaaggccaggtgggctggcacggcaaggcgcccaacgaggaacagcggcagcaggcattgaaggaattggaggactga

SEQ ID NO: 92 - DNA, 1950 bp, Unknown
  Unknown gut bacteria
atgcccattgcaaaaatgaagcgcctgcaggtgctggcgctggagcgggaccacgacgcgctgctgcggcagctggagcgtatgggctgcgtggagatcagtgagccggacgcgccggatgcgccggagagcctgcggcgctgcgacagcgagacggcggactgcctggcccgccagcggcaggtacagacggcgatcgatgccctgcggcgggctgcgccgcccaagaaagcgccgctgctggcgccccgccccgccatcggcgagacggaatacctgagcgagacggggctggccgacgggctggcgctggcccgccaggtcaacgaggcgacgggacaattacagcagctgacggcgctggccgcccagctggagaccgaccggatcaccctggggccctggctgagtctggacctgcccctggagctgacggagacacgctgctgcgacgtgaccctgggcgtactgccgcccttcgtcccctgggacgaactgtgtgggcaggtacaaaacgaatatccggagagcgagctgcatctgctctccgccgaccggcagcagcagtgcgtgctgctcatcacccacaaggcagcgacggcaccggtgctggagctgctgcggggccggggcttcgcagcctcacccctgaagggccgcaccggcacgccggaggaaaaccggcggcgggacacagaccggctggcagaggtcaagaggcagcaggaggccctgcgaaagcatctggatgagctggcggaacggctgccggagctgtatctgtgcgccgaccggctggccgcccgcccgccacgggggggaaaccgccgcagactgctgaacgacgggtgcatcgtggcattcgacggctgggtgccggagaaaaagacggcaaggctgacggcgtatctggacacggcggactgcgactacaccctgtccgatcccacgacggagcagataccggaggtgccggtgctgctggaggacaacgcggtggcgcggtccatgaactgcatcaccgagcagtactccctgccggcctacgacggcgtggaccccaacccggtgatggcaccgttcttcatcctgtttttcggcatgatgatggcggacatcggctacgggctgctgatgctcctcggctcatggctgttcctgaagaaaaaacggccggacgaccgcagctttatggagatgatcttctggtgcggcgtgaccaccgtggtcttcggcgccatgaccggcagcttcttcggcgacttcctgccgcagctcttcaagttctttgacccggagatcacctttgccctgccggtgctgttctcacccctggacgacaccatggccatcatggtgggctcgctgatcctgggcgccttgcaggtgttcaccggcatgaccgtcagcgtggtggaaaaatgcaaaaagggctgctttatggatgccctgtttgacgagatcacctggtggatcattctggcgggcacgggtcttgcggtgcttggcatcggcagtgtatccggcgtgccggtggtgctgatcgcgggcgttcttatgctggtatacggcgcgggccggggcaaaaagggcttcggcaaggtgacgggcttcgtggcggcggtgtacaacggcgtgacgggtttcttcagcgatatcctgtcctacgtccggctgatggcgctgatgctgtccggcgcagtgctggcccaggtgttcaatatgctgggcgccaccaccggcaacgtggtcaccttcatcatcatcgcattcgtcggcaatatgctgaacctggcgctgaacctgctgggctgctacgtccacgatatgcgcctgcaatttctggaatttttcggacgcttctacaaggacggcggcaaggcctaccgtcccctgcgcgtccgggccaaacacgtagagatcattaaggaggatactaaatcatgttag

SEQ ID NO: 93 - DNA, 579 bp, Unknown
  Unknown gut bacteria
atgcgaaaatgtgtgctgccgctgttgctgtgtgcggtgctgctgtgcggctgcggcggtgagaagagtctgacggtgcaggaccagtaccggacggtggtatcggcggacatggaggcggaggtggtcagccgtacggccagcgatgaccgcaccttcaccctgacgtgccgatatgaccgggcggggcagtctgtcaccacggtaacggcgccggaggcgctgaagggcctgaccgccgtgctggcggacggacagctgtcgctgaagagccgtgaccagttgctgccggcaggggatgccacggatatctgcccggccaactgtctgccagagctgctgcgaacactggcggagggctatctgaaggagcagggcacggagccgttggaggacacgccatgcctgcgcctgacgctggagaccaccgggcaaagcggcgcggcggtgctatgcagcgtgtggctggacgagagcagcctgatcccgcggtatgcggagttttcacagaacggaaatgtggtgctgacggtgcgaatgatatcctttgcctgcaccacgggagatacggaggcgtaa

SEQ ID NO: 94 - DNA, 708 bp, Unknown
  Unknown gut bacteria
atgaagattaaagacaaagtcctgatcgtggaggatgagcagtccatcagcaactttatctccatgatcctcaccgccaacggcttcgacaccatcattgtccgcaccggcgaggaggccctgaccatgatcgcctcccattgcccggacatgatcgtcctggacctgggcctgcccgacatggacggcatggaggtgctgaaatctgtccgcaagtggtccaatctgccggtggtggtggtttctgcccgcaaccacgagcacgacaaggtggaggccctggattacggcgctgacgactatctggtcaagcccttcgggacctccgaactgctggcccgcatccgcaccgccatccgccacacccgcaccaccctttccaatacccagatcgcccagtccggcaagttcgtcaccggcgatctgaccatcgactacgataagcaccaggtgctgatgaacggcgagaacgccggattgaccgtcaatgaatacaagatcgtggccctgctgggcaagtacgccggcaaggtcctgacctacgacttcattatccgggagctgtgggggcccaaggccaagaccgacaatcagatcctccgggtaaatatggccaacatccgccgcaagatcgagcctacccccggcaacccccagtatattttcaccgaggtgggcgtcggctaccgtatgcgcgagggagactga

SEQ ID NO: 95 - DNA, 612 bp, Unknown
  Unknown gut bacteria
gtgtactatatctcacgagaggaagtggtggtcatgcagcagctgaaggagcgtatcctgcgggagggccgcgtcctgcccggcaacatcatcaaggtggacggttttttgaaccatcgcgtcgacacggcgctgatgcgggatctggcggacgagtttgccaagtattttgacgtaaaaaatatcacgatggtgcttacggcagaggccagcggtattgcgctggcgacgatctgcgccgaacggtatggtgtacccatggtctttgccaagaaggccaagagcgacaacatcgagggcggtctgtaccagagtgatattttttcttacacctacaagaaaaaggtcacactgctggtgagccaggactggatcaccaaggacgacaaggtcctcatcattgacgacttcatggccaagggctacgccatgcgcggcctgatcgacatcgtgaacaaggccggcgcgcagctggcgggcatcggcgtggcggtggagaagggctttcaggacggcggcgacagcctgcgccgggagggctatcccatcaaatccctggccgttatcgacagcgccgagaacggcgtgatccgcttccgggaggacgactga

SEQ ID NO: 96 - DNA, 891 bp, Unknown
  Unknown gut bacteria
atgcgtgttctgacccataccgtcattgaagcggaggctggtcagcctgtaaaacagctgctgctgcacctgtggggcatctccggcagctttctcagtcggttgaaattccggcaggccatcaccgtcaatggtgcgcccgtcaccgtacgcttcgtgccgtgccccggagatgtgctggcggcggacatatccgatctgccgggagaacacccacacatccggccggtggacttccctctggatatcctgtacgaggatgaggacctgctgcttatcaacaagcccgccggcattgccgtgcatccggcggcgctgacagaggaaacagccaccattgccggcgctgcggcacactatctgcatagtgagagcttccatgcggtgaaccggctggaccgcggcactaccggcgttatggccgtggcaaagaccggcttcatccatgcccgatgtatggccatgctgcacacggacgatttccggcgggagtaccgggccgtgtgcgagggcatcccctccccggcagagggcgacattgatctgcccataggacgcgctgagagctcgctgctgaagcggcaggccgaccccctgggtcaacccgcccacacccactacgaggtgctggcggcctctcatggccgtgcgctgctgcgcctgacgcctaccaccggacgcacgcatcagctgcgggtccacatggccgccatcggccacccgctgaccggtgactggctctacggcacagaggaccgggccctgatcgcccgcccggcgctgcacagctatcacctgcggatgatgcatcccctcaccggcacaaccatcgatgcgaccgcgcccctgccggaggatatacagcgactgttgaaggaggaacgtctatga

SEQ ID NO: 97 - DNA, 885 bp, Unknown
  Unknown gut bacteria
atgaagcacgattttaaatttttcgtcaaagaaggcgcgggcaatatgttctcccacgggttcatgtccttcgccgccatcggcgttaccgtggcgtgcctgctcattatgggcacattcacgctggtggcctacaatgccaacgaaaacctggcggatctacagcaggagaacgccatcgtggccttcgtggacgagacgctgaaggagagcgaggcccgggccctgcaaacgcagatcgagagcacggagaacgtggctgattgtaccttcgtctcacggacggaggcccgggacgcctacgtggagaagtacgatgacggcggtgtgtacggcgacctggacgccacggtgttccgccatcggtttgtgatacacgtcacggatccgaaccgaatcatggagacaaagaccgcagtggacaatatccccggcattgccaaggcccgcgctgacgaggctgtggccaacggctttaccacagtccgcaacgtggccggcgtcatctctgtcgcgctgatcgccatactgctgctggtgtcggtgttcatcatcagcaacaccatcaagctgacgacattcgaccggcgggacgagatcgccattatgaaaatggtgggcgcgaccaacggctttatccgctggccctttgtgtatgagggactgctgctgggcctgttcagcgcggtgatcgcctttggcctgcaatgggggctgtatgccgccgtggcgcagggaattgccaactctgacagcctgcagatactgaacgtggtgccgtttacgagaatatggcagtttgtggccctggtgttcctgggcacgggtattctggtaggtgtgggcggcagcctgaccgccatacgccggttcctccgggtgtaa

SEQ ID NO: 98 - DNA, 1056 bp, Unknown
  Unknown gut bacteria
atgaaaaagttttttgctctgctgctggcgctggtcatggcgctcggcctgctggccggctgcggtgacaagaccgatggcgacaataccggcgacaccgacggcgcgaagaagatcgagaccctgaaggtcgcgttcgtgccctcccgcgagccggaggagatcattaccgttaccgagcccctgaagcagatgctgaaggacgagctggccaagcagggctacgaggtgggcgacgtggagatcactgtcggcaccacctatgaggccgtgggcgagggccttgaggccggcaccatcgacgtgggtctgatccccggcggcacctatgtgctgtatgacgacggcgccgaggtcattctgaccgctacccgcgacggcttgagcaaggactccgacaacgccaaggactggaatgacggccagcccaccgaggcttccgacaagcaggccgtttcctaccgcgccctgttcatcgccggcccctctgacaagggccaggagctggtgaagaaggtcaacgccggcgaagagctgacctgggaggacctggacagcgccaactggagcgtcatgggcacctcttcccccgccggctacatctatcccgccctgtggctgcaggatcactacggcaagggcatctctgacctgaagagcgccgtgcagtccgactcctacgccagcgcctttgcccgtctggcctccggccaggtggacgtgctggtgacctatgccgacgcgcgccgcgactatgccgagcgctggaacaccgagttcagccgcgagggctccatctgggaggagactggcgtgatcggcgtgaccgcccccatctacaacgacaccatctccgtcagcaagaactccgagatcatggacgctgacctgatcgccgcgctgcagcaggcgttcatcaacatcggcaacaccgatgccggtaaggaagtcatcgctatctacagccacaacggctatcaggtggcacaggcttccgattacgacaacgagcgcgccgcgcagaagctcatccaggagctgtctgccgccaactaa

SEQ ID NO: 99 - DNA, 1494 bp, Unknown
  Unknown gut bacteria
atgagtgaagtaaagaccccgtggaaggactatatgggcgatgtgcccatgcacctggattatttccagggcagtatgttcgaggccgtggagcgcatggccgagctgtatcccaacaacatcgcctttgatttcatgggcaagtccaccacctataaaaagatggtgcaggagatcgagaagtgcgccaagagcctgaagaccctgggcgtgcggcccggcgacaaggtgaccatcgccatgcccaactgcccccaggccatctatatgttctacgcggtgaacctggtgggcggcatcgccaacatgatccaccccctgtcggcggagaaggagatcgagttctatctgaacgcctccgagtccaccacggccatcacgctggatcagttctacgacaagttcgagcacatccggcagaacaccggcatcatcaacatcatcatcgcctccgtaaaggacgcgctgagccgcaccatccgggcgggctatatgctcaccgaggggcggaagatccagaagatccccgaggacgcgccggtcatccggtggaaggaatttatggatatgtcccggtactgcttctacaagaactaccgggtggagcgaggctacaacgattccgcggtcattctgtactccggcggcaccactggcaccacaaagggcatcgtgctgaccaacggcaacttcaacgcactgggccagcagatcatcgccaccaaccccatgttccggcccggcgaccggatgctggcggccatgcccctgttccacggcttcggtctgggcgtgtgcgtgcactccatgctgagccagggcggacggtgcatcctcatcccacggttcaccgccaagagctatgccaagcagatcgtgaagtataagtgtaactttatcgccggcgtgcccacgctgtatgaggcgctgctgcgcctgcccagcatggacggcgcggacctgagcagtctgaagggcgtgttctccggcggcgacagcctgtccattgagctgaagaagaaatttgacaagttcctgtacgatcaccacgcggtcattcaggtccgcgagggctacggcaccaccgagacggtgacggcctgctgcctgacgcccaccaacatctacaaggagggctccatcggcctgcccttccccgacacctatatcaagatcgtggagccggacaccgacaaggaggtgccctacggcaccgagggcgagatactgctggcgggtcccaccgtcatgaaggagtacatgaacaaccccgaggagacggcccgcaccctgcggaagcatgacgacggtttgacctgggtgtacaccggcgacctgggcaccatggacgaccagggcttcatctacttcaagggccgcgccaagcggatgatcatcacctccggctacaacgtctatcccggccagctggagaacattctggacgcccatgaggacgtgcagatgagctgcatcatcggcgtgcccgatccc

SEQ ID NO: 100 - DNA, 1197 bp, Unknown
  Unknown gut bacteria
atgcgcgccgtgcgggggaaaatgcgagggaagggaggtgccgccatgctgcgacggatacgggagctttttaacgacgtgttccgacaggccgatcttgtcctgctggcgctgtgcatcggcacgtcgctgttcggcatactgatgatcgccagcgccacacactatatgcacacaagcaagctggtgctggtacaggcggcggcgctgtgcatcggggcggtgctgtatatcgtggtgtcgcaggtggacctgaacgagctggcgaagtactggaagtggatattcctggtgggcgtggtgttcatcctgctgctggcaacgcccctcggcattgccggggataccggcaacaaggcatggctggagttcccgttcctgccggtgaaggtgcagccggcggagatcgtgaagctgacgtttattatcgtgctggcgaaacagctctcgtggctgaaggaaaaccgggacctgcggtcgatttcctccatcgtcatgctggcggcacacttcggcgtgatctttgcgctgtactacaagatatcctccgacatgggcagtgcgctggtgttcctgttcatcttcgcgtgtatgtgttttgtggcgggggtggcgctgcggtggttcctgatcggcggcggcgcggcgggactgctgttctacgccatgtgggacctggacctgctggatacctacatgaaaaaccggttcatcgtcctgttcgaccacagctatgacccgctgaacaccggctggcagcagacccggagcctgctgacactgggcggcggaaggatattcgggcaggggctgtttcgcggcacgcagacccaaagcgaggcggcatccagcctgccgcaccggcacacggattttattttctccgtgatcggtgaggagctggggctggtgggctgcctgctgacgctggcgctgctgacagccattatactgcggtgcctgtatgtggcgcggcacgccaagacccggctggagggctatgcctgcatcggtgtggccagtgtcattatctttcaggtcatcatcaatgtgggtatgtgcctgttcgtgatgccggtcatcggactgacgctgcccttcatcagctacggcggctcgtcgctggtgatgctgtttgcctgtatggggctggtgtccggcgtacacgggcgggcgaagcccgactggctgcgatag

SEQ ID NO: 101 - DNA, 696 bp, Unknown
  Unknown gut bacteria
atgctcatacacggcctgcaaaagctgacgctcctggattaccccggcaaggtagcctgcaccgtattcacagggggctgtaatttccgctgtcccttctgccacaacgcgagccttgtattaaggccagacgagggcgagcacatccctgaggaagagcttttcgccctgcttaaaaagcggcagggcgtgcttgagggagtatgcataaccggcggcgaacccaccctggccttcggtctggagacgctgatggcaaggataaaggagatgggctatcttgtcaagctggataccaacggcacccggccaaaggccgtaaagcggataatagacgcgggccttgcggacatgatagccatggacataaaaaacagctatgaaaaataccccgagacctgcggcatatccggctatgacacggcgccgataagggaaagcatacagctcataatgtcctccggcatagactacgaattccgcacaacggtaatgcgggaattccacacccccgatgatatccgcgccatagcgaaggaaattcaggccgcaaagggctacttccttcaggcctaccgggattccggcgacatactgaagggcggctgctcccgccccacggacggcgagctgcacgcgctgctttcagccgcaagggaatacctccccaatgcggagctgagaggtgtggaatag

SEQ ID NO: 102 - DNA, 723 bp, Unknown
  Unknown gut bacteria
atgaagatgagtagcctgcttgaaatacgcgatcttaaagtaaactacggcggcatagaggcgctgaagggcgtttccttcgacgtgaaggagggggagatagtcaccctcataggcgcgaacggcgcgggcaaatccaccacgctgcgggccataatgagcgtcgtcaaccccgcctccggagccatcagctacgagggcaaggacatcaccaacgccgccacacacgatatagttcagcgcggcatagagctggtgcctgagggccgccgggtgttcccgaaccttaccgtccttgaaaacctgcgcataggagcctatctccgggaggacaaggacgccatagagcacgacatagaacacgtgtacagcctgttcccaaggctgaaggagcgccactggcagcaggccggcaccccctccggcggcgagcagcagatgctggccgttggccgcgcgctcatggcaaagccaaaggttatgatgatggacgaacccagccttggccttgcgcctctggtggtaaaggatatattctccataatccgccgcatcaatgacgacggcgtgaccgtcctcctcatagagcagaacgccaacgcggcgttgaagatagccgaccggggctacgtcctccagaccggcaacgtgaccatgaccggcaccggcatggagctgctcaacgacgagagcataaaagaggcctacctcggaaagaaataa

SEQ ID NO: 103 - DNA, 477 bp, Unknown
  Unknown gut bacteria
atggaattcacccactttaaccatcagggccgggcccgcatggtagacgtgtccgaaaaggcggataccctccgcaccgccacagccagagcccgcgtgcttctcaatgccgatacctacgcactcgtaaagtccggcggcataaaaaagggggatgtgctcaccaccgcacagatagccggcataatgggcgcaaaacgcaccccggacgttatacccatgtgccatcccatagccctgaccggcgcagacatatgctttgagctggacgacgaaaaccacacaatagacatattcgccacgacgaaatgcaccggccccacaggcgttgagatggaggccatgacggcagcaagcatagccgccctgacagtttacgatatgtgcaaggcggcgcagcgggatataattattgaaagcatttgcctattgcgcaaggcggggggaaaatccggtgagttcaggaggaaggaataa

SEQ ID NO: 104 - DNA, 1056 bp, Unknown
  Unknown gut bacteria
atggcggatatactgaacaatatgatacccgtaaagcgcgccggaaggcagacggtgctgttttccaaccctccggcgataataagctcggctaccgttgtaggcccaatggagggcaagggaccgctggggccatactttgatatggtgctcaaggacgatacctggggcgaggacagctgggagaaggcggaacgcaaaatgttcgagcacactgtaaggggggcgatggacaaggtgaacctccaaagcggcggcgtggactgcctgctgggcggcgaccttctgaaccagataatctccgcaaactttgcggccagagaactgaaattaccgttcttaggcctgtatggcgcctgctctaccatggcggaatcactcctaataggtactatgctcatagacggagggtatgccggcagggtggcctgcatagctaccagccatttttccaccgccgaaaggcagtaccgcaaccctctggagatgggtggccagactacgccgacggcacagcgcacagtgaccggcgcaggctgcagcatagccgcaaatccgactctggaaggcgacagactgtatggcaatgtatttgtaactgcgggtacgataggcaaggttacggatctcggcatcaccgatgtcaacaatatgggagctgcaatggcgcctgcagcggtggacacgctgacagcgcaccttagcgataccggcaggggagtaatggactatgatttgatagtgaccggcgacctcggaagattcggcagcgagatgttcagggagctgtgcctgcaaaacggaatagacgtgggcaacaggcaccttgactgcggcaacctgatattctccggggagcagaaggtggactgcggaggcagcggctgcggctgctgtgcaagcgtgcttaacgcatacctgcttgagcgcatagaaaagggcgatctgaggcgcatattcttcatggcgacgggggcgctgctgagccctaccagcagcatgcagaacgacagcatacccggcatagcccacggtatagtgctggaaaggaagtaa

SEQ ID NO: 105 - DNA, 2667 bp, Unknown
  Unknown gut bacteria
ctgtcaacaggcagggcggtattgctggttgcgccaaacgaggtggcggcggtaaagctgcatgacgacatcgcctgctatgatataccctgcgcccacttcccgaccagggagatacccctgtccggcaagggctttgccgcccgtgacagcatagaggaacgaagggtagcggtgctgtctgcacttgccgccggcaagaccatgacggtggtgacatgcatacaggcgctgatgcagcgcaccgtggccccggagataatcaaaaccagcctgcacagctatgaggcggggcagaccatagaaccacgggatatggtatcggagcttgttatggcgggctatgagagggttgacgtatgcgaggcgccgggacaggtatgcctccgcggcggctatgttgacgtatatcctatcgccgctgaaaatcctgtgcgtatagagttttttggcgatgagatagatacgctcaggatatacgatccgcttacacagcgctctgtggataatgtggaccacatagacgtccctccggctaccgagatgcccataacagacgaggcaagagcgcgagcgctgaagcttctcaaaaagcgcaaggcggaggaactggcctcggcgctggaggaggggggcaggccggataattcagttgccctgctgcctctgttttaccccggggaagcgacgcttttcgattacatagacaaggactggataatactcatagacgagccggcccgccttgaggaaagcggaaagatagcctatcaggagttcctcgagggcgtatcctcgcttatgcaggcgggagagatacagccggagcaggccaaccttacggtatcccctcttgaaaccatcaagcgcatggataccagaaggaccgccatgatgttcgccctgacccgcagctacggccttatagggcagaggtgcatattcagattcgatacccggccggtttcgagatacgtaggccgggaggagctgctggccgaggatatagaggcgtggaaaaagagccatacgagcgttctgatatacgccggtacccacgccaaaaggcttcaggacagactgctggattcaaaccacatagtacctataaaggaaaagctggaccgggacattgtgccgggcgaggtgctgataatagagcagcagctgaaccacggcttcgagtacccggagctttcccttgcggtagtcacggaaaacgagctttacggagccgaaaaccgaaggcctgcggacaataagaaaaagcgcaggaagccgcagctggtgttcagcgagctgaacgtgggcgaccttgtggtccatgagcttcatggcataggtcggttcgtaggcgttgagacgctcacggtaggcggcgtacagaaggattatctgcatcttgtctattccggcggcgataagctgtacatacctacggaccagctggaccgggtgcagaagtacatcggcggcggagatgatgagggtacgcagcgcctttcaaagctgggcagcggcgaatggcagaaaaccgtatccaggacccgcgacagcgtaaagaagctggccttcgaccttgtgcgcctttacggcgagaggcagaaacgcaaaggctttaagttttcgccggataccccttggcagagaaagctggaggatagctttccgtatgagcctacgccggatcagctcacaagcattcaggagataaaggcggacatggagagcgacaaggtgatggaccgcctgctctgcggcgatgtggggtatggtaagaccgaagtagcgctcagggctgcctttaaggcagtgatggacggcaagcagtgcgcaatgcttgtgcctacaactatacttgcccagcagcattataatacgatagccgccaggttcgacggtttccccgtgaaggtggagcttctctcccgctttaagacccccaaggaggaggaaaagataatcgaggggctgcaaagcggcagcgtggacatggtggtgggcacccataagctgctctcaaagagcgtaaagttcaaggatctgggcctgctgataatagacgaggagcagcgcttcggcgtaggccataaggagcagataaagaacatacgccagtccgtggacgtgctgacgctttccgccacgcctatcccgcggacgctgcacatgtccatgacgggcatacgcgatatgtccgtgatagagacgccgccctcccagcgctatcccgtgcagacgtatgtaatggaatacagcgattctgtaatccgtgaggccatactgaaggagattggacgcggcgggcaggtatacttcgtatataacaacgtccgcagtatggagcagttcgcaggaaggctcagggagctggtgccggaggccagagtgtgctttgctaacgggcagatgaacgagcgggtgcttgaaaagaccatgctggaattcatggatcacaagtacgacgttttgctttgcagcaccataatagagagcggactggatatgcagaacgtgaacacgataataatatacgacgcggacgccatgggcctatcccagctttatcagctcaggggccgcgtgggccgcggggtgcggctcggctatgcctatctgacatacaggccgaacaaggccatgagcgagactgcggaaaagcgcctt

SEQ ID NO: 106 - DNA, 1113 bp, Unknown
  Unknown gut bacteria
cccaagggcatggtgctgcgcagcaccctgctcgaatactggcgcgaggtgcataaacgatacggctatgtggaaatctccactcctataattctcaatcaggagctgtggcacaggagcggccactgggatcactacaaggacaacatgtacaccaccgtaatagacggcgaggattatgcgataaagcccatgaactgccccggcggcatgctggtctacaagcttgagccccattcctaccgcgagctgcccctgcgcatggctgagctcggcctcgtacaccgccatgagctttccggcgcgctccacggtctgttccgcgttcgctgcttcacccaggacgatgcccacatcttcatgacctgggatcaaatggagcatgagatacagaacgtcgttcgtctgttcgacgaagtttactccaccttcggcctgacctatcagatcgaggtttccaccatgccggaggatcatatcggcgataaggagacctgggattttgccaccgataccctcaagaaggccatagagcatatgggcaagagctacgtcataaacgagggcgacggcgccttctacggccccaagcttgacttccatctttccgactccctgggccgtacctggcagtgcggcactatccagctggatatgcagatgcccgaaagatttgatcttgaatacgtaggcgaggacggccaaaagcaccgtcccgtaatgatacaccgcgtcgtattgggctccatcgagcgcttcataggcgttatcaccgagcacttcgcaggcgcgttccccacctggctggctcccgtacaggtgaaggtgctgccccttaccgaccgtaccgcccagatatgcgacaatatcgcttccgagcttgacgagcttggtctgcgtgtagaagttgatcaccgtaacgaaaagctgggctataagatccgcgaagcacagctccagcgtatcccctatatgctggtcgtaggcgaccgcgacgttgaaaacggcgttgtatccgtccgctcccgcaagggcggcgacctgggcgcaatgactctcgacgccttcaaggaaaagatactggaagaagtaaagaccagagcccgtgactga

SEQ ID NO: 107 - DNA, 1641 bp, Unknown
  Unknown gut bacteria
atggaagagatacgcgcgccaaagaactttatcgaggaattcatcgaagaggacataaaggaaaagggacttacccacatacagacccgcttcccgccggagcccaacggctacctgcacataggccacgcaaaggcgctggccatcgacttcaccatggctgaaaagttcggcggcagctgcaacctgcgctacgacgacaccaaccccaccaaggaggacgaggaattcgtggacgccatacaggaggacatagcctggctgggcttccactgggacaacgtattttacgggagcgactacttcgaagagtgctatgagctggcggtgaagctcatcaaaaaggtcgtggcctacgtgtgcgacctttcaaaggacgagatgagggaataccggggaacccttaccgagccgggcaggaactccccctggcgggacaggagcgtcgaagaaaacctcgacctgttccagcgcatgaaggacggcgaattccctgacggcagcaggacgctgcgcgccaagatagacatggcgtcgcccaatctcaatatgcgcgatcccgccatgtacaggataatacacatgacccatcaccatcagggggacaagtggtgcatctaccccatgtacgacttcgcccatcccatacaggacgcaatagagggcgttacccactccctctgctcccttgagtacgaggcccacaggccgctgtataactgggtcatagagcagtgcgaattcgagcacaagccgaggcagatagagttcgcccggctgaacctgaccaataccataatgagcaagcgctacctccgccggctggtggaggaaaagtacgtcgccggctgggacgacccccgcatgccgaccctgtgcgcgctcaggcgcaggggatataccccggagtccatactggacttcctgaatcgggtaggcgtggccaaggcggattccgtggttgagacagccatgctcgaacactgcgtaagggaggaccttaacgcccacgccccccgcatgatggccatactcgaccccctgaagctcatcgttgagaactggccggaaggcaaaaccgaggaggtggaggtggagtacctgcccgactgctccacaggcaagcgcagggtaagcttcggccgggagctttacatagagcgggaggatttcaactgcaacgcccccaagaagtatttccggctcaagcccgaatgcgaggtgcgtctcaagggcgcatacgtggtcaggtgttcccactgggacacagacgaaaacggcaatgtcaccacggtatactgcacctacgaccccgcgacaaggggcggggagtgcgagagaaagataaagggcaccatacactggctcaacgccaaggacgcgaagcccgccgagatacgcctttacgaggacctgctgctgcctgaggcggagggcgaggagaaggaatttacggagcggctcaatcccaattcgctgacagtcgtcaacgctctggtggagcccgagcttgcccaaaaggagccgggctaccgctgccagttcatgcgcaccggctacttctgcgccgaccttgactatactggggagcgccccgtgttcaacaggatagtcggcctcaaggacagctttaaggcataa

SEQ ID NO: 108 - DNA, 3201 bp, Unknown
  Unknown gut bacteria
gatttctccgtgacaaagctggacggcgctcccgcaggtgaagtacaggacttttattattacaataatgcaaacgcaaacagtgaaagcggcagccacaacgtgaatgagcttcacggcggcgccatgctccttgccgtgctgctaagcggcgtgctcggcgccatatgctacaggaagggcatactcaaaaagcccgagcccgatggggaaggcgtcaatgtctgcacgctgctcgtgctggcgtttcttatgcgctgcctgctgtcgctggtattttacggccacagcacggacataaactgctttatggcatggagctaccaccttgccgaggacggattggcgaacttctataacagcggtatgttcgcggattatccgcctgggtatatgtacatactctggcttaccggcagcatagccagagcgctcggccttgaatacggcggcgcgggatatgtgctgataaccaagatgccaagcatactggcagatatattcgctgcgtatatgacctataagctggcgaggaataagctgacagggagccagtcgacgcttttgtgctgcatagtggcgttcaacccggctatggcgttcatatccggcgcctgggggcaggtggacatgatacctgccataatgctgctgggcgtgatatatctatttgatagcggcaaactggagcttgcgggccttctttacggagcggctatcataaccaagccacagtctctcatgatagggccgctgcttgcggtggcatacttcgcgaaggtgtacgataagggctggaggtatgcccttcgtacattggcggcggtagcgttggctgtaatggccatattcgctctggcatggccgttcaagggggcgcagcagccgctgtggttcatggacaagctgctgggtaccgccacgtcctacccctatgcaagcgtagaagccttcaacatgccggcgctgctggggggcaactgggcagatgtgaacgcaccgctgctgggcctgacctatggcaaatgggggagcattatgatagcgctctcatgcatagccgcagccgcaggatacataaggtcacgggataaaaaatacagcctcactctgtctggggcgctgctgctctccggtatattcaccttcggccagtatatgcatgagagatatattttcccggtgctgccgctgctcattgcggctttcctgctgggcggggacaggggggtgataaagacgtatgtgatatatacctgcgctctgctgctaaacgtccttgccgcctttgtggtggtgaaaagcgcagcgctcaggggcgctgagtataatgtgataactctgataggctctgtgataaacctgatggcctttgcaagcatgattactgcctattggagcatgactgtaaggcgggagatatatcccgcatattgtgaggaaagaatggaaaagacggacggaaccgtatatgaaatacagggtgatacgcctgtcgttaccgtgagggacaggctgtactgctttgccctgacgctggtgtacgccataatcgccctgacgaacctcggcacaacgcaggcgcctgagaattactggataggcagcgttggtgatacggcggccataacccttgaaagccctgaagagataagcgagataaggatattcggcggaatatatgagggaagggcaactctttccttcagcgacgggcagagcatagaatacgttcaggagaacgacgatatgttccgctggataaccgtgagtggcgatgacgcggtttataccgataagataggcatagaggtaacggagggcagggtatggataaatgagatcgccctgttcgacggcgacggcaatataataaaatccgctgcgtccgaaggggcggaggctcttgtgaacgagcctgaggagataccggcaactccttcttacctgaacggaatgtactttgacgaactgtaccacggccgcacggcctacgaacacctgcacggcatagccccatacgagaactctcatccgccgctcggcaagatattcatcatgctgggaattgccatattcggcatgaacgccttcggctggcgaataataggaacgctgttcggaatagccatggtaccgataatgtacgccttcggcaaaaagctgttccgccgcagcgactatgcgctgctttccgccggcctgttcaccttcgacttcatgcactttacccagacccgcatagccaccattgacgtatacggggtatttttcataatactcatgtactacttcatgtatgactattactgcatgaacttctttgacgacggcctgaaggccacattgaagccccttgccatagccggcctgttctttggcctgggcgccgcaagcaagtggatatgcatatacgcaggcggcggcctcgcggtgatactatttacctcgctgggccagagatacgccgagtacaggcgcttcaaaaacgcccccggcaaggcggagcgccgcagggtgcagggcttctggcggaataccctaatgacgctgctttggtgctgtgtattctatatcgcggtgcctgtggtgatatatctgctgtcctacataccctatgtgctctgtgagaatcattacgggctcagcggtatatgggacttccagaaattcatgttcaactatcacagcggtcttaccgctacccatccatacgaatccccatggtggcagtggccccttgaccttaggccggtgtggtattacataagctacagggttccggaggggatgacttctaccatatccgcctttggcaacccggcggtagggtgggtgtgctcagcctgcaccggaatactctgcgcgcggctgatcgcgggcaggtctaagccggacaagggcatatttgtgctgctgatcggtttgggggcgaattacctgccctgggtgctggtaattcgctgcaccttcgcctatcacttttttgccagcgttccgtttatcgtattcataaccgtatggctgatacgtgaatttgacgagcggcaccctaaactgcgtcggatgaaatgggcgtatctgggccttgtggtgctgctgttcgcgctgttctacccggtgatatccggcgcgcctgcaagcatcggatacgtaagggcctttgagtggctgcccggctggacatttatggggtattga

SEQ ID NO: 109 - DNA, 1146 bp, Unknown
  Unknown gut bacteria
atggaaatcaccgttcaagagcttgctgctctcgaccccaagggatacgtgctgctggatatgcgtggttccgaggccagggagtacgggtcaatacccggctccgttggagtttccccggaggagctgtcccggtataacggcgataggggcaaaagggtgataatatactgtgcccgcggacaggtcagccttgacgcggccatagccctgcgggagagaagctatgacgcatacagcctctccggcggctatctcgcctggctgcaggacgagatggaacagcaggaggcggcagcgctgtgccgtcaggtcgaggaaagcattcgcaagcgcttccacagcaaaatctggtgctgcttcacccgggccatacgggagtatgagcttgtaaaagagggggacaggatcgccgtgtgcatatccggcggcaaggactccatgctcatggcaaagctctttcaggagttaaagctccacaacaagttccccttcgaggtggagtttctggtgatggatccgggctacagcccggagaaccgccgcgtaatagaggaaaacgccagaaagctcaacatacccatacacatattcgaatcaaacatattcgagtcggtttaccatgttgaaaagtccccctgctacctctgcgccagaatgcgcagggggtatctctaccgctacgcacaggagctgggctgcaacaagatagcattgggccaccactatgacgacgttatagagactatactcatgggtatgctgtggggggcgcaggtgcagaccatgatgcccaagctccacagcacaaacttcgagggcatggagcttatacgccccctttactacgtccgggaggacgccatcaaggcgtggcgggactgcaacggcctgcactttatacagtgcgcctgcaagttcacggacacctgtaccacctgcacaaataatgagacaaagtccaagcgcatggaggtaaagaacctcatacgggaaatgaaaaaaacaaaccccggcgtagaggcccatatattcaggagcatggaaaacgtcagtctggacgccgtcatagcctacaagactaagggaaggaaaattcattttttagataattatgacaaccctgacgaaggcattgaagaataa

SEQ ID NO: 110 - DNA, 654 bp, Unknown
  Unknown gut bacteria
atgataagcttttccgaccttttcaccatcacaatgaaccccgttcaggtaatactgaccctgatagttggcctgctcgtgggcctttacgtatggttcatatataaaaagaccttcagcggcgtcatgtattcccgcacctacggcatgacgctggtaatgatgaccatagttacggcgctgatgctgatgctcatcaacaacagcctgaccctcagccttggcatggtgggcgccctgtccatcgtccgctaccgcaccgccataaaggatccccttgacaccgccttcatattctgggcagtgggcgagggtatagccgtgggcacaaagttctacgacgtggccataatcgccggcataataataggcatattcgtgctgctgatctcaggctcaaggggcaagggtggcgctcagagctacctccttataatccactacagcgaggccgcggcagacgccatacgcaagatgaccaagcagcttcccggcgcccggctcaagagcaaggtagtgcgccccggcagcatagagcttaccatggagctgcgcctcaaggagaacgagacgggcttcgtagagaagttcctccgggtggagggcgtgtacgatgcaagccttatcactcatcagggagacatagtggcgtag

SEQ ID NO: 111 - DNA, 1848 bp, Unknown
  Unknown gut bacteria
atgcttcaggaaaagagcttgaatgatctcagggagatcgccaagcttcagggcgtaaagtcactcacaaaataccgcaagaacgagcttgtggacatcataatgaacggcggagcgataccctccgcggtgcagcagccagctgagccgccggctccccagctcgaagcccagcctgatccacagcccgccgcccctgcatccgggcagccaatacaggccgcagaacagccatctgaggaagcacacgtgcggcacagcgacgttctgcacgaagctcctgcacagccccgctctcagtatatacctgcgtatcaggcacagcagccccgtcagatgggctatcagcagcagtaccgcaaaccctatcaacagaattatcagcagcggcaggggtacggctacaatcagaaccgttatcagcagcagggctatcaggcatacaacagggactactcccagcagagttatcagccttcttataacagggactattcccagcagggctaccagcagccctcctaccagcagggctatcagcagcagagctatcaggccgcctatgagcagcagtccgaggaaagcttccgcaggccagaccgtcccgagggctactacaacaaagaatacggcaccagcaatcccgcagttcccggccttctcgagggcggagaatgcggcgattgcgaaggcgtacttgaagttctgcccgatggctacggcttcctccgcagcgacaactatctgccgggcaacaaggacatatacgtctccatcgcccagatacgccgcttcggcctccgcacaggcgatctcgtcaccggcaagacccgtccaagcaaggagggcgagcgttttctcgcgctgctgtacataacagccataaacggcattgatcccgaggaggccatgaagcgtaagccctttgaggagcttgtgcccatataccccaatgagcgtctcactctggaatatgacgacggcaccggcgcaaaggaccagaatctggccattcgcctggtagacctcatagcccccataggcaagggccagcgcggccttatcgtcagccagcccaagagcggcaagactacgctgctcaagaacatagccaacggaataaccaacaactatcccgacgttacccttatagtgctgctcatagacgagcggcccgaggaagtcacggatatgcagcgcagcataaagggtgaggtactgtactccacctttgatgagctgcccgagcatcatacccgcgtagccgaaatggcgcaggagcgcgctatgcgcctggtggagcagggcaaggacgtggtagtcctcatagactccataacccgccttacccgcgcctacaatattactatccccgccaccggcaagactctttccggcggtatggatccgggagctctgcataagcccaagcgcttcttcggtgctgcccgcaacatcgaaaacggaggcagcctaaccataatcgctaccgccctcatcgagaccggcagccgcatggacgatatagtttatgaggaattcaagggcacaggcaacatggagatacaccttgaccgcaagctctccgaaaagcgtatattccctgccatagacatctacaagagcggtacccgccgggatgacctgcttctctccccagacgaaatggacgcagtgtacatcatacgcaaaatgctgggcaacggcaatcccgcggagatcaccgagcagctcatcgccatgcttgaaaagacggaaaacaacaaggaattcgtcgccaagatacgggcatggaacagcgcctatgagaaggacggcttcaccacaggcaagaccttcaacaaataa

SEQ ID NO: 112 - DNA, 894 bp, Unknown
  Unknown gut bacteria
atgtgcgatcgtttttttatagtgaacccggtgtccggctccggcaagtcaaggaagctctttgaggagctgcttccccagatagaaaggagcggcaggagcttcgagtggcggtataccaccggcaagggccacgcaagagagttggcggaagaagcctccggaaaaggctgccaacgggtgatatccgtgggcggcgacggcaccgcaaacgaggtggccgcggcgcttataggttcggatacagagatgggaatacttccctttggcacaggcaacgactttgctaaggcggtgggcctgcccaccgatcccaatgcagcgctggaggcggcgctgtacggccaggtccggccggtggacgccgcaatggcaaacgacaagccctttataaacgtcagcggaacaggcttcgacgtggacgtgataatcaacaccgagaagtttaaaaagaggttcaacggaatgctgccctacatgctgggcatattccagagccttatgcacctcaagcccatcaccttcgagataacggcggacggggaaagctttaccgagcgggcgctgctcttcaacgcctgcaacggcacccatttcgccggaggaatgcacgttgcgcccatggcgagtccctatgacgggctgctcgacgtatgcatactgcgggccataagcataccgcagtttctcctgctgctgccccgctataccaggggcgcccacacagcttcaaggcacgtgcgctacttcaaggcgaaggaaatagcggtaaggtgcgacagcgaaaacataatcaaccttgacggggagctggattcctctacccccgtaacatttaaggtattgcccggggcgataaagcttgcgcttccgggagaaaaagggaacaaatga

SEQ ID NO: 113 - DNA, 792 bp, Unknown
  Unknown gut bacteria
atgaacgaattaaggaacaaaaagggttttatatgcgatatggacggcgtgatttaccacggtaacaagctgctgcccggcgtaaaggagttcgttgactggctgtacagggaaaacaagaacttcctcttcctcaccaactcctccgagcgctcacccaaggagcttcagcaaaagctcaagcgcatggggcttgatgtggacgagagccatttctatacaagtgcgttggcgaccgcacgcttcataagctcccagtcgccggaaagcagcgcctacgtaataggcggcgcaggcctcataatggcgctgcacgacgaaggcatcaccatgaacgacgttgacccggattacgttataatcggcgagggtaatacctacaactacgagaacatactgaaggcggtacacctggtgatgaagggcgcaaagctcatcggcaccaacagcgaccttacaggcccctctgagaacgggataatccccgcatgccgggcaatgatcgcccctatcgaaatggccaccggccagaacgcctatttcataggcaaacccaaccctcttatgatgcggacaggccttaggatactgggcgtacactcagaggacgcggtaatgataggcgatcgcatggataccgacatgatcgcgggaatcgagactggccttgacacctgccttgtgctctccggcgtgaccgaccgcgccgacatcaataagttcccctaccgtccgcggctggtgttaaacggggtaggcgatatacctgacaagtcaaaggaaatagtgtga

SEQ ID NO: 114 - DNA, 684 bp, Unknown
  Unknown gut bacteria
atgttcggcaagaaggagcttcagagggaacttgaacagaaggagcagcagatacaggagctgaaccgcaggatcaaggaataccaggacaaaaacgacgcggtagtaagcgccctcacggacgcgaagtccgccgcgaaccgcataattggcgcagcggaagcaaagcgcgatgatatcatcgccgccgccatgcgtgaaaaggccgatatggaggcccaaagggacggaatacttgacgaagcccgggcgcaggccgcggctatcgttgcagatgccgagaagagggcaaaggctgccgaggagcaggccaggtactttcaggattatatcaggaacaccgcagatacggtgcgccgccaagccgaaaactacgccggcttccttgaaaattacgagcatatcggcgtcggccagcagccggagacggaaaagatagatactccggacgagtaccggaaccctgcggagctcataaagagcatatacaatatcgagggccgggagcttcccgatgaggtgacgaagcccgacgcggggcaggagccagaggaggaaaaggtatggaccgtggacgaagtcgtcagcgaggaaaagcatgacgatgacgacgctgacaaagcagatgacggccttgacagcgagctcaacgacatactgaacgatatattaaagctggattga

SEQ ID NO: 115 - DNA, 1113 bp, Unknown
  Unknown gut bacteria
atgacagatccgaggatcaagacacttgcaaaaaacctcataggcttttcctgcgccgtaaagcccggtgaaaagatacttatcgagggcaacggcgaatgtaccgagctggtaaaagcgttggtcaaggagacctatgccgcgggcggcgtccccttcgtatggataaagaagcccgaggtatgccgggagcttgcgctgggcgcgacaaaggagcagcaggagcttatggcaaagatagactgcgagctcatgcgccacatggacgcgtatatcggcataggcgcgaagctcaacactaacgagatgtccgacgtgccgggggataagctggccctcataagcgccgtatacggcaggccgctgaacaacattcgcatacccaacaccaagtggtgcgtgctgcgctatcccaaccccaactttgcccagatggcaggcatgagcaccgaggccttcgaggacttctactttaacgtttgcaacctcgactatgctaagatggacaaggccatgcagcccctcaaggagcttatggaaaagaccgacagggtgcatatagtgggccccggcacagacctccgcttctccataaagggtatgcccgccataaagtgctccggccagatgaacattccggacggcgagatatataccgctcccgtagacggcagcgtagagggaacaataacctacaacaccccctccataatggacggcttcacatatgagaacgtcagcttgaccttcaaaaacggccgcatagtggaatccacctccaacgacaacgagcgcataaaggccgtattcgacagggacgcgggcgcacggggcgtgggcgaattcgccataggcgtgaacccctacgtcaccttccccatgagggacaccctcttcgacgagaaaatatccggatccttccactttaccccgggctgctgctacgacgattgcagcaacggcaacaagtcctgcatacactgggatctcgtatgcatacagacccccgaatacggcggcggcgagatgtacttcgacgacgtactgatccgcaaggacggcaggtttgtactgcccgagctggattgcctcaatcccgagaaccttaaataa

SEQ ID NO: 116 - DNA, 774 bp, Unknown
  Unknown gut bacteria
atgcttgtaaacactcccatagcaaacctctattcagggccttcggttggagagctggacgaccagatactctacggagaggaagccgatgtgctggagagaagcaacggctttgccaagatacgcacggaatacggctatgaaggctggatagaggaaaggcatcttgctatccggcggtatgacggcgcaataatgcgggtcgtaactcccttctgcacagtgctggatatacccaaatatcagggcaggacggtggtgacgctgccccggggcgctaaggtcgaaatgacgggtgagaataacagctttgcccaggtgcggctgataggcggagaaaagggctacatacgccgcagccatatagcggccctgccgggaaagctgagggaggctgagctgcgccgggccgtgacggagactgccaaagcatatcttggggtaccatacctctggggtggaagatcgtccgtggggatggattgcagcggcctgtgccatacggcatactggctcaacggcgtggccatataccggaactcacgcatggcggagggctttccggtgaaggcgatagacccggccaatatgaattcgggtgaccttctctacttcaagggacatgtggctatgtaccttggcggcggcaaatacattcacgccacagggagggccggtgacgacagggtagttataaacagcctttttccggaggacaccggttacagggaggacctggccaatggcctcgtcgccgtgggcagcgtattttga

SEQ ID NO: 117 - DNA, 1026 bp, Unknown
  Unknown gut bacteria
atggacgacagacttataacctcttccatgacaatggaggacgagcagatagaatacagcctgcgccccaggtttcttaacgagtacataggtcagcataacgtcaaggaacacatgcgcatatacatagaggcggccaagcacagaggggagcccctggaccatgcccttttctatggcccgccgggtctcggcaagaccacgcttgcggccatagtcgcaaacgagatgggtggcaacctgcgggtaacgtcaggcccagcaatatcccatgcaggcgaccttgcggccatacttacaaatctcgcccccggcgacgtgctgttcatagacgagatacacaggctgaattccagcgttgaggaagtgctctatcctgccatggaggattattccatagacataacaataggcaagggtccatccgcccactccatacgtctggatcttccaaagttcaccctcataggcgcgacgacgcgtatgggcatgctcacatctcccctcagggacaggttcggcataaaggagcagcttgagctgtacaacccggaggagctgaaggaaataatcgagcgcagcgcggatatactcaacgttaagatagacacagagggcgcccttgagatagcctcgcgctcccggggtacaccgcgaatagttaaccgcctgctaaaaagggtgcgtgattacgcacaggtgcggggcaatggcgagatagatcttgagacagcccgggctggcctggatatgctggccatagatgagatgggccttgacgctgtggacaggcgcatgctcgccaccatgatagaaaagttcggcggcaggcctgtaggccttgataccatagccgcggccacaggcgacgacgccaccaccatcgaggacgtgtacgagccatatctcatacagcttggcttcatcgcgagaacgccccggggccgcgtggtgatgccgctgggataccggcatatgggttacgcgccgccggctgatgtgggccaacagaagatgaatttttga

SEQ ID NO: 118 - DNA, 1182 bp, Unknown
  Unknown gut bacteria
cgggagcagacccttaaccagctactggtggagatggacggctttgcggtaaacgaaggcataatagtgcttgccgccactaaccgcccagacatactcgatcccgcactgctgcgtcctggcaggtttgacaggcagataaccgtgggctatcccgacgttaagggacgggaggccatactcgaggttcacgccaagggcaagcccctcgccaaggacgtggatctgggggtgctggcaaagcgcaccagcggcatgaccggcgcggatcttgaaaacgtgcttaacgaggcggccatacttgcggcccgcttcaagaagaaggagataaccatggtggagctggaggaggccataacccgcacggttgtgggccccgaaaagcgcagccgtgtagttaccgaggaggataagcgcatcaccgcctatcacgaggcgggacacgccatagtagccctgaagatggagcactgcgatcctgtacacgaggtatccataatacccagaggtcaggcggcaggctacaccatgaccatgcccgacaacgacgacagccacatttcccggggcaagatacttgaccagatagccatgagtatgggaggccgtgtggccgagagcatagcccttgacgatatatgcaccggcgccataggagatctcaagcacgccagcgaccttgaccgccgcatggtgatagagttaggcatgagcgacgagataggccccgtgttcctgggcggcgattccgaggtgttcatagcaaaggactggggacaccagcgcagctattccgaggaggtggctgccaaggtggacaaggagatacgcaggatactggaggagcagttcgagcgggcgaagcaggtgctgctccacgagcgggaggcgcttgatcgggtagtgaagtatcttatagagtacgagcgcataaccggcgaggaattcgagaagatattccataacgagcctgtggagctggtatcctataaagagcggaaggaagctcttgaaaagccggacgaggaggaaaagccggaggacgaatccgatgacaggacaggggatgagccggagcagcgccatgagggcagcggtgaggacagccccgaggataagcctgagaaagaggcggaacagaaattctaccggcccggcggattcgacggcgaggacaaataa

SEQ ID NO: 119 - DNA, 1248 bp, Unknown
  Unknown gut bacteria
atgaagatagcaatgcctgagcttctggctcctgccggaaatatggaaaggctgacagcggccatcgattacggtgcggacgcggtatatcttggggcgcagagcatgagcctgaggaattatgccgataactttacgccggagcagctcagggcgggctgcgaatacgcccacgggaggaacgccaaggtatacgtggcctgcaatgcattcgcgcgggacgaggaccttaaggatttgccggaactgctggcaaccatccggactgccggtgccgatgcgcttatagtcaacgatcccggcgtgatacgggtggcgcgtaaatgcgtgccggatatgccgctgcacttgagtactcaggcgaacactttgaattccgaggcggcgctgttctggtacgagcagggggtaaagcgcataatacttgccagggagctttccatcaagcagataaaggctatgcggcagagactgcctgaggaccttgagcttgagatgttcgtccacggcgccatgtgcgtgtcctattccggaagatgcctgctgagtaactacataaacggcagggactcaaacaggggcgaatgcgcccagccctgccgctggcagtatgaactaagggaaaagggctcaaagggcgagtactttacgatagagcaggacgagcgcggcagctttatcatgaactcccgggatatgcgcctcatagagtacataccggagatagtggatgcaggcataatgagcctcaagatagagggccgcatgaagtccatcgcctatgtggccaccgtggtgaacgcctaccgactggccattgacgagtataagcgcagcatcgacgagggcagggaatataaggtgcccgcttccgtgatgcgggagctggaacttgcgtcccatcggccctataccaccggctttgcatttggcgatcccggcgccgaaggtcaggagacccgcagcggcggttatgtagcggacggagccatagccgcggtggtgatatcctatgacggcaagactgggaccgcttttgtggctcagcgcaacaagttttatgacggcgaggagctttccatactttcccccggcgacataggccgcagctttaaggtgagcggcataacaaacgaggctggcgaaagggtgcagagtacgccgcatccaaaggagaagctgtatataggctgcaaacaggaattaaagcccggcgacatactccgaaagcttaccgaaaaaagataa

SEQ ID NO: 120 - DNA, 1386 bp, Unknown
  Unknown gut bacteria
gacaggcagtttcaccgcaacagcgtgctctcagaggtggagcgcagggtaagcgactttgttaccgccatggagggcgtatacagaaggtacgacaacagcaagttcttcttcgtgttcgaggcaaagcgcatagcggagcttgagcagcagcgctttacccttctcgacgaggtgcgcgagatagatacgggaaccggccagccggtaacgctctctatttccataggcgtggcggacaggatagccgcctcggacgaggcggcccgaaacggcatgcagctggtgctgggcaggggaggcgatcaggcggtggtcaagcggggggcaaactacgccttctacggcggcaagcgccaggtaaccacaaagaactccagagtaaaggcgcggcttttcgccgaggcgctgcatcagctgatggacaccgcggatgcggttttcataatgggccacagtctaccggatatggactgcgtaggggcgggcctcggcataatgcgctgcgccaagagcataagctgcccggcgtatttcgtgctggacgaatccaacgccagcattgatggggcgatagcggcaatgaaggaaaacaaggcctacagggatactataaagacgccggagcaggccgcccagatgatgcgctcctcctcgctattgataatcgtggacacccagcgcaaaagctcgctgctcagcgccgagctgctggaaaaggcgggcaaggcggtggtcatagaccatcacaggcgggctgtggactccatacagaaccctaccctcaactatcttgaggcgggatcctcctcggcctgcgagatggtgacagaggtgatacagtactttgacgacggcctcaagcccaccaccttcgagtgcggggcgctgcttgcgggcatcactatggatacaaagcatttttccttcaataccggagcgcgcacctttgaggcggcaagctatttaaggcgcaacggcgcggacaacaccaccgtgaagatgatgttccaggacgatatgcagacctaccgcaacagggccaaggtagtggaaaacgccataataatggagcaggggatagccatatccgcatgccccgcgggcatggaagccaccaacctcatagccgcacaggcggcggacgagctggtgaacataaagggtattcaggcttccttcgtgcttgcggagcggggccaggtgatatacataagcggcagaagcctcggggacatcagcgtccagcttatacttgaaaagctggggggcggcgggcatcagtccattgccggcgcgcagctgaaggacgtgactatggacgaggccataagcaggcttacggaaagtataaacagctatttaaaggaggcacacgagaaatga

SEQ ID NO: 121 - DNA, 1035 bp, Unknown
  Unknown gut bacteria
atgaagctcacccttatacctgcacagtacctggagcaaagcatccaataccctgagctttccctctgccggatagtttcccaggaaaagggcttgtaccgcatcataagcgccgaaggggatcagctggcgtcggtatccggtaaattccagcatgaagcagcctccccttcggattaccccgttgtgggcaactatgtgatggcagccctaaacggcggagcggccgttataaaccgtgtgctgccccgtaaaagcctgtttctccgtaaatcggcaggcacagccaggatggagcaggccgttgccgctaatattgacaccgtattcatctgcatgtcgctgaacagcgactttaacctgcgccgcctggaacgctacttatccgttgcgtgggaaagcggttccctgcccgtagtggtgcttaccaaggccgacctttgcgataatcccgcagtaaaggccgcccaggccgccagcatcgctatcggggcagatgtacttgtcacttcttccatggcgctggacggctataaccagatactgccctatatctcccaaggaaagacagttgccttcgtaggttcctccggcgtaggcaagtccaccctcatcaaccggctgctgggcgaggacaggcaggataccggcggcctcaggaacgacgacaagggccgccacaccaccacccacagggagctgctgatgcttcccaacggcgcagcggtgatagacactcccggcatgcgggagcttggcatatgggacgcctccattggcctcagcacagccttcagcgatatagaggagctggccgcccaatgccgtttcggcgactgcacccataaaaacgagcccggctgcgcagtgcgttccgcgctgcaaaggggcgagctgtcagaggagcgctttttgtcttatgaaaagctggcgttagaaaacgcctatgcagccggccccacaggcagccgcgccgcaaaggagcgtaaattcaagagcatagcaaaattcaacaaaactaaaccaaagagataa

SEQ ID NO: 122 - DNA, 870 bp, Unknown
  Unknown gut bacteria
atggaaaacgtggatttgctcacacggataaaccagcattacaattctttcagcaaggggcagaagctgcttgccaactacataatagacaattacgacagggcggcgttcattaccgcatcgaagatgggccgcactgtaggcgtaagtgaatctacggttgtccgctttgcatatgctttgggttatgacggatatcctgcgctccagcgctcccttcaggaaatgatacgcaaccgtcttactacggtccagcgtatacaactcacatcggatctttctcaggacgaggtcctttccactgtattgaaatcagatataagcaatatcagatccactatagagtcggtaaataccgctaccttcaataccgtcatagactacatgctcaaggcgcgcaagatctatgttgtaggtataaagagtgcggcgccgttagcacaattcctggggtattatctcaacttcatactggacgatgtatgcatcgtcaacagtaccgtatatgaaacgatgctgcgcataagcgacaaggacatgtgcataggaataagcttccccagatactcctctaaggcggtggaagcgctgagcttcgcaaggagcaagggcgcatatgtgacggccataacggacagcatgttttcccctatagccgagcttgcggacagcgtactggtagcgcgcagcgatatggcttcctttgccgattctctggctgcccccttgagccttatcaatgcccttatagtgggtgcgggccttcgcaggaaggacgaggtgtacgagagattggatcagctggaaggcatatggaagagccacaaggtgtatatagcgtccaatacagacgatagggataacgaatga

SEQ ID NO: 123 - DNA, 1017 bp, Unknown
  Unknown gut bacteria
ttgaaaggagacggaataatgtctatcatcgacaccatcaaagcaaaagcaaaagctgacgtaaagcacatagtgcttcccgagggaagtgaggagcgtaccgttcaggccgcaaggctgataaccgatcagggcatcgccaaggttacccttatcggcaaaagcgaggatatcaaggctgccgctgccaggttcaacgtgaacgtggacgacattgcaatgatcgacccggctgcctctgagctgtatcccggatactgcgagaagttcgctgaaatgcgcgcaaagaagggcgttacccttgagcaggcgcagaagaccatgctcgaccccctgtttttcgccgctatgatggtttacgatgacaaggctgacggcttcgtttccggcgctataaatacaaccggcaacacactccgccccggcctccagataataaagaccgcaaagggcgtatccaccgtttccagctgctttatcatggaagttcccaacaaggcctacggtgaccatggcgtgctggtatttggcgactgcgcggtaaatatcgcccctaccgcagagcaactggccgccatagccatcagctccgcacagagcgcaaaggcgctttgcggaatggagccccgcgtagccatgctttccttctccaccaagggcagcgccaagcacgagaacgtggatcgcgtagcggaagctaccaggctggtacacgagctcgctcccgagcttaacgcggacggcgaacttcaggcggatgctgctctggtcgaaaaagtcggccagctcaagagccccggaagccctgttgccggcaaggccaatgtactgatcttccccgacctgcaggcgggcaacatcggctataagctggttcagcgtctggcaggcgcagaggccataggccccatctgccagggcttcgcaaagcccatcaacgacctgtcccgcggctgcagcgttgacgatatagtatccgtcgttgccattaccgccgttcaggcacagaatatgtaa

SEQ ID NO: 124 - DNA, 1341 bp, Unknown
  Unknown gut bacteria
atggaagaagaaaaagacatcttaactgaagaaaataacgattcggaaatacccgtggaagccgaaatgatagatcaggcggttgaagaggcggcggagcacgccggcgggggggacgacggctttttcggcaagtacatatgggatgaggaaacgggcaggctgtacgagataaccgaggatccaaaaaagaagtgggacaggctgctcccgctgctgctgattgcgctgccagtaacagcccttgcgtttggcatcgccaagggttcctcgcttctgccgccggaatgctacaacggcacctccatactgtccgaaagcaatgtgggagaacagcttgcccagcctaaagcttacggagtaagcgacgctgaagaggcaacggccgagaacagccccgacacagagcaggccatggcgccggaacagtatacgccctgcgccatagtcatagacggcaggacaagggcggtgctggccagcaccgaggccgcggaatcgctgctggaggaagtcaggagctacttcgacggcaaggtgacggaatccggcgaccgtaccaccgagctttacagtggggtagagatgcagccccagcccgatgcaaagcccgaagacatttccagctacgaccgggtatacgaaaagttcacctcctcaagcagtcctctgaaggtcattaccactgtgacgagcagcgaaacgaaggagctgcccttcgactcaaaggtagagaaagaccccacactggtggccgacaccggcattaccctcaccttaggcagggcgggcagcagaaccaccgtgaaccatacggtatacataaacggcgaaaagagctccagccgcagcaagagcgaaacagttacggtggaaccccaggatacggtaatacttcagggcaccgataaaaagagcggcggcgagccgggcaggcacgagggcaaagagggcagaaagcccgaggcgctcagctttgcttcccccgtagcggagggagagataatttcaaactacggacagcgcgacggcatacttcatcttggcctggactacgaggccaaggccggagacccggtgctgtccagcgagggaggcaccgtggtctgcgccataaatcggggcggctacggcaacatcatagagatagaccacggcgaagggttcgtcacccgctacgcccacctgagccggttctccgtggctcccggcgataaggtagccaagggccagatcataggcaaggccggcgactcaggcagctgtaccgaagcacatcttcactttgagctgaggattgacggcatagcctacaatccaagatattacttagaaaagtaa

SEQ ID NO: 125 - DNA, 1128 bp, Unknown
  Unknown gut bacteria
atgcaagataaattcgacttcaaatacgagcttctgcacgtttgcaagcagtccggcgcccgccgcggcaggctgcacaccccgcacggagtaatagagaccccctgctatatgccggtaggcacacaggccacggtaaaggccatgcttccacgggacgtcaaggaagtgggctctatgataatactgtcaaacacatatcacctctttgagaggcccggtcacgagcttataaaagaggcgggcggcctgcacgagttcatgcggtgggataagcccatacttaccgacagcggcggctttcaggtgttcagcctcgcctccgccaataaaataaaagaggacggcgtggagttccgctcccttctggacggacgtaagcatttcttcacccccgagcttgtaatggagatagaggaagcccttggcgcggatatcgccatggcgttcgacgaatgcgccccttatccctccgaccgggaatacaccatagctgcaatggagcgcacccatcgctgggtcgtgcgctgcaaggctgcccatacccgcccggatcaggctcttttcggcatagttcagggcggcatgttcgccgacctcaggatagagagcgctaagtttctcgcttccctcgacctgccgggctatggcatcggcggtctttcagtgggcgagcccaaggaaatgatgtacgatatgctggagcagatgatgccctatatgcccgcaaacaagccccgctaccttatgggcgtgggcagccccgactgtctggtggagggcgctgtacgcggcatagacatgttcgactgcgtactccagacccgtatagcgagaaacggccttgcgctcacgggaagcggcaaaaaaatgctgcgaaacgcctcctttgagcacgacttcacgcctatcgaggagggctgcgactgctatgcctgcaagaacggcttcaccagggcatatatacgccaccttgtaaaatgcaaggagatactggcggcacagctcataaccacccacaacctgcgcttctctctgaggctcatggagcaggtgcgcaaggccatagagcaggacaggctgctggacttccgggaagagcttaaagcgaaaggaacattcgattga

SEQ ID NO: 126 - DNA, 918 bp, Unknown
  Unknown gut bacteria
atggacaatacagacaacacgcttttgctgatcctcaaccccgaggcggggctgaggtacgcaagaaagttccttcccgagataatagcgctgtttaccgattacggctatcagtgccttgtattcgttaccgaaaagcggggggacgcgaccgaattcgttaaaaaatacggcgaaagggtcaaatgcatagtgagcataggcggagacggcacctttaacgagaccgtcaccggcgtcatgcaggcgggcctcaatataccggtgggctacatacccgccggcagcacaaacgactttgccaacagtctgcaccttccttcggatattatgaatgcggcgaagaatataatggagggagagcctgtatccatagacgtcggcaggttccaacagaggtattttacctacgtggcttctttcggcgcgtttacacgggcatcctacgagacgccgcaaaacgtgaagaacgccctgggacatctcgcttatatactggagggcatgaagagcctcgccagtatccgcccggagcacgtgaagctgatagctgacggcaggacgtacgagagagagctgctctttggcgccgtgagcaactccacctcccttgggggtgtgctgacgctggatcccgatgtggtggatatgaacgacggcaagtttgagataatgcttgtgcatatgccaaattccgccatagagctcaacgagatacttaccgccatagccagcaagcagtatgagtgcagcatgatagatttcatacgcacagaaagggcggagatattcgcgagtccggatatggactggtcgctggacggcgagcaccagaagggaagcgagcacatagtcatagaaaacatacacgacgaattgaggatactgaccaaagagacccttggcggcgaaaagtaa

SEQ ID NO: 127 - DNA, 1026 bp, Unknown
  Unknown gut bacteria
ttggaggaaaaaatggctatcagggttggcatcaacggcttcggaagaataggacgcactgtattcaggatcatttcccagaacccggacaggtttgagctttgcggcataaacctccgcaacctcaatatggaatatatggcatacacagccctgtacgactcggtgcatggccattttcccggcacgattgaggccggcagccagcaccttatagtcaacggcaagccggtcaggatattcagcgagagcgaccctgccaatatagaatgggcctcctgcggcgcagaatatatcatagaatccaccggcgcgttcaacaccaccgccgcctcctccgcccacatgaagggcggcgctaaaaaaatcataatcaccgcccccgcaaaggacgacgttacccccaccttcgtcttcggcgtgaaccacgaggaatacgaccccgcaagcgcagtcatctccgccgcttcctgcactaccaactgcttagcgccccttgccaaggtagtgaacgaccgcttcggcatagaacgcgggctcatgtcaaccatacattccgcaaccgccaagcagaaggccgtagactcccgggcaggcagccgtgacctccgcaccggccgctccgtgttcaacaacataatcccctccaccaccggcgcggccaaggcggtgggcaaggccatacccgagctgaacggcaagctcaccggaatgtccttccgggttccggtgaacgacgtatccgtagtagacctcacggcaaagctggtgacaaagaccaactatgcggacataatggatgcgctggaggaggcagcacacggctatatgaagggcgtgctcacctgtctcgacgcggacgtggtatcatccgaccttcggggcgatccccacacctgtatagtcgataagcgggccggcataatgcttggggacgacttcgttaagctcatcgcctggtacgacaacgagtggggctacagctccaaggtgctggatatggtcgaatacgttgcggataagtaa

SEQ ID NO: 128 - DNA, 1188 bp, Unknown
  Unknown gut bacteria
atgacttttgcagatgtattttccaactttatagataccaccggctttgcctatctgatagccgatcccaggtgtcttataatgatagccatttcctgcgttctgctgtacctggctattgtaaaggggttcgagcctctgctgctggtgcctatcgcattcggtatgctgcttaccaaccttcccggcgctaatatgttccatcccgactattttctaaaggtggtagatggcgctaccgccataaactgggcggagctgggtcacggcgccggccttatagactacctgtatctgggcgtaaagctcggcatatacccctcgctgatattcatgggcgtgggagcaatgacagacttcggtcccctgatagccaaccccaagagcctgcttatgggcgcgggagcgcagttcggcatcttcgtcgcttttataggcgctaagctccttggcttcagcaatgctgaagcaggctccataggcataatcggcggcgcagacggccctacggcgatctacgttaccctgaggctcgctccttatcttctcggccctatcgccgtcgcggcttattcttacatggcgctggttcctgtcatacagccccctataatgaaggcgctgacgacaaaggaagagcgccggatagagatgaagcagctgaggccggtatcccagaaggaaaagataatattccccatcatggtcaccatattcgtatccttcatgctgccttccgcggcgccgcttatcggcctgcttatgctgggtaacctgttccgcgagagcggcgttaccgaccgcctctccaagaccgcccagaacgagctgatgaatatcgtaaccatattcctcggcatctcggtaggcgctaccgccaccgctgagaccttcctcaccggcaagaccctcggcatactgcttatgggcgtttgcgctttcgctttcggcaccgccggcggcgtaatagttgcaaagataatgaacaagttcagcaaggatcccatcaaccccctgatcggctccgctggcgtttccgccgttcccatggctgcccgcgtatctcagatagttggtcagaaggaaaagcccggcaacttcctgctcatgcacgccatgggccccaacgtagccggcgttatcggctccgctatcgctgccggtgtgttccttgccctgttcatgtaa

SEQ ID NO: 129 - DNA, 1332 bp, Unknown
  Unknown gut bacteria
atgagaaggacgttgaccgctgttttgcttgccgcgatgctggctttttcgccggttgcggcatacgcggcgcctgttataggcgaagagcaatacggggggctgcaggaggccgcggacgcggcaaaggatggggaaataataggggtttccaaggaagatgacgaggaaagcataactgttgcgggaaaagcggttatcatctgcgttgttgacggagagtggagcgaaagaacaactgacacggaatgcatagcaaggctcagcggcaatgacggtaatggcgcatattacgttgtgggcgaccttgacaggtgtgttgcgtgtgatacgaaggctatatgcggtgcggaggctgccatttatgagcttaaaaagagcataaagctcaaaagcgatgttacctttgccaactgcggaatggataccagcggcataaccgtaaggcgggagctgtgcatagacctgaacgggaggaccatagcccaggagcggggcgagaacgcatataacgtctatgccgctgtaaacgtgaatatagaaggcggaacgctgaccatcagggattcctcggaggataaaagcggcagtataatcggcaataccgtagcaatagttgtggctgagggcaggtgcgtgcttgagggaggcagtatcgcctctcggggagaatactgcgacttcggcgacggaatggtgtttgccggcgcacccgtaagtctttccgagggcggaaaaggctttcttatgacgggcggaaggatatccatggcagagctggaggagggaggcatgcttgtcggcgacttttacgatgcggtcggcaaaagcatagagataatcggcggggaggtgttctgcgttccggagaagagcctttgtaatgcggatcccaccgacggattttattcgtatatggacagcagaggcagcgtcagcatatccggcggttatttcgactttgagccggacgccgaataccttgacgacagcatgaaggcggtggagtcggcaaggcagggatataagtttacggttacagacggaagcccggacccatggaaggacgagcgggaagcgcaggaagaaaacatctgcgagatcgtcaggagcgtcagatttacggatggcagcgagccgaggcagacagaggtgaaacctgaaaatgagctgctgcagcaggcggaaatactccaaaggagcgaaagcggcatcgcagcagaaaagccgcggcagccggagccttatgaaggcccgtttatattgcttgtgccaaagaccggggatatgccgccgctgcaccggctgttcagcctgcttcacattaaataa

SEQ ID NO: 130 - DNA, 1047 bp, Unknown
  Unknown gut bacteria
atgtctattcaaattaagactatcgccgtaaccggcgaaaaacagaccgagataatgaacctgaccaccccggatcttcgcaacggcgaagcattgataaaggtacatgccgtagcgctctgcacccttgagcagcgcatattcaggggtgaagtaaagatgcctctgccatgcaccggcggccacgaggtatcaggcgagatagttgctctgggcgatggcgtgaacaagaaaatgtgggcgccaggagaccgcgttgccgtacgtctgctttacaactgcggcgagtgctattactgccgtaccggacatgctaatctctgcgaaagggcgcagaaaaagcccgtacgcgagggactgcttataggacccggcggcctttgcgattacgttatagtaaataccggttatctctttaagatacccgacactctgagctatgaagaagccagcctgaccgagcctcttgcatgtgtggtgcatagcgtcaccaaggctaacattcagctgggtgaagacgtggtagtaataggcggcggcataatgggtcagtatcacgtaatgctggcgaagcgcaggggtgcaagggtcataatgagcgaggtagacgagagccgccgcactctggcccggaagctgggagccgacattactttcaaccccatggagaaggatcctgttgagtatgtaaagagcctcaccgagggccgtggtgcagacgtggtgttcaacactaccgccataccttccgtggtacctcaggctatcgccatgacaggcaaggccggccgcatgatacagtacagttccatgcatcccgatgccccggcgccggtaagcccccagatgctgcatggcaatgagcccatactcaccggctccatcagccccgacgtgcacgacttttttaccgctaaccgtctgctttccggcggcataatagactgcaagccgcttattgcaaagaagttccccttcgagcaggcacagcaggcctttgaggcggcgattgtgcccggcaccttcagggtaataataacagactga

SEQ ID NO: 131 - DNA, 1917 bp, Unknown
  Unknown gut bacteria
atgggactgccggcaaaacttgtgcattctcaattgaatttctttaagcctctggttgccagctgctcactggaaaccatacgccggggacaggacaagcttggcgagcttatggaagccatacataaaaaggacgttaaggtgcgtgatcatcccttcgaccgcttcgagggcgcatgggtcatgccgcgggacgagcgccgtcagggagtcatactttacctgcacgggggcggctatacctgcggcgatctcgactacgccaagggcttcgccgcaacgcttgcagatgaagagggcgtgcgcgtgttctgtgccgcctacaggctcgctcctgaacaccccttccccgccgcactcgacgacgcgctggaggcatacagatacctcattagcaagggctacggtggggatcacataatgctctgcggcgagagtgcaggcggcggcctttgctacgccctctgcttaaagctcaaggagcttaaaatggccatgccctgcgggatcattgccatttccccctggacagacctcacagcttccggcgaaagctacgaaacgaaccgcgacaacgatccctctctcacagctgaggttcttgagttttacgcccagtgctacgcagccggccgcgacaggctggacccgctgctgtcccccctattcggcgaccttacaggcatgccgccctctctcattttcgcaggcggcgacgagatattgctggacgactcccggcggctccattcaaggctgctgcaatgcggctgcaggagcagtttgcacatcgccccgggacgctggcacgcctacgtgctgtaccaattaaaggaaaatcaggacgattttgccacgataaacgagtttttgaacaaacgcctctgtcctgaacgcaagctacgctggatgcgtctggacaacgcggcaaagatataccccgccgcccggcgcaggaactggaacaactttttccggctttcggccaccctgagcgagcccgtagacaggccggtgctgcaatccgccctcgatgtgactgtgcgccgctttccctccatggcggtgcggctgcgcaggggcacattttggtactacctcgaggagctttccagggccccctccatacgcgacgaaaaagcctgtccgctggcccacgtgccctttaaagaagttcgcgagtgcgctttcagggttatagtatacaagaaccgcatagccgtggagtttttccacgccataaccgacggcaacggcgcgctggtattcctcaagacactgctggccgaatacctataccagaagcacggcctcaatgtacctaaggaggacggtgttctgggcaggctggaggagccctccgaggaggagctggaggacagctttctcaggtttgccggggacgtgcgggcaagccgacgggaaaaaacagcgtatcacctctcaggcaccccggagcccgacggatttttgaatcttgtgacgttcatgctggatgcggagtccgtgcgcggcaaggcaaaggagtacggggtcaccgttacagagttcctttgcgctgctatgatgaaagccatactcggcctgcaggcggaaaaggtacatttccgtaggcacaggcgccccgtaaaggtgcttataccagtaaacctccgaaagcttttcccgagcagaaccctgcgcaacttcgccctgtacgtcacccccgaaatagaccctcagcttggcgattacagttttaaggagatatgctcagtagtccatcaccgcatggggctggactgcaccgcaaagctcatgggtactcgtatagccgccaacgtcagcagtgaaaaggcttttatcttaaaggtgatgccgctgttcataaaaaatgctgccatgaaggccgtatttgacgcggtaggtgaatgcaag

SEQ ID NO: 132 - DNA, 2424 bp, Unknown
  Unknown gut bacteria
atggcaaaaagagatgataaccagatatccttcgaggggcagaccataatcacgaagggcatggaggcggttatgcacgactccatgattccctatgcggaatatgtaataatggagcgggcgctgccgcggatagaggacggcctgaagcctgttcagcgccgcatactttataccatgctggagctggggctgactccggacaagccacaccgcaaaagcgcgcgtatagtgggcgactgcctcggcaaatatcacccccatggcgatacgtcggtatacgatgccatggtgcgtatggctcaggaattcaatatgcagatgcccatggtggacggacacggcaactttggcagcgtggacggcgactctgcggcggcaatgcgatataccgaggccagaatgacccctgtagccatggagatgctgcgggatctggagaaagatacggtaaagttcagcctgaactttgacgatacgttaaaagaacccgacctgctgcccggccgctttccaaacctgttggtaaatggctcctcaggcatagccgtaggtctggcgaccaacataccgccccacaatatgggcgaagccatagacgctgccataatgtatatggatgatccggaagtatccctggacgagctgatgaaggtaatgccctgtccggattttccgacagggggttatatactggaatccgacgaaatacggaatgcttacgaaacgggcaggggaaagataaccgttcgtgccaaggccgaaatagaggagcagaagaacggcaagaagctcattgtcgtgaccgagatgccatatcaggtgaacaaggcaaaggcgcttgaggatatattgcacataagcgaggaaaaaaaggcgctgtttgccggcataggcgagataagggacgagtccgaccgcatgggcatgcgggcggtgatagaggtaaagaaggacgcggacgcggaaaagatactgcaatacctctataaatactccgaccttcaggtaaccttcggcgttaacatggtggccatagccgacggcaagccccagacgctgggacttagggaaatactgcggcattacataatacatcaggaaaatgtagtcacccgccgcacgaaatttgaccttgacgcagctgagcgccgggagcacatactggaaggccttatggtggccattgccaatatagacgaggtgatagctctcataagggccgcaaagtcgccaaaggaggccaaggaaggccttatgaagcgctttgagcttaccgatatacaggctcaggccatacttgatctgaggctccaaaggctgaccaacctggaaagactggccatagaaaaggaatacagggaggtaggcaggctaataaaggaatacaagggcatactttcatccgaggaaaagctcagggcggtcatacgccgcgagatgctggccataaaagaaaaatatgccgtatcacgccgtacaaggctgatacagggccaggaggagatagtcgtgtcccgtgaggacatgatagtggtggatgatgccatagtggcgctgcttgagggcggcaagatacgccgcctgcccaagcgcaattttacagccgagtccatcgcctccgaaaagccggtatttataatggagacccagacggacaggcggctgaggttctttaccagccacggcaactgcctgataatcggcgtggacgagctgccggaagtaaggcttaccgccaaggctacaaaccttaattcgctggtacagctcgaaaaggacgaggagatagtcgcatgcttcgatgaggtaaaggatgacacgcttgtgttctttacagccctcggcaacgcaaaacgtacagagggaaaggaatttgacctccgcacaaagaagacggccgccatagcccttaaggacgacgacagggttatagccgtagaaaaacaggacgagaccgcaggcaccgttatcatgataagcaagggcggaatgagcatacgctttgcgacagataccgttcccgtaatgggcaagggcgcgggcggagtgaagtgcatgaagctggacgagggggacagggttatattcgccgcgcagatagctgacgagggcgagatacttaccatatccgacaggggctacgcaaagcgcagcctggtcttcgattacgagatacagggcaggaacggcaagggcctgaagaccttcgacttcaagaagaacggctcaaacggcactgccatcgctgcggcgctttacgtaaaggagccctatgatatagtcatacgccagttccacggcgaggagacggtagtgaacaccgagacggtattcatcgagcagcggcccggcaagggtatgcttacagtcatggcgctgctggacgatatagttattggcgcaaagaaaattaaatcataa

SEQ ID NO: 133 - DNA, 630 bp, Unknown
  Unknown gut bacteria
atgaaatacggatacgttgtatttgacatggacggtaccctcatagatacctgcgaagcgatacagcagtcgcttagggataccattgtaatgcttaccggcaaaacgcctgcaaaggccgagatgcgcgccaccttcggcacgccgagcgatgtagggcttaaaatgctgggagtgagggacgaggacatccagcggggcatattgctctggagcgaaaatatcaaaaagtacgaggatacgccgagggcgtttcccggcgtgcgggagcttatggacgggcttaaggcgggaggctgccggataggcatagccacctccaagaacgcggcggagcttgagcacagccgcgaacagttcggggatattgtatcccgtgcggactgcgtaatatgcgcggacgatacggcagagcacaagcctgaaccggggccgctgctcaagtatatggagcgtaccggcgcgaaaccgtcagaggtgctttacgtgggcgatacggtgtacgacatgcagtgcgcccggggagcgggcgtagatttcgcccttgcgcgctggggcaatccggacggcagggtggatgcggattacgacgagccgacgcctctggcactgctggaaaaactcagataa

SEQ ID NO: 134 - DNA, 2133 bp, Unknown
  Unknown gut bacteria
gtgcaatcgcacgccgtatctgttgagcggagcaatagcgacaagggaaaggaggcagaggaaatgcccagaaccacaccgctggaaaaaacgagaaatatcggcataatggctcatattgacgccggaaagaccaccaccaccgagcgcatacttttctacacgggaaaaatacacaaggtaggtgaagtgcatgaaggcgccgccactatggactttatggtgcaggagcaggagaggggcataaccattgcctcagccgctaccaccacatattggcgggagcatcgcataaacatcatcgacacgccgggtcacgttgactttaccgttgaagtggagaggtcactcagggtgctggacggcgccgtggcggtattctgcgccaagggcggcgtagagccccagagcgagacagtatggcatcaggccaccaagtacaacgtaccccgcatagcctatgtgaacaagatggacatagtaggcgcggacttcttcaacgtcataagcatgatgaagaagcgcctgggcgcaaacgccgtgcccatacagctgccgataggcagcgaggcagactttgtcgggataatcgaccttgtgcgcatgaaggccgaggtgtattacgacaacgagggcgtggatatacgcgaggaggagatccccgagcatatgcgcgccgacgcggagcggtacagggcagagcttttggacgccatagccgacgcggacgacgagatgatggaaaagtaccttgatgaaggcgacctttccccagaggatatgatcgcctgcataaggaaaaagacaatagcaaacgagctggtgccggtatgctgcggcacatcctaccgcaacaagggcgtgcagcccctgctcaacgccatagtggacttcctgccctccccgttggatgtgccagcgccagttggtaccagcaaggatggcactaaggagatacagctcaggtgcgcggacgacgagccctttgcggctctggcctttaagatagttacagacccctttgtggggcggctggccttcttcagggtgtacagcggcacgctcaagtccggcacatacgtttacaattccaccaagggcaagcgcgagcgcgtgagcaagctggtgctgatacacgccgccagccgtaccgaggtagatgaggtatacgcgggcgacatcgccgcgctggtaggccccaaggagaccggcaccggcgacaccctctgcaccgagggcaggccggtattgcttgaatcaatggagttccccgagcccgtcataagggtatcaatagagcccaagaccaaggcggggcaggaaaagctggagcagacgctgcaaaagctctccgaggaggacccaaccttcaagacctatgttgaccgcgagaccggccagaccataatagccggcatgggtgagcttcaccttgaaataatcgtggacaggataacgcgggagttcaaggtggaatgcagggtgggcaaccctcaggtagcctatcgggaggcccttacaaggaccgtaaagaccgagggcaggttcgtgcgccagacgggcggacacggccagtacggccactgcgtggtggagttcagcccgggcgagcccggctccggctttgtgttcgagaacaagaccgtgggcggctgcatacccaaggaatttatacccgcaatacagcagggcataaaggaagcggcgggaagcggcgcgctgggtggctacgagctggtggacttcaaggcgacgctgctggacggctcctatcacgaggtggattcctcggagatggcgtacaagatcgcgggcagcatggcgctcaaggaggctatggaaaagggcggctgcgtgctgcttgagcccgtgatgaacgttgagatagtcactcccgatgaatacgtgggcgacgtgctgggcaatattacttcccgaaggggcaagatcgtcggcacggagaaccgcggcgtgactacggtgatagactgccagtgccccctttccgagatgttcggctacgctacgcacctgcgctccgcaacgcagggccgcggtaccttcacgatgcagttcgaccactatgagcaggtcagcgacgcaattgcaaagaagatactcggcaaatactaa

SEQ ID NO: 135 - DNA, 699 bp, Unknown
  Unknown gut bacteria
atggagcctgtatcaaaggaagaattcctgcaaaagctggagcaggcgcgcaaatgccgcaccggccttgaatccctgtgccttcacgatgcggacatatccggcgccgatttttccgggctggactgccagtggtgggacatgaagaacgtgcggctggacgggtgcgatttcgagggcgctacgattgcaaacggcaagttcgaaaactgctcctttgtgggggcgagcttcaggaacgccggccttcagggggcagacctccgcaacgccgaccttaccggcattgaccttcggggaggcaacgtatacagcgcatggcttgagggggccaggctggacggcataatacaggacgaaagcaccaggtatttccggctgcgctgtcccgaaacgggggcctttataggctataagaagtgctacgaggacagggtggtaatgctgctcatcccggcggaggcaaagcgcgtctccgccaccaacaacgcctgccgctgcgataaggccaaggtgctgaccataaccagctttgactttacgcaaagctacgactgggcggtgtcccttgttgacgagaacttcgtatataaaaagggggaatggatctatcccgacaggttcaccgaggacaggtgggtagagtccacctacggaatacatttctggatgagccgcgaggaggccatagcctactga

SEQ ID NO: 136 - DNA, 885 bp, Unknown
  Unknown gut bacteria
gtaaacgtattaaaaccgccgggaatgagctccagcgacgtggtgacggacatccggcatatattcaacatgaagcgggtaggccatacgggcacactggatcccggtgcggctggcgtgctgcccatatgcataggccgggctacgaggctttttgattaccttgtggacaaggaaaaggagtacataggcgagataaccttcggtatagctacggatacccaggactcctacggcgcgccggaaggacgctccgatgctgtagttaccggggagatgctcatggaggcgctgcctaagttcacaggccctcaaaagcagaccgcgcctctgtattcggccctttcggtggacggaaagaagatgtataagcttgcccggcagggcgttgaggtggagcgcaaggttagggatataaacgtgccggagctttcgttcatatcacagaccggctgcaacagatatctcgtaaagatcgtctgctccaagggcacatatgcgcgaacgctctgcaacgacataggcgggagcatgggagttcctgcccacatgtccttcctgctgcgcacacgctccggggcgtttgagctggacggcagctttacaatagacgagctgaaggagcttaaagaaaagggcgagctttataaggcggtcatacccatggagcaggcgcttatgcatataggcgaagcccgaatgaccctgaacaaaaaaggcgaacggttcctgactcatggcgcggaggtggtctgtcccggcatagaagaactgccaaaggatacccctctcagggcatactgcaacggcaaatttttaggaatagccaaatcaaacggcgaggcggtgcatatatgcaccttcctcggtcaggaagaagaatga

SEQ ID NO: 137 - DNA, 1443 bp, Unknown
  Unknown gut bacteria
atgaattatcgcgtgttgggaaggatacttggccttgcgctggtaacagaggcggcgcttatggtgccttccatgctgataggcctgtatcacggagaatctatactgggggtcagtactaccataggcatactgctgatagtcggtatgctgctgctgtcctttaagcctaaggacaacaagatattcgcccgggagggttttttaggcgtgtcattctcatggatactgctgtccatgttcggcgcgctgccctttactatagaaaagatgatacccgactatgtgggcgctgtgtttgaggtggcgtccggctttacccccaccggcgcatccgtgctgacagctgtcgagggctgcccttacgggctgctgttctggcgcagcttcaccaactgggtgggcggcatgggagtgctggtattcatgatggcggtgctgccccttgcagatgaccgcagcatgcacataatgcgagcggaggttcccggccctgtggttggcaagctggtgcccaaggccaggcagagcgccatgatactctacggcatttatgtggtgataagcatattggaggtagtgttcctgcttgcgggcggtatgccgctgtacgacgcgctggtgagcaccttcgccactgcaggtaccggcggcttcagcgtaaagaacgccagcatagctgggtataacagcccatatgcggaatacgtcataagcgtgttcctgctgctgttctccataaacttcaacctgtacttcttcatactgttgaagaacataaagcccatattcaaaaacgaggagctgcgctggtttctgggcatagtcgccgcgagcgtgatagctgtagcggtaaatatacgcaatatgtatcccacagtggaggagattatacgcaaggcgctgttccaggtggcgagcataatctccacggcgggcttctccaccgctgattttgacaggtggccggagctttcaaggagcatactggtgtgcctaatgctcatcggcgcctgcgcgggaagcacgggcggcggcatcaaggtatcgaggcttataatactgctgaaatccgcaaggtgcgaggtcagccgcatgatgcacccccgctccgtgaaccgggtaaagctggagggcaagaccatagacgacgaggtgctgcacaatactctcatattttttgtgatgtatatgcttatagtcgccgtgtctacgctgcttgtggcatcctttgacgagtgcgactttacgaccaaccttacggcggtgatcgcctgcatgggcaatataggccccggtctcggcaaggtagggcccatgggtaacttttcggagttctctgcgctttccaagatagtgctcacgctggatatgctcataggcaggctggagatattcccgataataatggtctttacgccggaaacctggaagaaggtataa

SEQ ID NO: 138 - DNA, 699 bp, Unknown
  Unknown gut bacteria
atgagcacaccacacatcaacgcaaagcctgaagatttcgcaaagacggtacttatgcccggcgatccgctgcgctcgaagtttatcgccgagaccttccttgaaaacccggttctcgtgaataacgtccgcggggtgcagggctataccggcacctataaggggaaaaaggtcagcgtgatggccagcggcatgggcatgccttccatgggcatctactcatacgagctgttcaatttcttcggcgtggaaaacataatacgcataggctccgccggcgccatacacaaggatattcccctccgcagcatagtaatgggcatgggcgcctgctacaataccgtctttgccgatcagttccggcttcccggccacttcacccccatagcgagcttcgacctgctccgcaaggccgtggataccgccgaggcaatgaaggtcaactaccgcgtaggcaacctgctctccaacgacctgttctatgatgacagcggcagcactctggattggcagaacctgggcgtgctggcggtggaaatggaggccgcggcgctgtatatgaacgccgcccgcgcaggcaaaaacgcgcttgccatctgcaccatatcagataatctcgtcaccggcgaggaatgcacggcggaggaacgccagaataccttcacaaagatgatggagctggcgctcaccatagcgtag

SEQ ID NO: 139 - DNA, 831 bp, Unknown
  Unknown gut bacteria
atgatacctaccctctcgattgtttttatggctatatcagcccttgtgagcataggactgcctatagcgctgggcataatatggcataagcgcaccggcgcgaaggcttcatcgctgttcatcggcgcagctgcgtttgtggtgtttgccatgatattggaaaacatatgccacaggctcgtgctgtacggcagcggctcctgcgccgccttcatgcagtccaacctgtgggcgtatgggctgtacggcgctctggcggcgggtgtgttcgaggagacgggacggttatgcgcctttaagctgttttttaagaagaaggacgacagatgtgagggcgttatgtacggtatagggcatggcggcgtggaggcggtgatggtatccggcctcaccatgataagctacattgcaatctctgcgataatcaacctttcgggcggcatggcgggccttaccgttctcggcatcggcgaggatacggcctccgtgctgatgaccgcgtttaccgggacgaatccgtttatgtacctcgtgagcggtattgagcgcatcatggcgatagccttccatatttcaatgtcggtgctggtgttcgccgcggtaaagcagaagggcaggggctggtattatccgcttgccatagggctgcacgcgcttctcgacctgggggctatggcatatcagacaggcatcataaagagcattatcgccgtagagggctatgtgctggtatttacggcgctgtgcgcgctgctcgcggccagggtatacagggggatggcggagcaacggcaggaaacaaatcaaaattatactgttgacaaggaataa

SEQ ID NO: 140 - DNA, 1326 bp, Unknown
  Unknown gut bacteria
atgcagcttagcgagcttataaaaaaagatcctgtaatcgagcgcgttgcaaaggcggaggaggtcatctggtttaatccgggccttcggtgtcgggacgccgcatttgaaggcatcagtcttaccatggcggacattgacgacgccgaggcgcggctcaggcgcttcgcacccttcataatgcgctgtttccctgaaactgcaggcaacggcggcattatagaatcccctctcaccgaggtcgagcatatgaggcagcggctcaacggacacggcggcggcataggcggcaggctgctcctcaagcgggacagcgaccttgccattgcaggctccgtaaaggcacggggcggcatatacgagatactaaagcacacagaggagatcgccctcgaaaagggccttctcagtggatatgacgacgactatgcgaagctggccggcgacgagtgccgcagggtgttttcgcagtacaccgtgcaggtgggctccaccggcaaccttggcctttccataggaataatgagtgcggcggtagggtataaggtaatagtacacatgtccgccgatgccaagcagtggaagaaggagctgctgcgaagcaaaggcgtgaaggtagtggagtataagtcggactattcagaggcggtgaagcggggcagggagctgtccgacgccgatccaatgagctactttgtggacgacgagaattccgtcgcgttgttcctgggctatgcagtagcggctaagcggctgaaggcacagcttgaggatatgggcatagagatagacgaaaacaggccgctgatagcttacataccctgcggagtaggcggcgcaccgggcggcatagctttcgggctcaggctgctctttggggacgatgcccatgtattcttcgtagagcctactcaggcgccttgcatgctgcttggcatggcaagcggactgaacaataagatatgcgtgcaggacgtgggccttacagggctaactcacgccgacggacttgcagtaggcagaccctcaggtttcgtgggcggcgtaatgaagacgctgcttgcgggcgaaatgacggtggaggattataagctgtacgattatatgcgggcgctgctggataccgagggcatattcatagagccttcctcctgcgccgcgtttgaaggccctatgaagctctgttcaagggaaggagaggaatacataaggcggcacggccttgaggataagatgcaaaacgccatacatatcccatgggccacaggcggcaggctggtgccggaagaaataagaaaagagtacatgagtacctatctaaaataa

SEQ ID NO: 141 - DNA, 696 bp, Unknown
  Unknown gut bacteria
atgtacggatattacggctacgacacgctgttccttgcggtaatagttgtgttcatactgggcatatgggctcagataagggtaaaaaacacatataagaagtattcgcaggagtacgcctcctcaggcgttaccgcagccaacatggcggaacgtatgctgcgggagcacggaagctccgttcaggtaactatgatacccggcagccttacggacaactacaacccccggacggggctggtcagcctgtcccagggcacctacggcagcacgagcgtagcggccctcgccgtagcggcccatgagataggtcatgtcatgcagcatcaggaggggtatatccccataaagatacgcaacgccatactgcccgccgcctccataggctccaccgcagccccctatatagtcatactgggcgcgataatgggctcctataaccttgccatgataggcgtgtatctcttcctcgccatgctgatattccagatagtgacgctgccggtggagctcaacgcctccagccggggccttgagatgctggagtccggcggctatatctcctacgatcagcggggcgatgctaaggcggtgctgaaggctgccgccatgacctacatcgttgcggcgctttccaccctcgtatccttcctgaggctgctcatgatagccaacaacagcaggcgaaggaattaa

SEQ ID NO: 142 - DNA, 1608 bp, Unknown
  Unknown gut bacteria
atggcgctgttggtaaaggatataaagcttccgctgaatgaaaaggagtctttgctgtcaaaggtgacggcaaagactcttggcataccggaaaacgccgtaaaggggcttgcgataaagcgcatttccctcgatgcacgcaaaaaaaacgatatttgcttcatatacacagtagagataagccttgagcccagggacgaaaggcggatattaaagcgcggcctgcccacggtatgcgaggcggaggcgcgggaaatacgcgagctagctaccggcagcatacccttggataagcctatcatagtagtgggcatgggtccgggcgggctttttgcggcgtatacgctggcgaagcacggctacaagccaatagtgatagagcgcggcgagccaatagaaaggcgtaccctcgatgtcgatgtcttctggaacggcgggaggctcagggaggacagcaacctcatgtacggagaaggaggggcaggagcgttttcggacggcaagcttaccacgcgcataaaggacagccgtgctcacgacgtgatagacatacttgcgtatcatggagcgccgaaagagatacgcctgcttgcaaagccgcacataggcacggatatactggtcaaagtggtgagaagcatacgcgaggatatagtgcgcatgggcggcgatgtgaggttttctgctaagctcgtgggcctggagaaggacagcggagataatataacctctgtaaccgtggagaaaaacggtgagagggaaaagatcccctgcgccgcatgcgtattggctacaggccagggcgcacgggatacctaccatatgctgtacgatatagggcttgagcttttacccaaagctttcgctgtgggtgtacgcatagaacacccaagggagcttatagacagatcacagtacggcgagtttgcatcgcacccgaggctgggcgcggcggagtaccatcttgcggataaggctggaaacaggggagtttacagcttctgcatgtgccccggcggcgtggtggtggcgtcctcgtccgggcctgagcaggtggtgacaaacggcatgagccgccatgcacgcgatgagcagaattccaatgcggccatagttgttcaggtagacagcagggattatacagtcggcccccttggtgggctggactttcaggagcaaatagagcgggctgcgtattacgccggcggcggggattttaccgcccctgcggagcgcgtcggcgactttttgaggaaggctacccctaaggccttcggcagcgtaaagcctacttaccggccaggcgtgtgcagaagcaacctgtaccagtgtctgccggactttgtgtcggaaggaatacgcgccggaataacggcgttcggaagaagactaaagggctttgatatggacgatgcggttattactgcggtagagagccgcaccagctccccggttcgcatacagcgcgacgaggagggctgtgctacccgcatgaaggggttataccccgtaggcgagggagcgggctacgccggaggaatagtaagtgccgcggtggacggcatgcgtgccgcggaacgcataatggccattttccggccgatgtaa

SEQ ID NO: 143 - DNA, 1341 bp, Unknown
  Unknown gut bacteria
atgccttctgacagggtaaacgagtatcttaaaagcgtatgcgccgaggtacgctggaggcaggcgcacgacgcggtgcgggaggagcttgccgcacacatagaggatcagaccgaagcgtatatgcgctccggcatggagagagaaacggcggagcggaaggcagtggaaagcatggggagcccggcggagacaggacttcgccttgacgcgagctaccggcccaagccccagtgggggccggtgatcatgctgacagcactgcttatgataagcgccgcctgcagatttatggagtatggaaacggcggcagctcattaggcaaatttattattgccgcctgcataggcggcgggctgtttgtctggctgtataatgcagacctttaccggctggcggggctgtcgtggcaggcttatattgcggtgatagcactatgccttgctgcacttccgctgtgctattcctgcgggcacagcgagatcgccgtgctgcaaacggctgccataaccataccggcgctgtttgcaggctggctgtatgtatgcaggggctttggggggctgctcacaggcgggacgatgctggcgataccgatagcgggaatgcttatggctccatatacgggagcagccgttaacgtcgccgctgcgtgccttgcggtaatagcgtttgcctcggtatgggggctttgcggaaagaacaggtggctgcccatagcgttaagctggggcggcgtgctgtgcggcggctatgggctgctcaggtcaaatgcgcgctggtggcagcgcgttgcggtgatgctgcgcccggaggcgtttcccgaggattacagttaccagataagggtgataagggatatgctgcgcgcctcgaggcccataggccgcggacaggatactgaaatgatgaggtattccatgctctttaaaagggacgggagcatagaccgcgaagcgtatgtgtattttatgctcaccacaatagcccaccgttacggctgggtgatagccctgataatagccgcggggctgatagggctcatagcgatgctgttctttaaggcgctgaagcttacgagcctgttcggcaagatcatgggctgcggtatctgcgcgtcgcttttgatgcaggcggtgcagtacatgctcggcaactgcggtattgtgataatgggctggctgccgctgcccttcctttcctacggcaacacatcgcttgtggtgaatatggcgatgatggggctgctttgctccctgatgcgctccgacgggctctatgcggacaaggaggcaaagcccttgaataagctcaggctacggctggagtgggaaaaataa

SEQ ID NO: 144 - DNA, 1173 bp, Unknown
  Unknown gut bacteria
atggaagaacgggaaaaccgggaggccgcccgaagaaaaagacagcggcaccgaaagatcatgaatgtgctgagacccatactgatatacggcataagcatagcggtatgctctgccatactcgtcgcgggcgtaaactatgccctggacgagttcgtgcgcccggtggacgtgaacgacgctacgccggttaccgttaccatagaaaagggcagcggcgcatctaccatagccaagatactctacgaggctggcggagagggcaacaagggccttataaacaacaaggccgcattcaaaatatatgttgacttcactggcaagtccagcacccttaaagcgggaacctatatattgagccgcaacatggatattgcccagatggtggacataatctgcaccggcaaccccgcgagaaagaccgtaaacgtaaagatacgcgagggcatggaggtagaggatatagcggaattgctggtggaagagggcatactggattccaccgaggagttcctgagcctctgcaggagcggggaggcattctctgaatacagcttcgtgaacagcattctgcagagcgcagataaggatcagcgcaagtacgcgcttgaggggtatcttttcccggatacctatgaggtgtacgccgacgcctcagcgaagagcgtgataacaaaaatgctcattcgcttcaatgagatattcagcgacgagtacatggacagggcgcaggagctgaatatgacggtagatcaggctgtgacaatggcctccatgatagagcgcgaggccaagactgccgactttgataaggtatccgcggtattccacaacaggcttaacagcggtatgaagctccagagcgacgccccgctgaaatacatactcgatgcgggaaacacgctggactatacatcggatcagatggcggtgaactcgccctacaatacctacaacatagacggtctgcccataggtcccatatgcaacccaagcgctgcggctataaaggctgcgctttatcccgacagcgatttcatgggagagggttatctgtacttcgtgctgaaatcccgcacccaggacgccaatgacccggacttcggcaagctggtgttctccaagagctacgaggacttcctcaaaaacaaggaggcttataagaacagctga

SEQ ID NO: 145 - DNA, 942 bp, Unknown
  Unknown gut bacteria
atggtactgctgatacaatacaccctgctgttcgcttctgttctgctgctggtggcccttggcggctgcttctccgagcattccggcgtaatcaatctgggccttgaaggtataatggtaatgggtgctctgggcggcgcactgatgatgcgctacctgcctgacggcactccagctgcccttatggtactgctggtaatactcaccagcatcatagcaggcatgctctactcctgccttctggctatatccgccattcactgcaacgctgaccagaccatcgtcggcaccgccatgaacatacttggcactgcggcggccaccgttatcgtaaaggctataaacaccgcagctaatcccgatgacgtatcctctaccatacagtacgtcagcgccaagaaggccttccttgtgaacataggctcctttgagttcaactggttcatgctggtcgcagtgatagcactggtgctgtcctatatcaccctatacaagaccaagttcggccttaggctcatggcctgcggcgagcatcctcaggcagccgacagcgtaggcataaacgtattcaagatgcgctgggcaggtgtgctgatctccggccttctgggcggtctcggcggcatagtgtacatcacctgcggcgtaagcgaatggaagttcgaatatggcgtcgcgggctttggcttcctctccctcgccgttatgatatttggccagtggaagcccacaaagatagcacttgcagctctgctgttcggattcttcagggcgctgtcgaatgtatacttcggcttcgatttcctcaaaaacctgaatatacccagcggcatatacaatatgctgccttacatcatctcccttgtggtattggccttcacctccaagaagtccagagcgcctaaggcggagggtatcccctatgataagggcctgaggtaa

SEQ ID NO: 146 - DNA, 687 bp, Unknown
  Unknown gut bacteria
atgttgttgcgtatctgtggtagtgctgatacaattctctatgcaaaaggaaaggagagaaaaatggagtttgccataaagcaggcagagttcgttaccagcgcgggacttggcagcccttatcccgaaaagaccgccgccgagatagctatagtgggcaagtcaaacgtgggcaaatccagcctgatcaattccctctgcaacaacaaaaagctcgccaaaacctcgtccaacccgggaaagacgaggctcataaacttctttaagataaacagggagttttactttgttgacctgccgggctacggctttgccagagccccgaagaccgaaaaggacaaatggggaaagctgatggaggattacctttcctccggacgcgtcgatcatatattcatgctcatagatatacgccacgctcctactgaggacgacaaacttatgctgcaatggataatatattacaacctgccattcacgctcatcgccacaaaagcggataaactagcaaagagcaagcgggcgcagatggcgaacgcagcggcaaaacagctcggcgcgcctcccgctgcaatagctttttcctcggaggatggctggggcagggattttgtgctccagcgcatggatcaggtggtaaaagatgtaaaaaacctgcgcaccggtattgacatagagcagcagtaa

SEQ ID NO: 147 - DNA, 963 bp, Unknown
  Unknown gut bacteria
atgaagcttggaaagctgagcaacgataaactggatagtctgatactcagcaaattcggacatatgaggaaagaagtagtctgttccccccatgtgggagtggactgcgcggcggtagaccttgggggcaggatagctgtgctgtccaccgacccaataacggccgccgataaaaatataggcagccttacggtacatgtgagctgcaacgacgcggcggcggccggcgccgagcccataggtctgctggtgacgctccttataccgccacatggcacggaagaggaggtagagcatatagcccaagagctatccgaggctgcgaagcttgcgaatatagaaataatcggcggccataccgaggtaaccgcttcggtgacccgctatgtcacctgtgctgcagtaatagcccgggcgggcaaaaacggcattatcactcccgccggcatgaaggcagggcaagatataatcatgaccaagatggcgggcatagaggggacggcagttatagcctcagacgctgccgggcgtaccgggctgacagatgccgaactggaggaagcacggggctttatgtccatggtaagcgtagtcaaagagggactttacgctgcagagcacggcgccactgccatgcacgacataaccgaaggcggcgtgttcggcgccgcgtgggagatggccgaggcttccggctgcggcatggtgctgtatcccgaaaaggtgcttatgcatccaataaccaaaaaaatatgccagaagttcggcatcgacccttacaggctgatatccagcggcagcatgcttattgcctgcgacgacggcgaaggcatggtgaagggccttgccgccataggcatacctgccgcggttataggcaaggcggtagagtctggcgtgagcaccgctgacggaactgagataccggcccctgaggcggacgaattatataagattatataa

SEQ ID NO: 148 - DNA, 1155 bp, Unknown
  Unknown gut bacteria
atggaagacaggcgcgagaaggacaagggacttaaaacaggatggctttggaccataacggcagttttggccctgctttgctgcgccgccatatatgtagactgcgtgctggaaaggttgtacagtgagcagcggaagcacatacagctttcggcggaggccacgccggtgcctgtgataagtgtcaccccgtcgccgatacctacgccggtacctaccagagcaccaaaactcggggacatagaaaatgtaagcttcccggactatgataccggagccgcgtccgattacagctatcagagcgacgaactaaagatagctgtaaacaaggtagaggacgacggcgtaacatattacgtcgcggacatatggatgcgaaatgttaactgcttccgcaccgccttttccagcggcaagtaccgggggaagcgggaatctgcggaaaagatcgccaaggacaataacgcgatactggcggtcaacggagactttttgagcggcctcgtgatacgcaacggggagcttttccgccaggcggaggtaagagctacgcccacgccggaccccgatgcggcgtctgcgccgggctataacagctatggaatgtacggcacggtgacgcctgcgctgtccactgatgaagcggcaaggccggagcgctctacctgcgtgctgtatctcaacgggaccttggccacgaccgaattcgaggatttcagcactaaaaaagctatgaaaaaaggtgcgtggcagggctggcagtttggccctacgctggtacgggattccaaaccacagaaggacgtaaagaagcagggcagaagtccccgctgcatactcggctactatcagcccgggcattattgcctgataattatagacgggcggcagaagggctactccataggtatgaattttgacgagatgaaggagctctgcactcgcatgggtctgaaggatgcgtataatctggacggcggcggcagtgccataatggtgtttaacggcgagataatcaaccggccatcgggcaaaggcgacgctcgcaagctgctcgacatgatagttataggcgaataccttgacggaggggaactgcatggcgtgacgccttcacctgtacccacagcaactacggaggaagcgggcaattga

SEQ ID NO: 149 - DNA, 1080 bp, Unknown
  Unknown gut bacteria
atgggtctgaacagcccgaggctgcccaaggtgatatccgtaagggaggacgatgagggggcggtggtgaccgaggggtatatcgacggcgttacgctgcgaagggcgctggataacggaaggcttggcgaggatgagctcaggcggctcgccatagatatatgctccgccctttctctgctgcacagcagccgcccgcccataatacacagggacataaagcctgaaaacataatatgcgccgatggcggcgggtatgtgctgatagatttcgatgcttcccgtctctttaagccggaggctacctcggataccgttaccctcggcaccaacggctacgccgcgccggagcagtacggcttcggtcagaccgggccggagagcgacatatactccctgggcgcaacgctatacgaggcggcggagggaaagccatacgccgcgggggccgagataagctgcccaatggggcggataataaaaaaatgcctcgaattcagcgcaagggacaggtattcctctgcggacgagctgcttgaggagctgggcgttaaaaagaaaaatcccgccgctatgcgtgccgtgcccgtcatgcttgcgctgctgctcggcttttgctccggccttgccgctggcaggggggtgcgcccggaggaggaagcgcagacgcgcagcgaagcgccgcctgcggtggagactgcggtggagactgcgtcttctgacgcggagataccctgcacctgcgagctcatcacccgcccgaacgacgcaaggctggacggacattcgatgttcgactatcccggcgcggagtttttgcccaagagcgtaagcggcgttacggaattcccgctcacgctggatataaaggtcttggcaccggtatactcaaaggaatgcaaggcaaaggtccacaccgcccagcattgggaatactccgttcccaaggggcaggagggcgagaccataacgggagacaagataacggtagacgggcctggagagtattacatcttctattactgcccggacttcaacggcacgggctacggcgccgactttggcttcaaggtaagataa

SEQ ID NO: 150 - DNA, 891 bp, Unknown
  Unknown gut bacteria
atgggtaggatagtaaggggccttatggcaaacgatacggtaaagctcatggctattaccggcaaggacatatgcgagaccgcccgtgagcttcacggcctgtcaagggtgtgcacagcggcgctgggccgttcccttctcataacagatatgatgggggcgcagctcaagggcgaaaacgacaagctcaccaccatagtcaaaggcggaggcccggcgggcaatatagtctgcaccgcggataacaggggccacgtaaagggctacatagaaaaccccaagctggagctgccgctaaacgacagcggcaagctggacgtttccatggcggtaggctggttcggcgagcttacggtagtgcgggatctcgggctgaaggagccctatgtgggcaagagcaatatggtgtccggcgaaatagcggaggatttcgcacagtatttcacggtgagcgagcagcagccctctatggtatacctgggcgtcagggtagacccccacgacggcaaggtcagggccggcggcggcctcatagtgcagcccatgcccttctgccccgatgacgtaatagataacatacaggacagggtgccgatggtgaagatgcttgccggcatgctggatgacggcatagagctggaggcttcgctgaagaagatattcgacggcatagatatgaccttcactgagaccatggagacagggttccgatgcgactgcacgcgggagcggctggagagggtccttatatccctgggacgggacgaactcagtgacatgatagagaaggaacacggcgcggagctgacctgccacttttgcactgagaagtacaggttcagcgaagatgagctcaagggcctcctggaggaggccggaaaggcgcaatag

SEQ ID NO: 151 - DNA, 2223 bp, Unknown
  Unknown gut bacteria
atgagtttaaaactgaaacgtgtactggccgtactggtgctgatcgcgctggtattcggctggtatgtcaccttgttcggcatcggtgacaaaacaaaggacgatgccatcacttcggtaaaatctgctttaaaatacggcctggacattgacggcggcgtctatgtcgttatggaggctaagacagacttgaccggagacgaactcaagaagctgatggaacagacccgcgcggtacttgacaatcgtgtcaatcaaatgggtgtcgcggaatcttccgtcactatcgagggcaacaagcgtctgagagttgagattccgggcatggaggatgcggaagacgccatcaaggcgatcggtaaaaccgcacagttatacttcattctggcagacggcagcgtggtactggacggcagccatgtcaaagacgcgcagattgcgacagatggaagctactacaaaattctgctcgactttgacagcgaaggcgcgaccttgttcgaagaaggaacccgcaaggcgtttaaccgtgaagtaacgtcaaccatcgaaggtgtggagagcaatcaaatcgcgatcgtactggataacgaaatcgtggtacatccgaatgtaaacagcgtcatcagcggcggaagctgtgaaatgacaggaaactatacaaaggaagacgcttccatgaccgcggcgctgattcgaggcggcgcgcttccggtagaactggaagaagtacagtcctccgtacagacggcgaccatcggcgcacacgcgctggacaagtccatcgtggcaggcgcgatcggtctggggattgtattcctgttgatgctgatcttttacggcatgctggggttggtcgcggatatcgcgctcctgctctatgttgtgatgttcctgtggtcgatggtcggtctgggtgtcgttatgaccctgccgggtatcgcggctctgatcctgtccatcggtatggcagttgacgcgaacgtcatcatttttgcgagaatcaaagaagaaatctgcgccggcaaaacgatccgcgtcgcggtggatgccggctttaagaacgcgctgacaacggtactcgacgcgcagattacaactctgatcgcggcagtggtactttatgaaatcggtacgacctccgtcaaaggtttcgcgctgaccttgatgatcggtattgtcatcagtatttttacagcggttgttatcacgcagctgtttatttccctgcttgccaataatccgaaattcgcgaagaacaagtactttggcgtcaacgatgatctgaccccgaagcagatgttaaataaaactttctcatttatcaagcatagaaaagtttactacatcatcagctgcgcgatcatcatcgcgggcctgctgttcgcgacgatcggcggtatgaattacggtatcgactttaccggcggcacgaccattcaggttgaaatgggcaaggaggttccgattgaggacgtcgaaaaatctctcgaagcctatgaattgaacccgcagattatttatgcgggagaaggcaatacacagattgtcatcaaaacgattaaatctttggacaacgcagcgcgtggagaaatcatcgacacgctgggtacggacttcggcatcacccaggaggatgtactggcttccgagcagttcggcccgtccgtcggaaacgagctgaagatgaacgcgttgaaggcagtaatcattgcttcaatcggcatgctgatctatattatcttccgcttcaagtcctggaaatacggcgtgacggcgattgccggcgttgtgcatgacgtactggtggttatcgctttctacgcgattttcggctatacggtcaacaatccgttcatcgcggcgatcttgactttggtcggatattccatcaacgatacgattgtaatctttgaccgtatcagagaaaacaaagccctgcatccaaaggacaacaacgagaccaatatcgacctgagtatcaatcagacgctgaatcgaaccatcatgacctcgctgactacgctggtggttatgatcccgctttgcatcatggtttcctccgcgatcagagaattcatcattccgctgatggtcggcgttatcgtaggatgctattcctccatctttgtttgcagcccgctttactacgatctctgcaagaaggatgaaacctccaagtatgtattaaatacatccaaaaaggcaaaaaagacaaaatag

SEQ ID NO: 152 - DNA, 1467 bp, Unknown
  Unknown gut bacteria
atgaatatagtctttttaccggatcatacagtaccggcgctggtcggaatctacacgatcaatattttgatgattatcgctgtcatttttgcggagcgcaaaagcccatcggcaacgctcgcgtggatcatggtgctggcctttgtcccaattatcggcttcgttttttatctggtttttaatcagaatatcgccagaattaaaatcaatcggctgacggaaaacgaaaaatacgtggtgagtcacgcgttaaaaaaacagatgcaggaaatggacaatccgcgctacgcgtttcattgtccgacgaccaggaactggcggcatctgatcaagctgaatcaggtctacggacacgctttttacagcgagaacaatcaggtggagctgattacggacggaatgacgctttttgacaggatgatgcgagatattcagggagcgaaggacaccatcaatatggaatacttcatcatcaaaaaggattttgtcgggatgtcgctgatcgaacttttgacacaaaaggcgaaggaaggcgtgacggtacgcctgcttttggacagcatgggctgccgaaccatcaatgaacatgtactcaaggactatctggcggcaggcggcaaggtcggcttttttttcaaaccgaaattcaagatcttcggtctgaagctgaactaccgcaatcaccgcaaaattgtcgtcattgaccacaaaatcgcttatacgggcggctacaatatcgcgaaggagtacatcggacaaaagaaaaaattcagttattggcgtgacacccatgtcaggattaccggcgacgcggtggcggatctcaacggccggtttattttagattggcggttcaccaccaaggaacagctgcagcttgaggcggcacgtatggcagagggggagacaccgggacatatcggcgtgcagatcgtttcttgcggaccggaatctccatctgaggaggtaaaacgtgccatgatgcgtatgattaccttcgccgagaagcgtgtttacttacagactccgtatttcgtaccggatccgagcattgtcgaatccctaaaaatggcggtgcagtcgggggtcgatgtcagaattatgattccgcacatgcctgatcacgtttttgtctactgggcgacgtattcttatgtcggagagctgcttcgatcaggcgccagagcctatatctatgacgacggcttcttgcatgccaagacactggtcgtggacggagaagtcggcaccatcggctcgaccaactttgacaaccgtagttttcgtttgaattttgaaaccaacgcgttcatttttgataaggacttcgcgcagcagatggagcgcgcctttatccacgatatggcacatcacggacatgaattgacctacgcggattatctgaagcgaggaaaactcatcaaatttaaggaagcaatctcaagactcttatcggatatattatga

SEQ ID NO: 153 - DNA, 2064 bp, Unknown
  Unknown gut bacteria
gacaaatacgaaccgagaagaagaggctgggtatggagagagaaagctgacaatcagcacatgggaccgtttgagtaccgtgagatttccaagccgttgaagcagagcgttccgctgcctcctgcaaaattcatggaagatattgacccacagccgatgcagaccatcactacagagatcgcttccggaagattcgaggacgatatccgcagaatgagaatgggcgcttggcacggcgctgaccatctgatggttatccgtcacatgggtcagtctcacatcgacggcctgatggaaggtacaccgcagggtatcggcggtgttccgatcaccagaaagcagatcagagcacagagaaaagccatcgacatgatcgaggatgaagttggtcgtccgatcaactaccactcctatgtatccggcgttgccggtccggacgttgctgtactgttcgcggaagaaggcgtaaacggcgcgcaccaggacccacagtacaacgttctttacagagatatcaactgcgtcagatcctttgtagatgcttgtgaatccaaaaaaatcatggcttgggcagacatgctgcagattgacggtgcgcacaatgcgaacgcgaccgcaagagaagcatggaaggtacagccggaactgatcgtacagcatgccatcaactccagattctccgagaaggtaggcatcaagccggaactgatctccttatcgaccgtaccgccgacagcgacaccggcgccttgtatgtatatggacctgccttacgcggtagcactcagagaaatctgcaacagatataagatgagagcgcagatgaacaccaagtatatccagtcctccgctcgtgaagcgacggttacgcacgttatgaacatgttcatctccaagctgaccagcgcggatattcagtccacgattacaccggacgaaggcagaaacgtgccttggcacatctacaacatggaagcctgcgacaccgcgaaacagactctgatcggcttagacggcatcatggatatggtagagctcaaaaaggacggtccgctgagagatatggccagagacctgaaagaaagagcttgcttgttcatggaagaaatcgtagagaacggcggctacttccaggcagttcaggatggcttcttcgttgactccgcgaaatatccggaaagaaacggcgacggcatcgcgcgtaagatcgagggcggcgtaggctatggctttatctttgagagagatgaagattacatggcgccggtaaccgcgcactatggctataacaacgtagaacagtacggcggagaccctgagaacccatccgcgctgatcggcggctgtacgtttgaagacagaagcaagatcgtttacattgacgagcttgatgaagaggataacgtaaacgtaagactcgcgaaggtcgcgaaatacagaaccggcgaagttatcacaccggaagtggaatggtgcggcgacagagtggttatggttaccatgatgcttccgaccaacaagcgtgttgcagaagcagcagcagttgaattaggtaagaaattaggtctggtggatccggaagttatctctgcggaagtgatgcaggatgcggaaggtaccagaatcgaattgaagggcagagtggacttcgatatcgacttgacaactcttgaaattccaccggagccacattatctgacagacaaagagctttatgatgaattcgaaggacacgaacacatgaaggttgtctgcggtacagtcggtgaagacgaacactccgtaggtatgagagaaatcatcaacatcaagcacggcggaatcgaaaaatggggtatcgaatgcgtatacctcggcacttccgtaccggtagaaaagatggttgacgcttgtatcgaagaaaatgcacaggcgatcctcgcttccacaatcatttcccacgacaatgttcactacaagaacatgaagagactgcacgaactctgcgtggaaaaaggtatcagagacaaggttatcatctgcgcgggcggcacacaggttattccggaagaagccgtcaagacc

SEQ ID NO: 154 - DNA, 2655 bp, Unknown
  Unknown gut bacteria
atgaaacaactgatcgcggacgcgctgagctgggaggagctcggtgagatacataaaacagaatatcaatttgaacttggcaagggcgtgctgcataaggaggcaggcagactgaccctgccgattcactgcaattttgtgatgccgttcgcggactgcgaaaaggtcaaagcggtgattttacacaagctcgacatgctcaaggaggtcgaactggatttttcgtaccgcgattttgtgatgccgaaggaggacgctgccagactctatgtcccgcatatggttcggattctcaacggttcgtatctggcgatcaccaagaccatcgtcgaaaaccgcgtcatggtcagagacggatgcctttactgtccggttctcggtaaagtcgcggcagagcagctgaatgagagagtggcgcaaaaattccgagaaatactcaaagaaactttcgattttgatatggagatcatctttgagaacgatgaagaactgctggcggaaactctgcgttctttccatgagagtgaggcgaaggatattgagcgctccatgcgggagtaccgggaagtgctcaagacgcgggcgaaggaaagaccgcaggcggcggacagcgtcacaggcggcggcttcggcggcggaaacaacggcggcggctttggcggaagcgcggcaggtgccggcagtaagaagcagggcggctggaaacgcagggaaaaggaactgcccgcggagggcaaccgcatcatgggacgcggcattccgggcggtaagaccgcggagctgcgagagatcgcaccggagatgggggtcgttatcctggaaggtgtgctgttccgcaagacggagcgtgtcatcaagagcggcaattatctcgtttccctgttgattaccgataataagacgacgatctgtgccaaggcgtttgtcagtgagaacaaatggaaggaaatcgatgaactgctcaaaccgggcgatggtgtcaagctgcgcggtgaggtgcagtgggacacctttgaaaacatgaatacggtcatgtatacggacctcgaaaagaccgaccgcgaaatcggccgcgaggacacctgggagaacggccggcgtgtggagcttcatattcactccaagatgagccagatggacggcttcaacgaagccaaagacatcgtggcgatggcagctaagtgggggcagcccgcggtcgcggtgaccgatcatggcgtggtgcaggcgttcccggactgcgcggcggaggccaaaaagcaaggcgaaaaaggccgcgagatcaaggtcatttacgggctggagggctatgtgttcgacgacgcggactgcgtgcaggaggacggcagcattgattacaagagcaaaccgacccatcacatcatcattctggcaaagacgcaggagggactgaagaacatttacaagctggtttcctattcccacctggattactattacaaaaaaccgcgcttgccgtggtcggtcatcgaagcgaaccgcgaaggactgatcatcggctcagcatgcagcgcaggcgaagtgttttcttcgatggtcaaacacgtgacctatcagaagcggacgcgtaccgaaaagatcatggagcagaaatccgcggaggagcaggcgcgtatcgcctcccgctatgactatctggaaatccagcctgtcatcaacaaccgcttcatgttcgatgaggagttttatctggacggcaggcgcattgagaatgaggacgatatccgcgagatcaaccggcggatcgtggcgctggcggacaagctcggcaagcgggtcgtggcaacgacggattcacactatacggagccggatgatgcaatctaccgcaatatcgtgatggcgggcatgggcttcgaagacgcagagagcggcgagggtctgtatatgaaaacgaccgatgagatgatggaagagttttcgtatctgggcgcgcgcgcccaggagatcgtcgtggacaatacgaattacatcgcgagtttgatcgacggtgatatccgtccggtacccgcgggcaagttcccgccgaagatcgagggcgcgaaggaaaccctgcgcaagacctgtatggaacgcgcacacgcgcagtacggagacccactgccgaaggaaatcgaggatcggctggatatcgagctgaattcgatcatcaacaacggctacgcggtcatgtacgtcagcgcgcagatgctggtaaacaagtcgctggaggacgggtatctggtcggctcgcgtggttcagtcggctcatcgttcgcagcgacgatggcgggcattacggaagtcaatccgcttgacccgcattatctttgtccgaactgcaaaaagattatctggggtgatatgcagaagcacgactgcggcgtagctatgccgccgctggactgtccggactgcggcacgccgatgaaacgggacggctatacgatcccgttcgcgaccttccttgggtttaagggcaataaggagccggatatcgacttgaacttcgccggggaatatcagccggtggctcaccgctatgtcgggactattttcggtgaaaagaatgtgtttaaggcgggaacggtcggtacggtcgcagaaaaaaccgcttatggttatgtcgcgaagttctttgaggagcgcgatatt

SEQ ID NO: 155 - DNA, 2073 bp, Unknown
  Unknown gut bacteria
atgagaagcagaatttacagcaagctggcatggaccaatatctgcaagaaccgcaagacttatctgccgtacatggtcagcgccatcggcatggtgatgatgttttttcttacgatcaatctgtccatggatccgcaggtggcgacctttgaggaaggaaactggatgcagcttatcctgagacttggctcaattgtgatcggcctgttctcggtaatcttcctgttctatacgaacagcttcctgatgaagcgccgtaagaccgagctgggactgtatcatgtgctgggcatgggcaaaacccacatcgcgagtgtgctgctctgggaaactctctttacggctctgctcagcatcggtgccggcgcgatcggcggcatggtgttcagcaaggcggcacaggtgctgctgctgcggatgatgggaaggagtatcgattatgtgttcaccctgcagccgtcggcgctcgtatacagcgtgattctgtttgcggcaattttcgcgctcatctacgtcaagagcgtgatcgagatcagcaggcaaagtaccgtcgatctgctttacagcaaggcgcagggtgaaaaagagccgcgggcaaatttcgtgctggctttcatcggcatcttgtctttgggggcagggtacgtattggcgatgaccgtacaaaacccgacagacgcgattctggtattcttcatcgctgtcatcgctgtcatcatcggcacctactgtactttcatcgcgggcagcgtggcattgctcaaactgctgcgcaaaaataagaactattactatcagaccggtcatttcattgcgacctcgtcgatgatcttccggatgaaaaagcatggggcggggcttgcgagcatctgcatcctttcgaccatggtgctggtgatgatctcatcgacggcctgtctgtactttggcgccggcaacgcgatcaacgcagcctatccgcgcgatctggaggcgacaatcggcatgagggaaaccaatgacgcgacctttgcggcagcaggcgcagatctggatcgtctgcttgctgcgtcgcttcaaaaacagggactgaaggcaaagaacgagatccgctatacgctttgtgccttttacgggcaaatagaggacggcgtattgacgccgcttgcggaatatacagcggacggttatacctgcaaggtcatgaccgcggaggaatacaacgagaattttggaacccatgtaagcttggaacgcagtcagctgctctacaagaaaaatgagggaagcttgcgggaaaccatgctgacgattgccgacaaacgttacgctgtcattggagaagcgaaaaaaatgattctgcgtggtaccgacgcagtagatatggcaaacgccatttatctggttgtttctgaccggagtgaattcgatcgtgtggtgcaggctttgaggcaaagcgccgcagcggaaagctttcgtcttgtcaactgtcgggcgttgaatctgacagaggcaaacggcagtgcggcgtccgaaacgcggattttggcagcggaagaggagctgcaaagagaagttttaaagatgcaggataaaccagacaccgcaatcggctcccacaagggcaatcagccggtctacgcttcgatggatatgaacttccgcaccaaaggcagcgcgatggaaactttcacgaatctgtacggcggtctgtttttcctggggattcttttgagccttgcgtttctgggcgcaacggtcatgatcatgtactataagcagatcaccgagggctacgacgataaggaacgcttccacgtcctgcgtgacgtggggatgagcgaccgcgagatccgaaaatcgattcgggatcaggttctcaaggtctttttcatcccactgcttggtgccgggctgcatattgcttttgcgttccacatcatcaaattgatgatcaaggtattcggcatcagcaacacaacactgctgatctacaccacgctggcgtccttcctgctgttcgccgctttctacattgtggtatacctgatcacctccagagcgtattacaaaattgtcgcagtggagcagtag

SEQ ID NO: 156 - DNA, 1260 bp, Unknown
  Unknown gut bacteria
gtcaatctcgcgctggaagtcatcgaaaagtacggaaatcttaagcagccgctgttcgcgacacgcaggaaggtttccatgcagggcctgcggtgtctgatggcggattccggaaacacgattcgcgaacaggtggaagatattctgaacctgaatcatcggattaacgcgatctgcgagcgcagaaataagctggaacaggacgaaacttctctcaaagcctgggaggcctacgaccttccgctggagctggccggcaccaaaaagaccttggcgcagaccggtgtgctcccaatgggcacagataccgacgcgctggcaggcgcgctggcgggacaggcggaaacggacggcacagtattcaaaatcgttcatatagacaaggatatgtactacgcggcgattctgatgctgaccgagcaggcagccgatgtgcagacaattttaaagcaatacggtttttcacaggtgaccttcggcacgatgaagggcacagcaagcgagaaccttatacggattcaaggggaaaaagatgtattaagggaagagtatgaaaaggcagcgaaggaggctgccgcaaaatccgcgcgcaaagcagatatcgaggcttatgccgatatgctgaccatcgcggcggataaggaaaaaatgaaaacaaaactgctgaaaaccaaacgaaccttcttcctggaaggatggattccacaaaagtgcgcaaaaaaagcagcggagcttttggacgactacgaatgctattacgcgttccgcgagccggaagcagaggaagaagtccctgtactcttggaaaacaggagctttttcagacctacggaggcgattaccgagatgtattcgctgccgagctattggggctttgacccgacctccatctacgcgctgttctatatcgtatttttcggtatgatgttcagtgacgcgggatacgggctgctgatggcaatcgggtgcttcatcattctcaaaaaattcgatctcgaaggcacaacatggaagatggtgaagctgttcttctactgcgggatctccaccttcgtgtggggtgcgctgttcggcggatggttcggcgatgtggtgacggtgttctcaaccaccttcctcggcaaggccgcggagctgaaaccgctttggttcaatccgcttgacgacccgatgaagcttttgatcctgtcgctgatcctaggtgtgatccacctgtttatcggcatggggatccaggcctatatggagataaaggatggc

SEQ ID NO: 157 - DNA, 897 bp, Unknown
  Unknown gut bacteria
atgaaagaaaagacaagctacgcaaagcagagagtcaagcgaatgatcatcctcggcatctatcagtttcaggacccctattaccagggtgtggcggcacagctggcctttttcctgttcctctctattttgcctactctgattcttttgtcccaggttctgggtctgttctcattgtcactggaggaactgcagacttgggccaatatcaatatcagcggagagggtgttgatttgatcgacgatatgctcagctactcaccatccggtgcgaacagcgtgtttctcgcggttaccgcggtgtgggcagcctcgcgcgtgcagttcgcgttgattcgcgtgaccaactacacgctgaccgacggagcttccacaggggaaggctatgttcgagatcgcattcgctccatcaagaccattttgataacagtttttacgatcgcgttttctctggtggtgctggtatatggaccgatcctgttaaagctggtattcggcaaggttttggggacagatctcgcgaacgcggcatgggttgcttttcgctggccggttacgatgggactgtattttttgatgatttcgtacaactattacgtgctgccgacagaaagagtgccgtaccgggacattgtaccgggcagtatcttcgcttccatcggttttttggtcgtgacgattgtctataatatctacacaaaatacagcgtgaattatgatattctttacggatccttttcgaatatcgtcgtgctgctgatgtggttttggtttatttcgtgggtgatgtgcctgggaatcacgaccaatcgtgtctggtgggccacgcgaagaaaaaatccgattccgattgcggtcaaaaagcggccgcgcaggaaaccgatcaatattatttag

SEQ ID NO: 158 - DNA, 975 bp, Unknown
  Unknown gut bacteria
catatcgatagaaatctggcatttgaaatcgagaatgccggtgtagaatatatttacgtatacagcacggataaggaaaaggaagggcaggtaaccaaggttatcggcaatcgctttgtcgatctgcagcaatacgtcaattttgacgtgtcggaactgaaggtcgcggacaaggtcttttatccggttctcaaggaaatcctcgcggaggcagcctctgaggacgaattaaaagaaaaacttacggcgagaaagaacgacctttctccgaaacacattatcatagaagatatcatcgcttccatcagctatattctcaacttgaattacggcatcggaaccgtagacgatatcgaccatctgggcaaccgcagactgagaacagtcggagaacttctccaaaaccagttccgtatcggtctcgccagaatggaacgtgtcgtcaaggaaagaatgaccacgcaggatatcgaggtgaccacaccgcaggcgctgatgaacatcagaccggtaaccgcggcaatcaaggagttcttcggaagctcacagctttcgcagttcatggaccagaacaatccgctggccgagctgacgcacaagagaagactttcggcactcggaccgggcggactttcgagagaaagagccggcttcgaggtgcgtgacgtgcaccattcccactacggcagaatgtgtccgatcgagacgccggaaggtccgaacatcggtctgatcggctcgctgaccacttatggcgtcatcaaccagtacggcttcatcgaaacgccatacagagtggtagataaagaaacacacagagtcaccgacgagattcactatctgacggcagacgaagaagaaatgatggtcgtcgcgcaagcgaacgaaccgctgaccgaagacggacactttgtcaacgcgaaggtcgcgtccagaggcgaacatggagaaatcgcactgatgccgagagaaaaa

SEQ ID NO: 159 - DNA, 2001 bp, Unknown
  Unknown gut bacteria
acggtttctctgaccggattgggactggattttcgcccgatggctgtacgtgctctgggcgcgctgctgaactatctttttgaaacacaaaaacaaaatctcaaacatctgacgcacatcaggcattatgaaatcggcacgcgcatggcgctggacaaggcgacggtgcgcaatctggaaatcaccgagacgctgtacgaaaaaaaagtacaagggtcgcttttgggtgtcctcgacaagacgcgtaccgccatgggcagccgcaaaatgcgccaatggctgcgcgaaccgctcaatgacgcagcggagatcaacgagcggctcaatggtgtggaggaactgtatcatgatctgctcacacgcagcaatatcagagaaaatctgcgacacgtctacgattttgaacgtctgatcggacgcattgcatgtgggaacgccaacggcagagacatgatcgcgctgcgtaattccatcgcggtgctgccggagctcaagagtgatctcgacctcatgcaaagcgcggcacttcgaaaactttgtgacatgattgactgtctgacggatgtttatgacgtgatcgaccgcgcgatctgtgaagacccgccgtttaccatcaaagaaggcgggctgatcaaggagggcttttcggaggaactggatcatctgaacttttcgattcaagacggaaaggagtggatttccaatctcgaaaacaccgagcgcgagcgcaccggcatcaagaacctgaaggtcggctacaatcgggtgtttggctattatttggaagttaccaaatcctattttgatttgattcccgaaaactacattcgcaaacaaacgctggccaacgcggaacgcttcattacgccggagctgaaggagatggaaaatctggttctgaatgcgcagaccaagatcaatcaactggaatacgagctttttgtcggtgtgagagaggaaatccagcgctatatggaaaccattcaacagacctccgcggcggtcgcggagctggatgttctgtctgccttcgcgcaggtcagtgaaaagcttggctatgtgaaaccggtggtggatacttcgatggaactggagattgtcaagggcagacatccggtcattgagcagatggtcagtgacggtttgtttgtgtccaacgacacctatttgaatgatcgtgacgcgagcctgcttttgatcacaggaccgaatatggcaggtaagtccacctatatgcggcagaccgcgctgatcgtgctgatggcgcaggcgggctgcttcgtgccatgcgcgcaggcgcatatcggggtgtgtgaccgcatctttacgcgcatcggcgcctcggacaatctggcacaggggcagtccaccttctttgtggagatgagcgagctgtcctatattctcaacaacgccagggcgcgcagtctgatcattttggatgagatcgggcgcggcaccagcacctatgatggtctgtcgattgcctgggctgcctgtgagtatctctgcaatgatcacacccatatccggactttgttcgcgacgcattatcacgaactgacggtgctggaaggtcagcttccgggtgtacgcaacctgaatgtcgatgtcacagaagtcggcggcaatatcgtcttcctgcacaagatcgtggagggctccgcgaatcgcagctacgggatccatgtggcaaagctggcgggaatcccgaagattttgcttgaaaacgcgcaggaaaagctcgctgagctggagggcagcaccacgagcgccgcagggaccgcacgcgtaagccgcagcgccgatccatcgggaacggaaggacgcgaggacagagcaaaaacgcctgcctgtgaggaggaaagccagctttcaatgttttccttcgcgccgaacccggtgattgaaaaattacgcgcgctgaatttgatggaaattacgccgtccaaggcgtttgcgattttggaggagctcaaggcttctctgggaaaagaataa

SEQ ID NO: 160 - DNA, 951 bp, Unknown
  Unknown gut bacteria
ttcttcgcggcggtgctgttcttcgcgctgcgcccgaacaacattatgaactccatcggcaaatatctcaatccgatatttttaatttgtctgggtatattggttgtcgcggcgctgcttgacccgatccagagcgtaggttctgtagcggcaagcggagcttacgcggataacgcgttctccacaggcttcctgcagggctatgacaccttagacgcgctggcttctttggcattcggcattatcgttgtcaacgtgatcaaagagatgggtgtcgaggaaccgggtgcgatcgcgaaaaatacgattaaatccggcgttttcagcatggtgctgatgacggtcatctacgctctgatcgcgattgtcggcgcgcagagctacggtttgtacgcggatcagctgggagaaccctcctttaacggcggcaacgccttcgcgattgtcgcgcagcattacctcggcaaggcgggcatgatcgtgctggcgctgactgttaccttctgctgtatgaaaactgccatcgggctggttacagcctgcgcggataccttcagcgtgatgtttccgcgctccctgagttatcgcagctgggccatcgtgtttaccgcgttttcgcttctggtatccaacatcggcttgtcgaagattatttccttctcggcaccggtgctgtatttcctgtatccactggcaatcatgctgatcctgctcaatatttttggtaagtactttgactacgcgcgtccggtattcacttgggccattggctttacgatgatcgcggcggtctttgatctgctcaaggtcgcgggtctcgcgcagggtgttgtggactgggtcagcacatggctgccgttctattcgctgggtctgggctggatcgtgccgggtgctgtcggtacgatgatcggacttataatcgccaagcccggcaagaaaacagcgtaa

SEQ ID NO: 161 - DNA, 1116 bp, Unknown
  Unknown gut bacteria
atgatcacaaaagctgaatttttagaaaaaatcctaaatatcaatcctaaatacaacaccgagctgatcggcaaagcattcgatacagcccagcgtctgcacgagggacaactgcgcaagagcggagaaccgtattttattcatccgatcaatgtcgcgctgatcctcgcggagatgggtatggacgacgcgacgatcgtcggtgggcttttgcatgacgtggtagaagatacaccttacaccagagagcagctcgtcgccgacttcggggaggaaatcgctcttctggtggacggtgttacgaaattaggcacgattaaatttgaatccaaagaggaaatacaagcggagaacttccgcaagatgtttttggcgatgtccaaggacatccgcgtcctgatcatcaagctggcggacagactgcacaacatgcggaccatggagtacatgagccccgagaaaaaaatcgaaaagtgcaacgaaactctcgaaatttacgcgccgcttgccagcaggctcggtatttccaaagtcaagtttgagcttgaggatctggcactcaaatatctgcacccgcaggagttccaggacctcaaagaaaaggtcaataagcgtaaggaagagcgcgaagcgaccatcaatctggtcatcagcgagattcgagacgcgctgaacgatatgcatctgcattatgatatttacggcagagcgaaacattattacagcatctacaaaaagatgaaatatcaaaacaagcagatcgatgaaatcttcgatttgatcgcggtacgcatcatcgtcgataatgtcaaggactgctacgcggtactcggtatcgtgcataccatgtggaaaccgattccgggcagatttaaggactatatcgcgatgccgaaaccgaatatgtaccaatccctgcacaccacagttatcgctgacaacggggagccgtttgaaatccagatccgcacctatgagatgcatcaggtcgcggaatatggtatcgcggcacattggaaatacaaggagggagacaccaccggcaaagcttccaatgatgacatgaagctggcatggctcagacaatctttggagtggcagcaggatatcaatgat

SEQ ID NO: 162 - DNA, 1608 bp, Unknown
  Unknown gut bacteria
caggtatcggtaccggaaggcatgaccatcatggaggcagccgagaaggttggcgtacatatcccgcacctctgttatttgaaggacattaacgagattggcgcctgtcgtgtctgccttgtggaattaaaaggaatggaaaagctcgtgaccgcgtgcaacaccatctgcgaagacggtatggaaatcctgacgaacagtccgcgtgtcagaagaaccagaaggatcaatgtggaactgatgctttcggaccacaacgcgaactgcgcgagctgcatcaagagcggaaactgcacgctgcagacgattgccaatgaccttggcatcatcctttccgattatgaaaatacggcagaaaaaggccgctgggataggaatcttccgctggtgcgtgatgcttccaaatgtgtgaaatgcatgcgctgcattcaggtctgcgaaaaaattcaaggcatgggcatctggacgctgatcggttccggctaccggacgaccatcgggctcaaagataatcagtccttccgcgaaagcgactgcgcgctttgcgggcagtgcatcacgcattgtccggtcggcgcgctgcgcgaaagagatgacagattggatctcaacgacgcgctcgcggatccggaaatcgtcaccatcgtacaggtggctccggcggtgcgtaccgcgtggggagagcagattggtctcaaggataaggacgcgaccatgggcaagctggtctgcgcgctcaaaaaaatcggtattgattatgtctttgataccaattacagtgcggatctgacgattatggaagaaggcagtgaattcctcgaaagactcgccaacaggaatcgtcataaatggccgatgtttacctcctgctgcccgggctggctgcgctttgtcagaacgcagtatccggatatggtagaggacttgtccaccgcgaaatcaccgcagcagatgttcggcgcgatttccaaaacctatatcgcgcaaaagcttggacttgacccaagtaagattctttcaatttctatcatgccttgcgtggcgaaaaagtttgagtgtgatgtcgagcaggtaaacagtgccggtcatggcaaggatgtcgatctggtactgacgaccagagaacttgaccgtctgattcgctgcgatagcatcaagccgcaggatttgatggatatgccgtttgatgatatctttggcgagggctccggcgcggctgtgatttttggtacgaccggcggcgtcatggaagcggcgctcagaagcgcctattatctggttaccggaagcaatccggatccggacgcgttcaaggaagtgcgcggtatggatggctggaaggaagcaaaatttgatctggccggcaccacgctgaaggtcgcggcggccagcggactcggcaatgcgaggaaactgatcgacgcagttaaccgcggagacgcagagtatgatttcgtcgaaatcatggcttgtccgggcggatgcgtgggcggcggcggtcagccgtttgtggacggcaaggaattcgcgccgaagcgcgcgcttaaactctacggtctggataaggtcaataacctcagattttcacacgagaatcaagcggtacag

SEQ ID NO: 163 - DNA, 2055 bp, Unknown
  Unknown gut bacteria
atggataaatttgaaagatttgataaatttgaaaagctggaccgaaaagtagaagaaaccattcgcgaagtggaaaccatggacagacggaagttctatcgcaacagttttgtctgcgccggcgtctgggcgctgctcttgaatctggtgattgaaacgctcggcaggtttccgacagtgggaatctttggcggactgtcctttatggtgcacagcccgctggtctttttatataacgccttgattctctacgcgaccttagtgctggcatcgttgttcaaacggagagtttttttctttaccattgtttcgattttctggctgggcatcggcatcatcaacggcgtgatcctgacacagcgcatgacgccgttcaccgtaaaggatctgagcaatctcaatgacggactgaccatcgtgaccaattacctcagcaagcttgaaatcgcgggtgcgattgcagcggtgctgatcgctgtcggcctgctggtgctgctttttatcaagggaccgcaaaaaagagacggcgtgaaacgcaagcgcaatctggtcgcggtgattttggtcatcgtcttcaccttcctgtcatcctcctttgtgattaagacaggcattgtgcagactttcttcggcaacctcgcctatgcttatcgagactacggtgtggtctactgttttgtcaatacctggctgaacaccggaatcagcaagccggacggatacagcagggaagaaattctttccatcttcgacaaaaaagaactcggtgatgacaacaccatgctgcttacccaaaaggatgaggacgagcagcatccgaacatcctgtttttgcagctggaatctttcatcgatccgatgacgattcagagcatcacactttcgcaggacccatgcccgaacttccgcaagctgatgcagacctattcctcgggcgagctgaccgtaccggcctgcggggcaggtaccgccaacgtggagtttgaagtgctgaccggactgtcagtaaagttcttcggcccgggcgaatatccgtacaagtcggtcttaaaagaaaaaaccggagaaagccttgcctacgacctcgacagtctcggctacacctcgcacgcgattcataatcacagggcagtcttttacaaccgcaacagcgttttttcgaacatgggctttgacaccttcacgagtgtggaatacatgaaaaatgtcgaaaagacgccgaagaactgggcgaaggactatgtgctgacggattgcattactgacgcgctgaattctacaaaggggcgcgatatgatctatacgatatcggtgcagggacacggcaagtatccaatccagcagatcatgcaaaatccggcgattgaggtcccctcggcgccgacggaggcgctgaagtggaaatatgaatactatgtcaatcaggtttacgagatggatcagtttatcaaggagctgacagatacgctcgccaagcgtgaggaaccgaccgtcctcgtgatgtacggcgatcatattcctgcgctggatatgaccgaggatgatctggaaagcggcaatctctacggcacgcagtatctgatctggaacaatataaatctgccgaaggacgacgaaaatctccacgcctatcagctcgcggcgcacgtgatggacatgctggatatgcgggtaggcacgatctttacctatcagcagaaccacaagaacagcgaaacctatctcgcggatttgaaggcgcttggctatgacatgctttacggcaaatactatatctacggcggcatgaatccgttcaagccgacgaatctgaagatgggcgtcaacaatatttctatcgaagaaatcgtcaaaatcggagacaaatattacatcaagggcaggaatttcacgcagtacagcaaggtcacgctgaacggcaaggagctcaagaccatatatctgggcgaaaacgtgctcggacttttggaggatgttgatccgaacgacgcggataagatgaaggtcagccagattgagaacaagagcggagaaattttgagtaccaccgaatag

SEQ ID NO: 164 - DNA, 1488 bp, Unknown
  Unknown gut bacteria
gagagcgtaacgatctgtatgccgaacgcgccgcaggcggtcatcatgttctatgccgtcaacaaggccggcgcgattgccaatatggtacatccgctgtccagtgaatccgaaattgaattctgcttgcgccagtcggccagtgtggtctgcctcacgctcgatcagttctacggcaagtttgctaatatccgcggcagggtgcagctgcgaagtctgattctgaccagcatcaaggacgcgctcagcccgatcaaacgcaagggttattatctggcggagggccgcaaggtgaagaaggttcccgtcaatgccgaaattgtctggtgggaaaaatttctgcgtgacggcgcggactatcacggtccatatcatgtggtgcgcgaggcgggcgatcctgcggcgatcctttacagcggcggcacgaccggaacgatgaaagggatcctgctttcaaatctgaatttcaacgcgctcggacagcagatcatcgcgacgaacccgatgttcaagccgggggacaagatgctggctgtcatgccgatcttccatggcttcggactgggcgtatgcatccactccatgctttcgcaaggggggcgctgcctgctcatcccgcgcttcaatccacagagctacgcgaagctgctcaaaaagcacaagccgaatttcatcgcgggtgtaccgacgctctacgaggcgctgctgcgtctcaaaacgctcaaacatgtggatctttcctgcttaaaaggcgttttcagcggcggagattctttgtcgattgagctaaaaaaacgtttcgacaaatttctcgcggagcacaacgcgacgattccggtcagagagggttatggcacgacggaatgcgtgaccgcgagctgtctgacaccgtcgcactgggcgaaagagggcagcatcggactgcctttcccggataccttctataagatcgtcaaacctggtactgaagaggaagtgccttacggcgaggaaggtgagatctgcctgaccggcccgacgatgatgatggaatacatcaacaatccggaggaaacggcgaacactctgcgcaggcatccggatgggctgaaatggctgcataccggagaccttggcatgatggacgcggacggtttcatctacttccgccaaaggatcaagcgcatgatcgtcaccagcggctataatgtctatccgtctcagatcgaaaacgtactcgacgcgcacgagctggtgcacatgagctgtgtgatcggtgtgccggatccatacaagatgcagagggtcgtggctttcatcgtgctgaaaccggacgtcaagattccggaggatgcggcgcgcgaaatcctgctcgcttattgtgggaagcatgtcgcgaaatacgcgatgccgaaggagctccacttccgcgacagtctgcccaagacgctggtcggcaaggtggcctatcgggttttggaagaggaagaagcaaagaattacgcgtaa

SEQ ID NO: 165 - DNA, 1884 bp, Unknown
  Unknown gut bacteria
atgaaaaaagatctgacacaatatcgtttccccgaagacctcaaaaacatgtccgacgaggaaatggagctgttatcttacgcgattcgcgagtttttaatcgagcatgtttccaaaaccggtggacatcttgcttccaacctcggtgtcgtggagctgacgatagctttgcataagatttttgacagtccgcgggacaaaatcatttgggatgtcgggcatcaatcctatgtccacaagattttgaccgggcgcgcggacgcgtttgataccctgcggcagttcggaggtctgagcggcttcccaaagggcaaggaaagcgcacacgacgcgtttgataccggacacagcagcacctcaatctcggcagcggcaggttacgctgcggcgcgggatattcagggcgaggattatgaagttgtcgcggtcatcggagacggttcgctgaccggaggcatggcttatgaggcgttaaacaatatcggagcttccaagtccaagctcatcgtgattctcaacgacaacggcatgtcgatttcgccgaatatcggtgggatttccaggcatttggggtcgctgcgcacctccaaaggttatctgagcgcaaagagcttcgtcaagaataagatcggcgcgattcccagtgtgggcaaaggcatcgcgcagggattggccgatatcaaaaatgacattaaatacacgattttggagcgcggcggcgtgctctttgaagaattgggatttacctatttcggaccggtggacggacatcatctgccggagcttttggatgtattgtcgaaggcaaaaaacctgaatgaaccggttctgatccacgtcatcacaaaaaaaggcaagggataccgcaacgcggaacaaaatccgggcaaatttcacgggatcggcagctttgaccccgaaacgggcaaagaggcggcgaaatccgagaaaccgacctattcaaaggtcatgggcgagtatctgacagagcttgcaaaaaaagatccgcgcgttgtggcaatcaccgcggcaatgggagaggcgacagggcttggaggatttgccgaaaagtttccggagcgcttttttgacgtcggcattgccgagcagcacgctgtgacatttgcggcagggcttgcaaaagccggtatgcggccgtttgtctgtatttattcttccttcctgcagcgggcctacgaccagatgctggaggacgtctgcatgcaggaacttccggtaacctttatgatcgcccgcgccggcatcgtaggcgcggacggtgagacgcatcacggcatcttcgatctcagctatcttgctacgatgccgcagctgacggtgctggcaccgacttccgacgagatgctccgcgcgagtatggatttcgcgatggaacaagtcggaccgtgcgcgatccgctatccgcgcggggaggttatgactgaagaagaaggcaggattccgagcctgatgtattacaaccggacaatggaatacgggaacacgctccttacggatcgtgtggagattctcggcgtcggcaaaatggccggcatcggacgggaagtttttgtccggctgttagaaaaaggcgtgcaggcacgttatcaggatgtgaatatcgtgaaaccgatcgaaacttccgtaaatgccatgaacacgctgcgcggcgatctgatcgtgaccatcgaagataatattgtatccggcggtttcggcgaaagcctgcgaggcgctttagagccgaagcatcgtcttttgaacttcggctggccggatcgctttatcggccaggggacgtttgacgaactgactgaaaaatacggcctgtctgcggcaaaaatcacagaaaggatttgtgaagaacttgaaagaaaggcttga

SEQ ID NO: 166 - DNA, 1578 bp, Unknown
  Unknown gut bacteria
atgaaggtaagcgttaaggattgtctacagctggaagctttccgcaagtgcattgtcgttgcaggagaaaagcacatggatcgccgggtaaaagcggtttcggtcatggacgcggcaacggcggaggaagcggtcaagtgcagcggcagcagcggcaatatggtgttgacttcgttcgcgggcatgaaacatgacgtgaaacagcagcaggaaacaattcgcgaactggcaaaggcaggtgtcgccgcgctggtggtttttcgcagggagcagaccacgcagcctgttgacaaggcagtgacgcgcgcagctgatgaggccggtctgccgttgatcatcatggtcgatggagaaaacatggactattcgcagatcatcgcggaggtcatggaacacgtgctttatggcaataattttaagaacagcctgatcaacaacacgatttttcatctgttgaattttgaaaagcacgcgaatttccagcaggcgctgcgtgaggcggcgatcaacaacgactttcaggtagtgcttttgagcgaggacttcaacccgatcttcgcgatcgaaacgcggcatcagaccacaatcaacgaggcgatccgccgcgggaaggaagcggcgctgaacctcagcaacatctacagtctgatcgagatcgacggggtgctgacctactggggtctggtacacatcaataacgacaaatactatctgttcattgtcgataacgacgacaattattcgtccggcgaaatgaccaagctggccgagatcatcgagctggcgatgggcatgtggaagtacacgccggagcgtgacgcgaaggcagagcttgtcaaggcgctgatgcgcggcaacaagagtctggcgtattcgatccgcgaggaagcaggcgtgaaattaaccgacattctttcggtcttttatgccaaaggtattgaggataaccatgcggaggaagtgattcatcggtttgtcagcgagggccttttggacatcatcaagatcagcgaggaaaacgaaagctacgcgctgctgctcaagggggcgaagctggctgatcaggaggaaaatgaggaaaaggctgtttgcctgagattcttcgacgcgctcaaggaaaacaagacggtccgcattttccatgtgaccggcatcgacggcatcgagggcgcaggagacggattccgtctgatcggcgaaacctgggcgtttgtaggaagcattttcccgtacaagcgggtgttcaccaaatatgaactgacactggtcagcaactgcatcaatattcaagtgcagggcggctatctgaaaaagaactatatggatcttttggagccgtttcgcaaggagggggacaacaagtccaggcagcttttggaaaccctggaaaccttcgtgttggacgcgggcatgaacagcggcaagacctctgagtttatgggcatccacacaaacacagtgcagtatcgcctgaagaagattaatgaaatcctcggcgcggagattaccggaaaccgcgtgattccgggattgacaatcgcgctcgcgctgcggagaatggaagcggcgtcgaaatag

SEQ ID NO: 167 - DNA, 1389 bp, Unknown
  Unknown gut bacteria
atgaggtatgaagatttaaagtatttggaggtaccattaccggaagcaatcgcgaaggaaaaatggggcggtttctttgagaatgcccgcagccgaatcgcggcatatctggatgacgaaacaacagattacgcgctgcgctgccgattggaaatggaacttggaatactgcaaaacctgcaggaaagatatactctgtgtccggaagaggctcttttgatcatgcaggaaaaaattccggttatgaccgcggaagaattggaaaaactgcgcatggaagataaagcagattggatttacataaacggacaggttcgttacttggacagctttgctgctacgctttgcaaggcttatccggaagtttggtcgcgaaccgaagccggtgatacgagcgattacacgctcatagaggattacattcatggctgcgaagacaatctcgaaagaaccgcgcatatacacatccgacatgaagtggaaatcgcgccgcgggcgctgcgtgaaggagaaacgattcgagtacatattccgattccgcgggaacgggccggcatcacgaattttaaaatgctgcggacttcgcatacgccttcgtttatttccgatagcaaggcggcacaaccgacaatctattttgaagaaatcgcggcgaaagggcaggtgttctccgtggagtatgagcttgattacacaactgcgtatcataagcttgaaacaaggtcggaggcggatatgccgcaggaggcgagcactgcttgtgaagaggctttttcgagtgaaaacctcatggaagaagcgccgcatattcgcttcactccgcatctcgtcacgctttgtgaaaaacttatcggaggcgaagtcaatccgcttcgcaaggccagagcaatctataattatgtgacaacgaaaatggactatcgttttgtgcgtgattacgcgagcattgaaaatctatcagaatactgtgccttgaatcgtaagggggattgcgggattcattctttgctgttcattacgctttgccgtatcgcgggaattccggcgcagtgggagtccggattagaagcctcaccgacttatgttggcgaacatgattgggcacgcttcttcattcaagatttggggtggctttacgcggaccctgccggaggagtgctggcttacgtgagaaaatcgtatgatcgctggaatttcttctttggaaatgtggacccgtatcgaattccgatcaatgatcggtttcagcatgatttttatcctaaaaagcagcattggcgcatagatccatatgacaatcaatgcggtgagatggaatatgaggacagcggcgtatatggagatgatcttatttaccgccatatcccgattgacatctatttgaaataa

SEQ ID NO: 168 - DNA, 2325 bp, Unknown
  Unknown gut bacteria
atggcagaaagaatggtcatgccctgcgtgccgctgcgtggattgtcggtgtttccgcacacaatcctgcattttgacattggcagggaaaaatccgtcaaagcactggaagccgctatgacggcagataaacagttatttctgacttctcaaaaggatgaaaacatcttgattccgacgccggaggattattacgaggtcggaacggttgtaaagatcaagcaaatgctcaaaatccaaggtgacgcagtgcgggtgctggtagaaggccagtatcgcgcggtgatgagcggcgtcgcgacggaggagccatatatcatggcagagcttacggaggcggaaattacgccggcagatccgcaggaggtagaagtgcaggcgatgatgcgctctgtactctatgccttcgatgaatacatggaattgaacccgtcgatcaaggatgaggtttatgagctgatcagctcgatcgaggagccggatatcttcgcggatacggtggcgatgcagctggacgttaaggttgctgccaagcaggaggtgctggaggccttcgacgtgaaacagcgtttgcaaatcgtcaaccgccagattttggaggagaatcagattcttgccatggagcgcgacatcagcgagcgtgtgcaggaagcggtgaaacagaatcagaaagaatatatcctgcgagagcagatgaaggtgattcaggacgaactcggctacggagaagaagccgcaagcgaggtggagcgctggagtgagcagcttcaaaagctgaagctcgatccgaagattgaggaaaaggtaaaacgtgaaatcgctaaatttaccaaaatgccgccgagctccgcagacggcagcgtcatccgcaattacgtggagacaattttggaattgccttggcacaaatcctccaagaccaatgctgacctcaaaaaggcggaacgcattctcaacgaggatcactatggacttgaaaaggtcaaggagcgtattctcgaatatctggccgttgtgcacctcaataaggcgatcaaaggtccgattatttgtctggtaggacctccgggtgtcggcaagacctcgatcgcgaaatccatcgctcgcgcgacgggcagagagtttgtccgcatgtcgctgggcggcgtgcgcgatgaagcagagatccgcggacacagaagaacctacattggcgcgattccgggacgaatcattacctctatcaaagacgcgggcaaggataatccggtcttcctgttcgacgaagttgataagatcggcgcggactttaaaggggatccggcttcggcactgctggaggtgctggacccggagcagaacaaggaattcaccgatcatttccttgacattccgtttgacttatccaaggtcatgttcattacgacggcgaactccaccgaaacgattccgcgtccgcttttggacagaatggaagtcatttcggtaccgggctacaccgaggaagaaaaagtaaaaatcgcgcagcagtacttaatcccgaagcagattcgggcacatggcttgaagccgaagaattttttgatcagtgagaaggctatccgcgatctgatcaattattataccagagaatccggcgtgcgtaatttagagcgcgagatcggaagtctctgccgtaaggtcgcgcgtaagattgtttctaaaaaagggaacgcttttcgcattacgccggcgagtctggaaagctatctgggcaaaaaaagatatcattacgatgtcgtggaaggcgagagcgaggtcggggtaacgaccggcatggcatggacacaggtcggcggcgatacattgttcattgaaacagcagtcgtgccgggaaccggcaagattcagctgaccggacagcttggtgacgtgatgcaggaatctgcgaaggcggccatcacttatattcgttcaattgcgggcgagtacgggatcgatgaagaattctataagaagaacgatctgcacgttcatgtgccggaaggcgcggtgccaaaggacggcccgtccgcgggcgtaacgatgttcacctcggtgatgtccgcgctgacaggcaatccaatccgtaaggacgtggcaatgaccggagaaatcacgctgcgcggtaaggtgcttccggtcggcggcatcaaagaaaaggtgctggcggcacaccgcgcgggcattcgcacgattcttttgccgcgtgaaaacgaagcggatatcgaagagatcccgcaaagcgtgcgcaagcagctcactttccacctgctcgataaagccaaggaggctttggaatatgcgatggtaaaagattcagagtga

SEQ ID NO: 169 - DNA, 1125 bp, Unknown
  Unknown gut bacteria
atgagaaaagagtgggaaggatttgtcgcgggaaactggacagagcacattgatgtagaggaatttattaaattaaactaccatccgtatgacggtgacggcagtttcctcgcgggaccgacagagagaaccaaggaatgcagtgacaaggtgcacgagcttttggtcgcggagcgcaaagcaggcggtacgctgaaggttgacgcgagccgcatcatgcgcgtgaacgcattcggccccggctacatcgttccgggcaaggatatcatcgtcggactgcagacagacgaaccgcttaagagaggtatttgcccgttcggcggcatcaagatggtcagagaagaagtgaaggagtacggcgttacactgccgccggaaattgacaatatgttcaactacttcacgacgcacaacgacggcgtttttaaggcatactccaacgaaatgcgtcaggtcagacatctcggcttcattacgggacttccggacgcttacggccgcggcagaatcatcggtgactacagaagagcagcgctctacggcatcgactatctgatcgaggaaaagcagaaagaccatgaaatgatcgcttccagacacgtgatgaacgaagaaaacattcgcaccgcggaggaagtcagcaatcagatccgctccctcaaggaaatcaagaaaatggcagaaagctacggcttcgacatctccggaccggcgaaagacgtcaaggaagcgatccagtggacctacttcgcgtatctggcaggcatcaaggaagaaaacggcgcggcgatgtccatcggcagaacctccacgttcatcgatatctacgcagagagagaccttgcgaacggcacctacaccgaagaacagatccaggaattcgtggatgactatatcctgaagctgcgtgttgccagacatttgagaaccagtgaatacaacgagctgttcggcggagacccgatgtggattaccgaaggtatcgcaggcgtcggcatggacggcagacataaagtaaccaagaactcttacagagtgctgcagaccttatacaatttaggaccggcaccggagccaaacctgaccgtattatggtccgaaaagctgccggaaccgttcaagaag

SEQ ID NO: 170 - DNA, 1803 bp, Unknown
  Unknown gut bacteria
atggattatcagcagagaaaacaaatggagcgcaagagagccgaggatttcatcgcgagcattaacgcgatgcaggatccggatattatgtacaaagtcagccatccgatcaccgatctcaaggatatgatgaaccagagcgtagcgcgctacggggcggatcatgtcgccttcaaacagcgcttcgtgaagggggagccgtttcgcgagattacttacggacagacactgaacgatatgaacgcgctggggacagcgatgctggcgcgcggcctgcgggacaagcgcgtggcgatcatcggagataattgctaccagtgggcttcaacctatctggcggttacaggcggggtaggcgtggtcgtgccgctggacaaggaactgggcgcgtctgagctggagcagttaattatcgaagcggaatgcgaggcgattttctttacaaaaaaatttctcagcatctttaccgatatgcgcgagcgcggtgagacaaagctgcgtatgcttgtgaatctcaacgcagaggcggcggcagacggcgtcgaaagctggtccgcgctgattgcggaggggcgggaaaagatcgcggcaggcgaccgttcctatctggacgcggaagtatatccggatgagatgggtgtgctgctgtttacctccggcacgacgggcatcgccaagggcgttatgctttcgcagacaaatatctgctgcgacctgatgagcgcgccgaccctgctggacaccaacgagcgggatactttcttcagcgtgctgccgatccaccatacctatgagtgtacctgcggctttttgatgccgatgtataagggtgcctgcatcggatactgcgaggggctcaaatacattcagaagaatctgcaggagatccagccgacgttctttttgggtgtgccgctgatctttgagagtttgtacaagacgatctggaaaaatatccgcaagcagggcaaggaagccacggttaagaaagtgatgaagctcaacaagaccacttctaaattcggtctgaatctcaataaattgctgctcaaggatatcctcaaggtctttggcggcaggatggatatgatgattgcgggcggtgcggcgatcgacccgcagattctgcagtttttccgtgatctgggcatcatggcgctgcagggttacggtttgacggagtgcgcgccgatggcggccttgaatcaggatttagagccacgcaacgattcagtcggtcatgtgctgccgggcatggaagtcatgatcgcggacaaggatgaggacggtatcggagaaatctgcctcaagggaccgaacgtcatgttaggctattatcacatgccggaggaaaccgcgaaggttatcgtcgatggctggtttcacaccggtgacctcggttacaccgacggtccgtatatctatattaccggacgtaaaaagaatgtcatcattaccgcgaacggcaagaatgtattcccggaagaactggaatattatctcggcaagagcacgctggtttcggagtccatggtctgggcttcacaggacgcggacggacaggacgctgtgatcgtagcgaccatcaagccggatatggaggaagtggaagcagagctcggcaaggaagcggcgcaggatccgaagaaggtggaagcactcttatggagcatggtggataaggtcaacgcaaacctgccgctcttcaaaaagatccgccggatcaacgttcgcaaggaagactttgaaaagaccaccggcaagaagatcaaacgcttcgtggaatccaataaacagcagtaa

SEQ ID NO: 171 - DNA, 1617 bp, Unknown
  Unknown gut bacteria
gatgcaccggcagctccgctggtaggcagagacaaactgcacacggaattcttaaacgatattctggtaccgactgcgaatctgaccgctgacaacgttccggtttccaagtttatggataccgtaaccggcatgatgcctgcgggtaccgcggcttacgaaaagcgcggtgtcgcggcggatcttccgcattgggacgtgaagaactgtatgcagtgtaactggtgcgcgagcgtttgtccgcatgccgtcgttcgtccgttcgtgatgaccgcggaggaagcggaaggcgttgctgacgcagtaccgatgaagggcgcgaaggacaagaagttcacgctcggctggtctctgatggactgcacaggctgcggttcctgcgcagaggtatgccctgcgagaaacaaggccatcaccatggcaccggcagaagatcacttcatgcacgcggcacaggcaaaatacgatcatttatataagaatgttgacgaaaaggaaacgccgttcaaggaaagcaccgtcaaaggtgcacagctcaagacaccgctcatggaattctccggcgcttgccctggctgcggcgaaactccttacgcgaagctggtaacccagttgttcggtgaccgcatgttcatcgcgaacgcgacaggctgctcctcgatttggggcgcttccgctccggcgacaccgtataccgtaaacaaagagggcagaggtcctgcatgggcaaactccctgttcgaggataacgctgaattcggtttcggtatggcgacctccgtcaacgcgagaagaaacgaattgaagtccgcagtcgaaagactgtatgacgctgtcggcgtgccggcaaaggcgtgggtggcttccatgcacgacggcaaaacctccaagacaaccggagaagttctgctggaagcggcgaagaagctcgcggacactaacgaagacgcgaaatatgtcgttgagaacgctgacctgctgaccaaaccatccatgtggatcttcggcggcgacggttgggcttacgatatcggttacggcggtctggatcacgtcattgcgtccggcgaagacgtcaacatcatggtattcgataccgaggtatattccaatacaggcggtcaggcatccaaatccacaccggtcggcgcggtcgcgaaattcgcggcttccggtaaggcagtcaagaaaaaagaccttgcgcagatcgcaatggcttacggctatgtctatgtcgcgcagatcgcgatgggcgcgaacccggaacagacactcagagcaattcgcgaagcggaaagctatcacggtccttccctgatcatcgcttacgcgccttgtatcaaccacggtgtcaaagccggcatgaacaagtccatgctcgaaatgaagaaggcagtcagagccggatactggaacctgttaagatacaatccggagctggaagcgaagggcgaaaatccgctgtccgttgactccgctgcaccgacagaatcctacagagatttcatcatgggcgaagttcgttacaactccctgaagctcggattccctgaaagagcagaaaaactcttcgaaaagggtgaagaatgcgcgatggaaagatataaggaactgaag

SEQ ID NO: 172 - DNA, 1218 bp, Unknown
  Unknown gut bacteria
atgtataactttgtacttgcatttgtaatctgtgccgttgtttacatcatcggcgaggtggtcgcgactgtgaccaaggcatgggttccgtccgtattcgtcaccgcggtggtactgctgatcggatactggactgttatcccaaaaacagtagtcagtgattctgtactgattccgttcggaagcagtatcggtatttatctgttgattacccacatgggtactgtcatcagtttgaaacagctcaaggaacagtggagaaccattgtcgtttgtctggcaggacttgccggcatgatggtactcggctatttcgtcggcagtctggttatggacagaaacctcatcatcgcaggtcttccgccgctgaccggtggtattatcgccgcgacgatgatgcagaccgcagcgcaaaacgcgggactggagctggcagcggtattcgcaatcgcgatgtactgtattcagggctttatcggctatccgctgtccacgatctgcctgcagtcctatggcaagaagcttgtcaagggcctgcgtgacggctccatcgtcattaccgagcaggacagaattgaaatggcaaacgcgggcatgaccgcggtgcctaccgatgacggcaagaaaaaactgcttccgccgattccggcaaaatacaatacccctgtgatgatgctcttgaagctcggtatcgtagcatggctcgcgagcctgatgggcactgtgtccttcccgatcatcggcaccatcagcggcgcgatttgggcattgatattcggtgttatcttcaccaccatcggtttcctggattctaatttgctgaacagagcgaactccttccagatcacgatgttcgcactgatgatgtacgtattcgacggactcaaggactgcacaccggagatgctgaagcagatcatcggaccaatgctgatcctcatcgtcatcggcgttgccggcatggccttgttctcattcatcatcgcgaagatattaaagatgtccttcccgctggcgtttgcaaacggtctgaccgctttatacggcttcccatgtgacgcaatcatcacagagtccacctgcaacggcgtcggacagacggaagaagagagaaaatacctgctgagcaagatgttcccgtccatggttgtcggcggcttcatcacagtaacgattacttctgtatttatcgcaggcgcatttgcgaaattactctaa

SEQ ID NO: 173 - DNA, 1824 bp, Unknown
  Unknown gut bacteria
atgggactaaaaaaactggtcgttgacgccttggcgctcggcccgacatcgagaggttttacaggaggagaagcgcgccgctgggtgcgggagtcttacaggcacagaacccgtaactacggattttccaaaaaagatacgcgctgggcattgcggcacggcttcctgccggaacaggccgccagacttggcatcactgccgagaacgtcggcgactatatctctgcgaaggactacgcgtttttaagaccgctgaacggaacctacagcaagtggatcaccgataaggtaaccatgcacacgatttttaagccgttccgcggttatatgccgacactctactatcaaatcagcaagcgctacgatgaaacggtgctgattcctctgtacgacgacaacgcaggtgacactttcgaggatcttttcgcgttattgcaggaaaagggcagcctgacggtgtcctctgccaatggtggttacgcgagtacgctggagtatcgggatggtgtgttttatctggagggcagagaacgcccgaaggagagaattcaggaaatcctcagcgattaccgcgtaacactggtagtcaaagaacaggtagaactcagcgaagataccgattacggtgtactgaatctcatcgttttcaatgagtttggtgacaatcccgtcatcggtgacggatacttcgtctttgacgaatacgaaaagacttctctcaaggtgttggcgatgaagcactcggacagcttggaagaagccgatgtcgaggatgatatctatcgctttgtcaaggcggagccttgcgatgtgaccgaaggcagctggcgcggcaaaccgattccgcattgggacgaaattgcggatgtgattcgtcgcctttgcgtatttgtgccgcagctggagtttttctgcgcggaaatcgtgatttccgcggatggtttcaaaattgttaatctgctcaaccatccggaatatccgaccgcgaaaccgttcagcaaggaaacctccgcgtatctgaagcgtaaagtagaacaaaaaaaagaagcctacgcgaaagcgggggtcagaatcagtcgcgggctgcataagatgcatctgcgtattcgcgcgaaattcgcgcgcgccttctatccgaaggggctggtgccttaccagtctacccgttggatttctaatgtctggacagatttttggaccaataaggaggcgaccctccgagaaaagctgtgggcgtacaagcatggatttttgtcttaccgcatcccacaatacggcatcaccgaggaaaatctcggagaatacatttccgattttgaatacaagtggctgcgtcacattaacccaaaataccggaagtggatggaggataagattacggtcaaatatgtctgctcggactacaacgactgcttcccggcttactattaccatatcatctgcaagaacggaaacaacaaggtaatctccatgatggatctgccggagggttacaccaacaccttcgacgagatcttccgtctggtggagcaaaaaggcgtgctcgcgctcaagccggatgaaggttcacatggagacggcttctataaattcacctatgaagacggcaaataccagctcaattatcaggacgtaacgaagcagcaggtgttggatattcttgaagatatcaacaaccagtatctggtaaccgaatatatcaatatgtgtgacgagctcaaggctgtctatgacggcgcggtcaatacggtgcgcatgatcgttttcaaaaaggacggcaagaatccgcagattggcaatgcctatgtgcgtttcggctccaaa

SEQ ID NO: 174 - DNA, 1602 bp, Unknown
  Unknown gut bacteria
atggcaaaagaaaaattaaactgggaagatgaacaggttagacatacctacagacataccgcgtctcacatcatggcgcaggccatccagcacctgtggccggacaccaagttcgcgattggaccggctatcgacaacggattctattacgatatggagtgtgagcataaattcagcgaagaagatttcctcaagattcagaaggaaatgaaaaagattgtgcagcaaaacctgccgctggtcagaagcgaggtttccagagaggaagcacttcaattctttaaagagagaaatcaggactacaaagtggaactgattgaagacctgccggaggatgcggtcatcacgatgtatacacagggagattttacggacctgtgcgcggggccgcacatggaatccaccggtcagattaaggcgttcaagctgatgagcgtggcgggcgcttactggagaggcgattccgacagacagatgctgcagagaatttacgcgactgcattcccgacccaggaagaactggatgcctacgtcgaaaaattggaggaagcgaaaaagagagaccaccgcaagatcggcaaggagatggatctcttcatgctgaccgaggaaggtccgggattcccgtttttcctgccaaagggcatgatcatccgcaatgagctggaggctttttggagagcggagcataagaagagaggctatgaagagatcaagacaccgctgattctcaacgagcatctttggaggacctccggccattgggatcactataaggacaacatgtatttcaccaagatcgatggcgaggattacgcgatcaagcctatgaactgcccggggtcgatgctggtatacaagcgtaaaatgtggtcctaccgagattttccgattcgctgcggcgagctcggacaggtgcacagacatgagctttccggcgcgctgcacggtttgatgagagtccgtaccttcacgcaggacgacgcacatatcttcatgctgcctgaacaggttaacgatgagatcaagggcgttgcgaaattctgcgatgatgtctataaaatgttcggtttcgagtatcatgtagagctttccaccagaccggaggactccatgggaaccgacgaagaatgggaaatggcagaaggcgctctcagaaacgccatcgaggaaatgggtgttccgttcgtcatcaacgagggcgacggcgcgttctatggcccgaagctggacttccatctgcaggattccatcggcagaacctggcagtgcggcacaatccagcttgacatgcagatgccgcagagatttgatttaacttatgtgggatcagacggtgaaaaacacagaccgatcatgatccaccgcgtcatctttggttcgattgaacgttttatcggtattctgatcgagcactgcgccggcaaattcccgctgtggctggcacctgtacaggtaaaacttctgacggtcaccgaaaaattcgcaccgtacgcacaggaagtcgccgcgaagctggaagaagcgggtctgcgtgtggaaacggatatcagaaacgaaaagatcggctataagctcagagaggccagaaacgagagggac

SEQ ID NO: 175 - DNA, 1098 bp, Unknown
  Unknown gut bacteria
atgttagacatcaaacgaatcagagaagactacgaaggcgtcaaggccggcgtagagagaagaaccaagggcagcttcggcatcgagaagattccggcactggacgaaaaaagacgcgcggttctggcggaagtggaagcgatgaaaaacaagcagaacaccgtatccaaggaaattccaaagctgaaaaaggcgggggaggataccaccgcgatcatggcggagatgcgggaactgtccgacgaaatcaaggtgctcgatgcacaggtttcgcagctggacgcggagattaaggataccctcctgaacatcccgaacgtgcctgcggacttcgtgcaggtcggcgaggacgacagcgcgaacgttgagattcgcaaattcaaagaaccgaccaagtttgacttcgaaccgaaggcgcactgggacatcggtacggatctggatattctggactttgaaagagccgcgaagatctccggcactagatttaccgtttataagggactgggcgcaagactggaacgtgcgattatgtgcttcatgctcgacctgcatacgctggatcaggactacaccgagatcctgccgccgttcatggtcaaccgtgcggcgatgaccggcaccggtcagctaccgaagtttgaagaggacatgttctatgtgccgcagaaggactttttcctgatcccgaccgctgaggttccggtcaccaatctgctggcgcaggagatcgtaccggaggcagacctgccgatccactatacggcatatacgccatgcttccgcgcggaggcgggctccgcgggccgcgataccagaggcctgatccgccagcatcagtttaacaaggtagagctcgtgaaattctgcaagccggaggattcctgggacgagctggaagcgttgaccaaggacgcggaagcggtgctgcagattctcgatatcccgtacagagtggtcagactgtccaccggcgaccttggattctcctcggcatgcacctacgacatcgaggtttggatgccgtcctacggcagatacgtggagatttcctcctgctccaacttcctggattatcaggcaagacgcgccaacatc

SEQ ID NO: 176 - DNA, 1743 bp, Unknown
  Unknown gut bacteria
atgatcggtatggcaagagaagccgccgcgacctttggcacgaagctgcgttatccgcagacctcctgcaagcaggaggaaggccacgcgaaagactatatccaggtcgaagtcaagtccccgctctgcagaagatacgtggcccgcgtggtcaaggacgtcaaggtggaggattccccatggtggctgcagagaagactgattcacgcaggcatgagaccgatcaataatatcgtcgatatcaccaatttcgtgatgctcgagtacggacagccgctgcacgcgtttgacatcgaaagtctcgcgggcaggaagatcatcgtcgataccgcgcgtgacggcgaaaaattcgtgaccctcgacggtaccgaaagaaccttggatgatgaaatgctgatgatcaacgatgcagaaaaaccggttgcggtcgcaggcgtcatgggcggtctgaattccgaaatcgagccggataccaaaaccatcgtcatcgaatccgcgaactttgccgccaacagcgtcagaacgacctcaaagagactggtactgagaaccgaggcttccggacgttacgaaaagggcatcgacccgaatctttgtgaaagagcagcggacagagtctgcgagctgattgagctgatcggcgcaggcacagtcgtcggcggcagcgtggatgtttatccggaggtcgctgagccaaagacggtgcacgcgagagtttcccgcatcaaccatgtgctgggcatcgacctgccgagaaaccagatggtggactatcttgaaagtctggaaatgatcgtgaagggcgacggcgatgatctgtatgtgaccgcaccgaccgtcagacaggacattgaaattgaagaggacattgtagaagaaatcgcgagactttatggttatgacaatctgccggttaccatcccgaaaggaaacaatgaggcaagccagtctcacgagagagatattaaggatttggcgagagatacgctctgcgcgctcggcgccaatgaaattcagacctactcctttgtcagcccgaagggtgtggacaatgtgagaatcgcggaggattcctgggaaagaggcttcgtgaagattctcaatccgctcggtgaggacacttctgtgatgagaacgatccttacgccggaaatgctggaggtcatgggcagaaactacgcgagaaaccgcgaggcgatgcgcgcttttgagatcggcaacaccttcatggcgaacatgatcgacgagcatcagcttccgtttgaaagcgacaacctcagcatcggtctctatggcggcggcgatgactttttcacgctcaagggcatgatcatcgagctgcttgccaagctgggcattcacaatctgaccttcgtaccggaaaccgaatacggtgtgtatcatccgggtcgctgcgcgagaatcctcgcgacgcatacggcagagctggagaacgggccgaaggaagaggaagtggaacttggtatcatgggagaggtacatccggacgttgccgaaaaatacggcatcggtgtgcgtgcctgcgcggcagagctgttcttctcgactgtgacggagctttccgataccaccaaggtttaccatccgctgccgaagtatccggcaatgtccagagatatcgcgctggttgtcgatgaggacatgaccgttggcgaaatcgaggatgtcatcaagcacgcaggcgcggagatcctcagaggcgttaagctctttgacatttac

SEQ ID NO: 177 - DNA, 1296 bp, Unknown
  Unknown gut bacteria
tacgaggaactggagacttctctggcaagaagcgcggcggaggttttgattttcgacccggcgcatcaggagcaggttgaaaggctgcgggccgcgcaaacgacaaaggtcagcgagtttatctgtatggatgagtcagaggactatgtgagcgtggcgcagctgcgaaacgaaggaaggcaggcgggcgcggaggcgattgcgcgatatcagaccttgcccatcgacgcgaaagaattatctctcattctttttacatccggcaccacctcaatggcaaaggcagtcatgctgtcacagtacaatattgtcgaaaatgtttacgcgctgcagctttgcgaggatatccgcagaggcgacatcaacatggcttttttgccttatcaccacaccttcggtgctaccggacagcttgtcatgctggcggcgggcgcggcgacagcctactgcgacggtttgaagtatctgcaaaaaaacatcgtggaatatcggatttctgtctttttttgtgtgccgctgctcatcgaaggcatttatagacgaatcatgctgacggtgaaaaaggaagggctcgaacgcaaggtgcgcttcggactgaagctttccgggctgctcttgaagtgcgggatcgacgtacgccgcaaaattttcaagcagattctcgatcagcttggcggcagcctgcggctggtcatcagcggcgcgtccgccatcgacccggaggcgattgagggattcaaccgatttggcattaccgcggtgcagggctacgggatgacagaagcgtctccggtcctggccgcggaaaattctcaagagcggcgtcccggctcgattggcaaggcaattccgggcgttacgctgatgatcgacgagccaaatgaagagggcatcggggagttgatcgcgcgtggacccaacgtgatgtccggctattacaaaaatccggaggagaccgcgaagatgctggcaggcggctggctgcataccggcgatctggcttatgccgaccgggacggctatctgtttatctgcgggcgtaagaagaatgtcatcgttctgaaaaacggaaagaatgtctatccggaggaactcgagcagttgatcagcaatctgccctatgtggaggaaaacatggtgttcggacagccgcggcatggagaggatacgcaggacttggcggtttgtgcgaagatcgtctatcaaccggcgtatatgcaggaagtgctcggcttgagccgcgcggaagacatcgaggcacggatccgcgcggatatcgaccgcatcaacgaagaa

SEQ ID NO: 178 - DNA, 1089 bp, Unknown
  Unknown gut bacteria
atggaggaaagatatccgaggctagagattaatctggcccacttaaaacataatgtgacgaaggtcgtagaaaaatgtggagacatgggtattcaggtcgcgggcgttatcaagggcgcgacgggtctgccggaggtcgcgaaagcatttgacgagggcggcgctgcattcatcgcatcctccagactggaacagttggaagacgcgaagaacgccggcatccaaaaaccattgctgatgattcggattccgatgctcagcgaggtagaggatgtcgttcgcctgaccgatatcagcttgaatagcgaactggttgtgatcaaggcactgaatgaagcggcgaagcgccaaaacaaggtacatcagatcattttgatggccgatatgggagacctcagagaaggctattgggacaaagaagaaatggctgaagtcgcggtatatgtcgaaaacgagctggataatatcaaactggtcggaatcggcaccaatgtcggctgctacggttccatcgcgccaactccggaaatgctcgaggaattggtcgcgatcgcggagcacatagaaaaaaggctgggacgcagactggaatacatttcgggcggcgcgaccagcagcctgatgcgtgtatgggatggcaatatgccggaaagaatcaatctgctgcgtgtcggcgaaggcatcttgctggccagagacttggatgtattctacgggtatgacatgtcggagctgtatcaggatattttccgacttaaggccgaggtcattgaggtcaaggtcaaaccgtcgcatccggtcggtacgattgccattgacgcgttcggacacacgccaacctatgtggaccgcggcatgcgtaagcgcgcgctgcttgcggtgggcaaggtggattacgcggatcccgcagagctgattcctatggaaaagggcattgaaattctcggcgcgtccagcgaccatacgattgttgatattgaaaacgccgaaaaggattatcaggtcggcgatatcatggaattcgacatttgttatgcgacgattgtgttcctgacaaactgcaggaacgtcaggatcgtgtatgtataa

SEQ ID NO: 179 - DNA, 2286 bp, Unknown
  Unknown gut bacteria
aaatatcacccgcacggcgactcctcgatatacgacgcgatggtcagactggcgcagccttggaatatccgccacgcgctggtggacggacacggcaatttcggttccgtcgacggcgacggcgcggcggccatgcgttacaccgaggcgagaatgacaccgctggcgctgcagatgctgcgcgatattgagaaagagaccgtcgatttcatcccgaacttcgacggggaagaaaaagaaccggtggtactgccgtccagattcccgaatctcctggttaacggctccaacggtattgccgtcggtatggcaacctcgatcccaccgcataatctggcggaaaccatagacgcggcaatcaagatcattgacgagccggactgcacgatcgacgatctgacgaacatcgttaagggaccggattttccgaccggcgcggtgatcatgggcaagaacgctgccaaggaggcttaccgcacaggacagggcaaggttatcgtgcgcgctgtcagcgaaattgaagaaacgagccgcggcagacagcagatcatcgttaccgagattccatatcaggtcaacaaggcgagactgatcgaaaagatggcagagatggtcaaggagaagcgtcttgaaggcatctccgagatccgggacgaatccaaccgcaagggcatgcgcattgtcatcgaactcaaaaaagatgccaacgcgcatatcatcctgaacagactatacaaacacacgcagatgcaggaaacgatctccatgatcatgctggcaatcgtgaacggtaaaccgcgcatcctgaacctgcgcgagatccttgacgaataccttaagcatcaaaaggaagtcgtcaccagaagaacgatttacgataaaaagaaggctgaggccagagcccacattttagagggctaccgtatcgcgctcgacaatatcgatgaaatcattcatatcatcagaaacagctataacgacgccaaggaaaaactgatggagcgcttcggcttatccgagatccaggcgcaggcgattctcgatatgcagctgagaagactgcagggcttggaaaaagagaagatcgaaaacgaatatcaggatctcttaaagaagatcgcttactacaacgagctgcttgccgatgaacataagctgatgggcgtggtcaaggatgagctgaccgagatcaaagaaaaatggggcgataagcgcagaaccaagatcaagcgcgcggagagcgaaatcgacgaggaagatctgatcgaagaagaaaacgtctgcattacgcttacacaccttggatatatcaagcgtgttccggtcgatacctataagtcgcagaagcgcggcggcaagggcgtaaccggcatcacgacccgcgaaaacgattttgtcaagaacatgatcatgacctcgacgcacgattatctgatgttctttaccaataccggcaaggcacacaagatcaaagcgtacgagataccggaagcgaccagaaccgcaaagggaacgcctgcggtcaacttcctcaatctgatgcagagagagcgcatcaccgcagtgattccgattcaggaattcgcggaggataagtatctgatcgcagtcacgaagcagggcacgatcaaaaagaccgcgctttcgcagtttgacacgaaccgcaagaccggtctgatcgcgatgaacctcaaggacggcgatgaactgatcggcattaagcagacctccggcaccaataacgtcatcattgtgaccaagcagggcaagtgcatctgcttctcggaggacgatgtacgtccgatgggcagaatcgccggtggtgtgagagccatcaagctcgatgcggatgatgaagttgtcgcgatggagcttgtggagccgggacaggaacttttggtcgttacccaaaagggcttcggcaaacggaccaaggttgaggattacaagattcaagtcagaggcggtaagggccttttgacctacgataaagcgaagttcaaaaagaccggcgaactggtcggcgcgatggcggtagatgaggatgacgatatccttttgatcaattccgacggcatcatcatccgcatggcggcgaaagaaatctccaagctcggccgcgcgacacagggcgtgaagatgatgaatgtcggagaggatgccaacattatcgcgctcgcaaaggttatcaaggaggatgagctggacggagagagcggcgagaagaagcaggccgctgccaaagagaaggagtccggagaagatcaggagcagatgaagctttga

SEQ ID NO: 180 - DNA, 1173 bp, Unknown
  Unknown gut bacteria
ctggcagccaatatcaacgcggtgacgccttatgtgcatttgacgccggacgataggctcttttcggtgctgccgctgcatcacacctacgaatcgacgatcggcttcctgtatccgatggcaatcggcgcttcggttgtcgtctgccaggggcttaagcacattgtcagtgatatgcagaccacgcacccgacggcgatgatcgcggtgccgcttttgattgaaacactgcacaagaagattcagaaaaacatcgaaaaggcaggcaaggattcaatggttaaatccatgatccgcctgaccaacggtctgcgcaacgtgggtatcgatgtcaagaaaaaagtatttaaggatatttatgaaagtctcggcggcaagctgcgcatcatcgtttccgcggcggcaccgatcgatccggctgtcggcaagtggctggtggatattggctttacgttcctgcagggttacgggctgacggagaccgcgccgatcgcggcgctgacaccggactttgatccgcgtgtaggttctgccggtaaggcggtttgcggtgatgaaatcaagatcaagaatccgaatgaaaaaggtgagggcgagctgctcatccgcggcgagacggtcatgctgggctactatgaggacccggaagcgacggctgcggtcatggaggacggctggttcaactccggcgacatcggctttatggacgaggacggcttcatctacatcaccggcagaagcaaaaatgttatcgtaacgcagaacggcaaaaatatctatccggaggaaattgaaaccctgctcagcaaggtgccggagatcgcggagtcgatggtttacggcaaggaggtcgcgggagaaaaagagttgatcatcaccgcgcgcgtcattccgaactacgaagaaatcgagaatctgcacgctgcagagcataaagaaccatcagccgcgtttacagaagaagagatttacaagattatctggaaccagatcaagcaggtcaaccgcaagctttccaattataagtgcatccgcaagctggaaatcaaatccggacagttcgcgaagaccagcacgatgaagatcaagcgcttcgcagagctgaagagcgatgacgccaaagaaatgcccgcagtggagggaagcgcagacgcggcagaggcggataaatag

SEQ ID NO: 181 - DNA, 2064 bp, Unknown
  Unknown gut bacteria
atggaaatgacttacggtctgaaacgggtggcagaaccacagtatgtcttgccgacatccgcgtggaagctggacaacagccgcaatatctatccgaatgaactgcggatttccgtacgcagaatacatttggagggcaccagctttaagcagatctgcacagagagcaattacaatgaagaaaaaatcaagcaaaaaatcatagatatcatcatccgccgcggcaaactgcataacccggttaccgataccggcggcctggcgttcggaactgtcgaggaaatcggtgaggagttttataatccgcagaatttgaaggtcggagataccatcatctgtaacgcgtcgctggcatccgttccgattcaaatcgagaacatcctcgcgattgaccatgtgtttaatcagattgacgcgtccggctacgcgattttgcacgatcatgtgccgatcatcaagattgaagaggacatgccggtcaatctgctgctttacacgctggatgagtccggaacgctgtaccgcctgagtcagctggcagagggacaatcaaaatttttgattgtcggcaataatatgatcacgaatttgatctttggctacgtgattcgccgtcaggtcggagccaaaggagaaatcgtctgccttttggataaaaagacgggcatgcaggtcatgggggacggcatagatcagctcatcgcgcacgtgttcaacgaagtgcattttctcaatattttgaagccgattcacgcggtcgagcgtctgaaactcaatcagcagttcgatctctccgtcaactgcgccgagattccgggggcggaaaccatcaatattctggcgaccaaagcgggcggaacggtgctgttcgcgaatttgatcaacaacctcaagatttccctgtatatcacagaatcaatttccaaaccgctgaatgtcgagaacgccgagggctatttggaggactatgaaacctttgatatcgcgctggtcagagagctggcggattactttgagaatgccgcggtgatgaaggtggaaagcgcggaaaaggacgagagcgcggaggcatcggcgtcgccttacgaccgctccctgatcgagcagagcaaactggaggattttgtctgtgtcagcaggccgatgcgtaatgtgctgcgcgagattgccaacgtatccaaatatgactgcaacgtcatcatcttcggagataccggtgtcggtaaagaaaaggtcgcgaatctgattcaaaagaacagcgaccgtaaaatgcagccttttgtcaagatcaactgcggcgccatctcgccgaacctcatagaatccgagtttttcggctatgaaaagggtgcgttcaccggcgcgaacaccggcggcaaaaaaggctattttgagattgccaacaacggcgtgatgtttctggacgagatcggcgagctgccgctcgaaatgcaggcaaagctgctgcgcgtcatccaggacggggagttctataaggtgggaggtaccagcccgatcaagaccaatgtcagaattatttccgcgaccaaccgggatttggagcggtttgtagaggaaggcaaattccgccgcgacctctattatcgtctgaacgttgtgccgattcgcatcccgagcttgtcagaacgtgtggacgacatccccgcgctggtcaaacattttctcgcaaaatatggaaaaaaattcggcatcgcaagaggcatcacagacagcgcgatggaatacctgcagcagctcgcctggcccggcaacatccgagaactcgaaaactcggtacagcgcctgatcatctcggcgaagggtgaggatatttcactgatggatgtcatgcacgaaacgcacagcgagctttttgaaggcggcggcttcggcgcggaggaagaggaacgcgcgctcccgggaggcagctatccgatggatacggaaatttctctgcaggaggcggtcgatgagtacgaaaagggcctgatcaagtacgcctgcgaaaagtacggctcgacccgcaaagcggcgaaggccatcggcatcagccagacgcagtta

SEQ ID NO: 182 - DNA, 1236 bp, Unknown
  Unknown gut bacteria
atggagcgggacagtctcctgcagatctgcagtatctgcgaatacgacgaggaaaaaatcaaagaaaaaatatataagattatcggagaacgcggtaagctgcacaatccgtatacagagagcggcggactgttttcgggcattgtcgaggaaatcgccgaggactttcacggagaacgcgcgctgaagccaggagaccgtgtggtcagcatgaccaccctgacggcactgccatgttatctggaatccatcgagagcattgactttgagtacggttttctgcgctgcaagggctacgcgatctgcttcgaaacgacgcttctgcgcgagatcaatcaatttgaagcgcgccagatcaagcacctgctgcgcgcgctgaacgaagaaggaaacttttggggaatcagcgagatgctgacctccatgcgggcggataactgcgtgatcatcggcaacagtctggtagaaatcatcctgtacgcgcgtatgctcaaaaatcgcaatcccgatgtgatcatcacctgcctgtttgaaagcagccgcggcggcagcctgcagggggaagaaacagcgctgcttgcagcgattggaagccttgtctcccatatcatgttcctgccgatgaatctgccgctggagaccgcgcacgcggtattcgaggcacagcgttacaaacctgtggatgttgtgatcaatctggaagaaatcaagggatgcgagagcgttgccgcgctgctcgttcgctccggcggactggtctgccacacgaatatcggcaacgcctattcgaaaggcatgctgattgcggacagcctgggtaaagaggttgtcaattacgcactggacggagtctgcgcgcataccttcgactacgcgatgcagctggtcgtgagtacgcaggatgtattcgcgaatttggacgatttttacgccaagtcgcagatcaatcacctcaaaaaacggaagcctgccgtcatgaaggaagaacgaacccaaatggccgcgaagcagatcgatggtttcctttatatgagcccggcgaccgagttcatggtcgaggaggtgttgaacgtggcacagtacgactgcaacgtcatcatccagggcgaaaccggcgtcggcaaggaaaaagtctttgatctgctgcagcagaacagcccgcggcgttctcagccctgcgtcaagatcaattgcgcgacgatccaggaaaatctcgccgagtcggaattcttcggc

SEQ ID NO: 183 - DNA, 1560 bp, Unknown
  Unknown gut bacteria
atgaaagactatacaagcgaaatgataagaaacgttgctttattaggacacggcggatgcggcaaaacaacattcctcgaggcggcccttttggcaaccggcgtcatcaccagattaggtaaagttgaggatggttccacggtatccgactacgataaaatggaaattgaaaaaggatattccatcaacacgaccttagtaccggtagaatacaacaatgtcaagatcaactttgttgatactccgggattcttcgactttgcgggcgaagtacagggcgcgctcagaggcgtggaagccgcggctatcgtggtggacgcttccgcgggcgtacaggtaggaacagagaaagcatgggacgcatgcaaaaagatcggatctccgaaatttattattctcaataagatagataaagaaaacgttgatgtggcagcgacgatccagcagctgcaggacaagttcggcaacgcggtcgtcacgctggaggacaaggacgcgatggcagaagcgatcgcggaagttgacgaagaattgatggatatctacttcaacgagggaggatttacggacgagcagttcagcaagggcctgaccaagggtatcctgcagggtgatatcgtaccggtgttcaagtgctcctctctgaccggcgaaggcgtcaaagaagttctgcaggaaatcatcgaattcgtgccgaatccaaccatcgaaggttatcgcgcgaaggacgaaaaccagcagccggtgatcatcaaagcgaatccggacgacaaaccggtgctgttcatctttaagactttggcggactccttcctcgggaagatttctcttgcaaaagttgtcagcggcaaggtatccgccggcatgaccctgcataatttcagagtggaaaaggacgaaaaattaggctctgtattctttgtcagaggcaaagaaaagatcgactgcaaagcagccgtcgcgggcgatatcgtagcactcggcaagctggaattcaccaagaccggcgataccctgtccgaaaagagcaatccgacctttatcaatccggtggaattcccgcagccgaccctgttcatggcgatcgaaaccgcggataagggcgcggacgataagctctccacaggcttcgcgagactgaccgaagaggatccgacactggcgctggtaagaaacaaggaaacgcgtcagacattggtcggcggtcagggcgaaagccagcttaacatcgcgctgagcaagttaaagacaaaatacggcgtcagcgtcaacgtggtgccgcaaaaaatcgcgtacagagaaaccatcaagggaacttccgatgtacagggcaagcataagaagcagtccggcggttccggccagtacggcgatgtacatatcaagttcgcgccgtccgcgcaggaatttgaattcagcgaagagctcttcggtggctctgttccgaaacagtatgttccggctgtcgaaaaaggtctgctggaatgcatggaaagaggtccgctggccggctgcaaggtgcagaatgtcaaggcgaccttatatgacggttcctatcac

SEQ ID NO: 184 - DNA, 1362 bp, Unknown
  Unknown gut bacteria
atgaaaatagccatcgtcggtgccggcaagcttggtatgaaagtgaccaacgcgctagccggaggcaatcactcgatcaccatcatagataaaaacgaagcgatcatcaatcgcatttcccatcagtacgatgtactgaccgtcgtcggcgatgccaagcaggtcagcctgctcagacgcaatgacatcgatacctttgattttctcatcgcctgtacggacagcgatgagaagaacatgatcatcgcgtccttcgccaaaaagatgggctgttccaaggtcatcgcgcgcgtacgcgatccggagcacatgaatcagatcgattttatcaaggaaaccctcaatatcgaccacattgtcaatccggatctgtccatcacgctcgagatctacaagtatctggtcgaaaaatacacactgaccaacggtatctttaccagcggcaaggttgccatggtccagttcaatgtccgcagaatgagccgcctgatcaacctcaccatgcggcaggtgccgaatcttttgccgaacatgctgatcgtagcgatttccagaaacggtaagatcatcattccgcatggcgacaccatcgttgaggatcacgataccctctacctgatcggcgaaaagaatgaaattaccgagctgcacaaccgcgtctacgagcgcggcaaatataccgatctgcaaaaagtcatgatcgcgggcggcggtaaaaccggattttatctggcgaaacgcctctcggaattcggtatcgccgtcaagatcatcgaaaaggacaagaatcgctgctattacctttccacgcatcttgacgatgtcatggtgctgcatggcgacgcgaccgatcaggcgttgctggaagaagaaaatctcgaagagatggacgccttcattgccgcgaccggtctcgacgaagaaaatcttctgctcgcgctgattgccaagcaggttaaggtcgaggacgtcatttccaaggtcagccgcgaaagctacaaggacctcattgagcagatgggcatcgatatggtgctgaacccactggacatcgtcgccagcacgattctgcgctatatccagggctccaaacgcattatttcctcccttctgatccagggacaggcggaaatcatggaaattatcgcgaccaacgacatgaagctcgccaacgttccactcgcgcagattcagctgcctgacggggttttgatcgccgcgattcaccgcggcaacaatgtcatcattccgaacgggcagacgatgattcacgaggacgacaaggtcacgattttctgtctgctttcggacatcggcgagctcgaaaagctgatgaccgtcaagcgcggatttttaagataa

SEQ ID NO: 185 - DNA, 1500 bp, Unknown
  Unknown gut bacteria
atgaaaggtttaaaagcatttctcaaattcgtgccggtattcgtactggcagggctgatgatcttcggcaaaggccatctctttgatggtcaggacgctatgatcgcggctcctctcgctttcctcgcagcggtcatcatcgcgatgctggtggaaaagaaaaaatggcaggaatgtctggatgccgcgatgggctccgtcagcaacatcctcgttgccctgttcatcctgatgctcgcttatgttatggctagctgcttcatgagcttcggtgtcggcgcttccgttgtaaacatcgcactgaagctgggcgtcactgcgagaaccgtcgcttgcgtcggtctggtctgcacaggcgtactgtccgttgcgaccggtacctcctggggtacgttcgcagcctgcgcaccgattttcctgtggttatcccacatcgtaggcggagatatctatctgactgtctgcgcgatcgccggcggtgcttgcttcggcgacaacatcggtcttatctccgatacaacaatcgtatcctccggtatccagggcgtacaggttgtagacagaatcagacaccagggtgtttggtctctttcctgcttaatcttggcagcaatcgcgttctacgttgcagcttccgtcatgggtctgcacggctccggcgatgcttccaccgttatggataacatttctccggaagtattcgacttcctcgcggtagaacgtccgcaggcacttgacctcttagatcaggttgcgaacggcgttgcgctttacatggttattcctttggttctggttatcgtactggctgttctgggtgtaaacaccttcgcttgtatcggttctggtatcctttcctcctacatcttaggtatcttcgcaggtacagcttgcggcgtacaggaattcctggataactacctcttcaccggtattgaggatgcaggtgcctgggttatcccgatgatgatgtgggttgcggctttcggcggcgttatgcagctgatggacgcgttcgcgcctttggcaaacttaattgcaaagatgtccaagaaggtcagacacctcctcggctggaacgcagtgctttccttactcggcaacgctgctctggctgacgaaatggcacagatcgttaccatcggaccggttatcaagcaggttaccgaggataacgttgtatgcgcggacgaagaagctgagtacaagttgagactcagaaacgcgaccttcggcgacgcgatgggcgtattcggttcccagctgattccttggcacgtttacctcggtttctacatcggtatcacttccggtgtatatccgctggttcaattgacaaacctggacttcatcaagttcaacttcatggcaatgatcgctgtattctccctgttgatcttaaccttcacaggtctggacagattcattccgttcttcaagatgccgacagagccggaagtacagctcaagaagaatatcgaaaagaacaaagcagcttaa

SEQ ID NO: 186 - DNA, 2115 bp, Unknown
  Unknown gut bacteria
atggacagcattcaaaagattatcaaaagagatggaagaatggttgatttcgatgtggataaaatcgctgacgcgatttttaaggctgcgcaggtgctcggaggcagagaccgcgagatgtctgtctatctggcaaagcaggtggaattatatttgcttgagatctgccataatcaggttccgaccgtagaacagattcaagacgccgtcgaaaaaattctgatcgaaaacggacacgcccgtacggctaaggaatatattctttacagagcggagcgcaccagagtcagaaacatgaattccaagctgatgaagatttatgaggatctgacctttaaggaagcgaaagagaacgagatcaagcgcgaaaacgccaatatcgacggcaataccgcgatgggaacgatgctcaagtacggttcggagggcgcgaaagagttctacaagagctatgtcatcgatccgaagttttccaaggcacatgaagccggcgacattcatattcacgatatggatttctacacgctgacgatgacctgctgccagattgatctggtgaaactgctgcagggcggcttttcgaccggacatgggcatctcagagaaccgaacgatatcgaaagctatgcggcgcttgcctgtattgccattcagtccaatcagaacgatcagcatggaggacagtccgtgccgaactttgattacggcatggcgcccggcgtgaaaaaagcctataaacgtctgtatgtgacgaatctcggcaagatgctggattttctcgaagatgtggaggacggcgtcgagagaatgaaagcgcttgaaggtaagattgagcatgaatacggggtattcccttgtatggcatgggataacaattacgcggaactggagctcgctgagctgaaaaaaatcgttccggaggcggaagcgatgaaaatgcaggatcgttcccgtaaattcgcagacaaggaaatcagacgaaaaacctatcaggcgatggaggccttcattcataatctgaacacgatgcattccagagcgggagcgcaggtgccgttcagctcgatcaactacggtaccgacacttctccggagggtcgtctggtgatggaaagcgtgatgctggcaaccgaagcagggcttggaaacggcgaaacaccgattttcccgattcagatttttaaggtcaaggagggcgtgaactacaatccggaggacccgaactatgatctgttcaagctcgcctgcaaggtttccgcgaagcggctgttcccgaatttctcatttttggatgcgccgttcaacaagcaatattacatcgagggcaaaccggagacggagtgcgcgtatatgggctgccgaactcgcgtgatcggcaatgtctatgacccgaccagggagattgtttttggcagaggcaacctcagctttacatcgatcaatctgccgcgtttggcgattaaagccaagggcgacgtcgatcttttctttgagcttttggacaatatgattgatttggcgatgggacagctgatggaacgctttaagattcagtcgcagaaaaaagtgagaaacttcccgttcctgatgggacagggcatttggctcgactccgaaaaacttggaccggacgataccatcgaagaagtaatcaagcacggtactctgacagttggtttcatcggtttggcggaatgtctcaaggctctgatcggcgtgcatcacggagaatccgcggaggcgcagaatttgggtctggaaatcatcggctatatgagaaaacgcatggatgaacaggctcgcaagaccggactgaactggtctgtcatcgcgacaccggcagaaggactgtcaggaaggtttgttcgcattgacagagaaaaatacggcagcattccgggtgttaccgatcgtgactactatacaaacagcttccatattccggtctattatccgattaacgcgtttgagaaaatcagactggaagcaccttatcatgagctcaccaacggcggccatatctcctatatcgagctcgacggagatccactcaaaaatctagatgccttcgagaaagtcgttcgctgcatgaaagaaagcggaatcggctacggc

SEQ ID NO: 187 - DNA, 1584 bp, Unknown
  Unknown gut bacteria
gtgagcgccgcgctgctcgtaacttccatttccacgccatgcccggccttcgcggcatccggcagctccaagagcagcctgattacggtcaagacaccgagcaaggaggatatcgtcaaattcatgcaggagcatccgaccggagatatctactttgacgaagacggaaagtctacgggcaagacccatgaaaccgactatctgactgcgccaaagacctccgcgccttacgaggcgggcaggctcgcggaatcagaggaagcggcggcgctcaataccatcaagacgatacgctatattgccggtatttcttccaacctctatatctcggaggaatacagccggctggcgcaggcttccgcgctcgtcaactatgtcaacggcaagctgacgcacacgccagccctgccggcatcgatggatcaagctctcgcgaagcagggctatgacggctcacagcattctaatatttcgtggacctcctggagcgaaaacagcctcaaatggtcgatccttaccggttggatggacgacagcgacgcgaacaatctcagcacgctcggccaccgccgctggattctgaatccggcgatgagcatgacaggcttcggctctgttaccggaaacaagggcacctatcaggcgatgtacgtctacgaccgggagaaccgcgacagcgattataccggtgtctgctggcccgcgcgcaatatgccgaccagctatttcagtccttcctccgcatggagtatttctgtcggcgaggaactggacacctccggcgtggtcgtttccatggtgcgtttttccgacggaaaatcctggaccttcagttcgtactccgcggacggtgatttctacgtcaacaacgcggcctatggtcagaagggctgtatcatcttccgtcctgccagcatagacgaatacagggatggggatcgtttcttcgtttacatcgccggcctcgacgagccggtcagctatgaggtgcatttcttcgacgcggagcgcttctacgccgcgccggcgccgacgccggattcgccgacgcggaacgaattcggagatccggttctgacctggtccatgccggacaaagcggaaagctgcaatctataccgcaagccggcaggcggcaaatgggagctgatcgcctcggagcttgacgacagattctatgaggatgtcgagacagaacccggcgttcaatactattatcgctgcacttccctgcgtactgtcggcggcacgctgtacgaaagtctgccatccgctgcgaagtcagttacgaccccgctcagcagaccaaagatcaaatacctcagagtaagcggacgcgacacaaacaccttaaaatggagcccggtttccaaaacctccggctacaaggtctaccgcagagtgaaaaacggcaaaaagtggagctcatggaagctggttaagacgaccaacaccctgtcctatcgcgatgtcaaagccaaatccggcaagacctatcaatatcgtgtccgtgcctatcgtacctaccacaggcatacggtcaacggcacttactcggttaaaaaatcaatcaaaaccctttga

SEQ ID NO: 188 - DNA, 849 bp, Unknown
  Unknown gut bacteria
gccaacacctccgatatgccggtagcggcgcgtgaagcatcgatttataccggtattaccatcgcggaatattttagagatatgggatactcggttgccttgatggcggactcgacctctcgctgggcagaggcgctgcgagagatgtccggtcgtttggaggaaatgccgggtgaagagggctatcccgcttatcttggttcccgcctggcgcaattctacgaacgcgcgggcagagcaatctccttaggcaaggaaggacgtttgggcgcgctttccgcgattggagccgtatcgcctccgggcggtgatatttcggaaccggtatcgcaggcgacacttcgaattgtcaaggtattctggtgtctggactcttcgctggcctataagcgtcatttccctgctatcaactggctgcagagctactccctgtatgtggataaactccaggagtggtacgaaaacaatgtcgcgaaggacttcccgaagctgcggcaaaaggcactgcacctcttgcaggaggaagcggagctgaacgagatcgtgcagcttgtcggcgtggattccctgtcctttaccgaccgtttgaagttggaaactgccaaatccattcgtgaggactatctgcaccagaacgcgttccacgaaatcgatacgtttacttccacgacgaagcagtatctgctgctcaagatgattctcggctggcatgaggccgcgatcaaggcagtcggtgaaggcggttccttcaaaaaaattactgaaatgagcgcgcgggaacagatcggccgtttcaaatatgtagaagaagcgaagattcaggagcagtacgaggcgattctcgcggag

SEQ ID NO: 189 - DNA, 1206 bp, Unknown
  Unknown gut bacteria
atgacaacagaaagaaatacttttttagaagaaaatctggcgcgggttcgcctgcgattctcaaaggaaaccgaactggatgacgagcgcgcgctgcgcttgattaccgagaccgtctttgatgacccgcaggcctgcggcatgccgcaggctgtactggaagactgtatgcggaagattttttggaaaacaaggcgcaaactgaatcttttagatcctctgctgcaggatgatgaggtcaccgagatcatggtcaacggaccacagagcatctttgttgagcgctgcggcaggattgagcgctatccgtattgcttcgattcggtcggcgagctggaggaggttctgcgcggcatcgcgggacaggtacatcgggagatcaacgagatgcatccgatcgtcgatgcaaggctgccggacggctcgcgtgtcaacggtgtctataagaatgtcgcgattaacgggcctgtgctgacaatccgaaaattctcagagggcttcatgcatctggcggatttagaggcgaacgagacggtttcacacagcggcgcgcgtctgcttacaaagctggtgagaagcggatataatctctttgtcagcggtggaacctcgtcaggcaagacgacgctcctgaacgcgctcgcggaggcaattccccgccaggaacgcgttgtggtcgtcgaagacagcatggaactcaagatgcgtgaaattgaaaacatcgtccatatggaatgccgcagcagcaacgcggcgggcaaaggcggtgtttcgatggcggatctgattcgcagcagccttcggatgcggcccgaccgcatcatcgtcggagaggtgcgcggcgcggaggtcatggatatgcttaacggcatgaataccggacacgcggggatgagcaccggacatggaaactcggtggaggggatgctgaagcgtctggaatccatgtatctgatggcgatgccgctggccatcgacgcgattcgggcacagatcgcggcaggcattgacattatggtacatatcgaaaagctggagggcgggcagcgtaaagtgacagatatcgtggaacttgtggattaccatgaaggcaaatttgtattgaatccgctgatgcggctggaggcggacggctgcctcgcggagaccggaaattccctggtgcataccagaaaattgaagctgaaaggagaggagcatgtgtga

SEQ ID NO: 190 - DNA, 1011 bp, Unknown
  Unknown gut bacteria
gtagcaattaacggatttggacgtatcggcagactggcttttcgtaagatctttgaagatcccgagatgcaggtagtcgcaatcaacgatctgactgaccctaagatgctggcgcatcttttaaaatatgacagctcacagggcgcgtaccatggacacgaggtgctttgggatgaagattccatcacagtggacggtgcggatattccggtctacaaggaaccggacgcgcgcaatctgccatggaaagcactcaatatcgatgtcgttttggaatgtacgggtttctatacgtctaaagccaaatcacaggcacatatcgacgcaggcgccaagaaggtgctgatttcggctccggcaggcaatgaccttccgaccattgtttacggtgtcaaccatgaaacgctgaccgaaaacgaccatattatctccggagcctcttgcacgaccaactgtctggcacctatggcaaaggttctgaatgattatcgggaagtgcgcacaggctttatgacgaccattcacgcgtataccggcgatcaaatgcttttggacgggccgcacagaaaaggggatcttcgcagagccagagcaggcgcgatcaatatcgtgccgaactcgaccggcgcggccaaagcgattggtttggtcattccggagctggcaggcaaactgatcggttccgcgcagagagttccggttccatccggttccatcacgattctggacgctaccctcaaggacatgaccgacagtgtctccgtcgagggcatcaacgcggcgatgaaggccgccgccaacgcgtccttcggttatacggaggaggaactggtcagctcggatattatcggcatgagctacggatcgctctttgacgcgacgcaaacgctggcacagcagtgcggcacgcatatctatgaggtgcggatcgtggcatggtacgataatgaaatgagttatacctgccagctgatcagaactttgaaacatttgaaaaagtttattaaataa

SEQ ID NO: 191 - DNA, 921 bp, Unknown
  Unknown gut bacteria
tttatgaaaaaagcagaacaagcagaactaaatttgcagccgcaaaaaacagcggaactggaacgaaactacaaggattcagtatttgtcacagtctttcatgaaaaagacaagctgatcgaactctacaacgcaatttttgacactaattatggcatggatactgccatcgatattgtgaccatcaaagacgttctgttccgcacgctcaaaaatgacgtttcctttgtacttgacaagcgtttcgtcgtgctcgtggaacatcagtcaaccatcaacggcaatctgccgctccgggaccttttgtacatcgcgactgtactgaaacgtatgatcgacaccaaacagctgtatcgcgaaaaaacactgcgtatcccaagaccttcctttatcgtcctgtacaacggatcggaagatatgccggaatatcaggagctgcgcctgacagatgcctatctcggcgaaaaggaagaggcggaagaagatgctttacaactcatcgttaaagtgtataatataagtagtgagaagcacgcagagatattaaaaaaatgtgagacactcaggcagtacagccgctttgtggagatcgtgcgcagttacggacacatcgaccaattaagcaatgctgtgatggtgcagatcatggagcagtgcaaaaaggaaggcgtcctcacagaatttatggagcattacggaacggagttgattgagatgttattcaaagaattgacacgcgaagaagatctcgaaatctcgagactggacggctacgacgccggcgtaaaagacggcgagaaatccggtttcagcaaaggcgagaaatccggtgagcgcaaggcggcatttgatattgctaaaggcatgcagaaagaacatatcgccgcagatgtgattgcaaaaataacggggcttacgctt

SEQ ID NO: 192 - DNA, 1305 bp, Unknown
  Unknown gut bacteria
atgtttgatattcaggaaaatctcaaaaaactcccggacaccccgggagtttatatgcataaggacgcgctcggacaggtcatttatgtcggcaaggcgatttcgctccgaaaccgcgtgcggcaatactttcaaagttccaaaaatcagagccccaaggtacgggcaatggtgtcacacattacagaatttgaatacatcacctgcaagacggagatggaagcgctgattttagagtgcaatctgattaaaaaatacgcgccgaagtataatgtcctgctgcgcgatgataaaacctacccgtatattaaggtcaccacgcaggaaaactatccgagagtgcttaagacgcgcttgattgaaaaagacggcgcgcgctattttggcccttacagtgacgcaggcgcggtcaatatgacgatcgacctgctgaataagatttttactctgaaacgctgcgcggccaaaagttttccaaaggactggaagccctgcctgaactatcacatccgggattgccgcggcatctgcaccggacaggtaaagcaggcggaatacgccaaggtcatcgagcaggtgctgaccttcctttccggcaagacgaagccgatcaccgacgcgctgacggcaaagatgcaggcggcctccgagaatctgcagtttgaagaagctgcggtttatcgtgactatttgctgtccattcgggcgctcggcgaaaagcagcgtgtcacgatggtttccggcaaggatttggacatggtactgcctgtcggaagcggagagcagacctcggtggtggttttcaacgtgcgggacggcaagctcagcggcagggataccttcaacatgcaggtggaaggcgaggatgattacgacgcgctgatcgggcagtttattaagcagtattacagcatgtgggccaacgtgcccggtgaaatcatcgtaccgaagccgctcaaggaggcgcagctgatcgagcagtatttggaaagcctcggggaggggcgcaaggtgcggatcttcatgccgcagaagggtgagaaacgcgcgcttttggatctggcgcggcgcgacgttgtggaaatgaccaagactcttgaggtcaaagccgcgactgccagagaaaaggaagaagcggtacgcggagcgatcgccaagctgctcggcgaaacggagccgaaggaggcttatcgcgtggagtcctacgatatttccaataccaacggcgtcgatacggtcggggcgatggtagtctttcgcaatcagaagccggtcaaaaaggattatcggcgttttaagattcgg

SEQ ID NO: 193 - DNA, 1587 bp, Unknown
  Unknown gut bacteria
atgattaatgttacgggtgtctccgaaagccgggtggcgccggcagccgcctattacgcgaatcaaaaagatcaaagcatcatcatcgtttccacagatgtgagagcaaagagacttgcttcagatctttctttttttgtacaggataaagaaatcattaccctgccggaggaagaacaattcctgctgcgctatgcggccaaaaatcaggatcacatgcttacccgcctgcgagcgctcaaggcgctgcgtaccggtcagcctgtggtcgtcatcgcgcctgcttccgctgccgtcaaaaaaatcgcgccgcacagcagcttcgaaaaatcctcgttccgactgcgtcttggggaagaagtcgatttggacaaaatcaaaggcaagctggtggcgctgggctatgaacgcagggaaatgatcgacgcgcgcgggcagttcagcgtgcgcggcggaatcctggatatctacacgccggatggcgaaaccccttatcgcatcgagttttttggcgcggaggtagattctattcgcgcttttgatatcgacagccagcgttctttggaaactctgcagtctgtcgaaatctatccggcagaggaaatcctcagcgaacgtgagatttttcaaagcgccgagcaaaaaatcggcaaagcctaccgtgaggctgcgaaaaaagccgcggtgaccagtgaggaactctccgaaaaaattggggcgaccggagaggaactgcgcgaatatgccgcgcatgccgcgaacctgcagcttttagagaactacattcactatttttacgatcatacagaatatctatgggattatatggatgatggctgcgtgatgatcgatgatccggagcgcgtcgaagaaacactgcagctgcggacggaggaattgcgagaggacttcggcgtcatgctcgaacgtgggcaggtcattgccgaagacgcggcagtcatcacagacaaaacagattttcgcaaggtctacagcaaaccgggcaccgtcgtgtttacgccttttccgaagcgcgtcgcgggggtggacagctttgatcgggtatacaatctgcagagcaggcaggttttgaccttccatggtaagatgaacgtgctggagagcgaactgaaggcttatgtcaagaagggttatcgtgtcacgatcgtctgctcgtcacaggaacggctggagaatctgcgcgagttcgcagagcggatcggtcttttggaaaaactgaacttcgcgcagggaagtctgactgcgggcatcgaccttccgacggagaaggtctgctatatcagcgaaagcgatatctttgaaacacgtaaaaagacccgacgcaaaaaatacaaggataaaggacagaagctgcagtccttcgccgatatgcgcgagggcgatttcgtcgtgcatgagaaccatggcatcggtaagtttgtcggcattgaacagcttacggtgcagggggaaaagaaggactatatcaaaatcaaatacgcgggtaacgatatgctgtacgttccggtggagcagatggatatcgtgcaaaaatacatcggttctgacggaggcgcgccgcgtatc

SEQ ID NO: 194 - DNA, 1023 bp, Unknown
  Unknown gut bacteria
atgaaaatggcgattagagtaggaatcaacggttttggaagaattggacgtgttgtgatccgcgcggcgatggaaatgccggagattgagatcagagcgatcaatttgagaaacgcggatctggagtacatggtttacatgctcagatacgataccgtttttggcagattcccaaagagtttagatcacgaccagtccggaatatacattgacggcaaacatgtggatgtgttttcctgttccgacgcgctggagatcccgtggaaagaagcaggtgtcgattatgtgattgactgtaccggcgcttatgttacgaccgaaaaagcgatggatcacatcgaagcaggcgcgaagcatgtcattatttccgcgccggcaaaggataaagatacaccaaccttcgtttacggcgtaaatcacgagaactaccattcggatatgaaggtcgtttctaacgcgtcctgtacgactaactgtctcgcgcctctgatgaaggtgatcgaagatcattacgggattaaggaaggcctgatgtccaccattcacgcggcgaccgcgaagcagaaggttgtcgatgccaaatctctcaaggactggagaacaggccgcagtgtcttcggcaatgtgattccgtccacaacaggcgcggccaaagccgtcgggctggttattccgtctctccagggcaaaatgacaggtatttcttatcgtgtaccgactgcggatgtttccgtgatcgatgtcaacgtggtattgaatacaccgacgagcggtccggagctcagacagaagatcaaagaagcttccgagacttatctgaaaggcgttttggaatatgtcgatgatgaagtggtttccggtgactttgtgggagattcccatacctccatctttgactccagacagaccattgaactgaatgaccattttttcaagctgatcgcctactatgacaacgaattcggttactccagcaatctcttgaatatgctcaaatacatgcatcagatcgactgtgaataa

SEQ ID NO: 195 - DNA, 1617 bp, Unknown
  Unknown gut bacteria
atgacctacgaaaaggaaattccggagtacgcgatggtgccggcaaaggaaatggaggagcgcgtcatcacgcctgtcggcaaagaggccgtctataccgaggtacagctcaccaacatcagccaaaagcccaaaacgatgattaccatagaagaggacatcctggtgccggataccaagccggatctcgcgagaatttggttgattgccggaccgccgcgcccgccgaaccgccgtctcgggcccgtagagaagggagaggattccctgagtctctccggtgaaatcgaactgcagacgctctatcttcctgaaaaacaggagggtgcggaaaccgtgatttcggtgcagacgcgagtgccgtttcaggaacagtgccatatcgcgctgacgccggaatccacgctgcaactggagattcatgtcgaaaaaatcgagtacatggtcattaacgagagaaaatatcgcgtcaagatttttttggcactctgcatccgcgagtatgtcgaccgcaatccggcgctttttgaaagcatcaacggagaagagattcagacgcggcgggaaaaaatcgaaatgaccaacgtcgcgcagagaagaagtgataccctgcatatctgtgaagatctggatatcaagacagaatacccgccggaagcggtcctctgtcagagcatcgcggtggtagagaattataaacaggtgacagaagaaaaggtggtaatcagcggctttgtctgtgtcaatcttttgtatcgctgcagagaagatggcgaatattgcgaggatctgcatcaggcgcgcgaaaaggtggaattcacgcagtttattccgctgcatggcggcggggtcgcgggcgcgggcagtcagattgtcttcgatggcagtgaccttagggttaagccggcgcgcggagaagatggggaagaaattctgcgcctggaaggagatcttctgaccgaagtcgaaatctaccgcaatacggaacgggctgtcgtcgtggacgcttatcacagacaaaaagattttttgtgtgattatcaggaggaaccctgctgcacactgatcggaacgacgatgggagaggcttccttacgggagattttttcaccggagctgccggagagcgaactcgcgcgggttctgtacacagagggaagggttttggatggacacagccgctgcgagcagggcaagattgttacggagggaaagctgtctgtcagacttctctgtctgtgcggtggaaacccggaaacagcaggacagctgttcagcgtaacggaggaactgccgtttcgcgtggtaacgagtctgccgcagctagaaggcagcgagagcattcgcgagcagatctttatcaaggagctttgggcagaaaagatcaatgggaagcagctcgaatgcagcgcgaacgtactggttatgacggaggtgacgcgggagagcgtgattcggctgctgacgaatccggcattcgcggaaggaagcggcgcgcggcagccggcgccgatggtgatctacattgtcagggagggcgatcagctttgggagatcgccaaaaaatataaaagtacggtggacgcgatcatcgcaatcaatcagctcgcggaggaa

SEQ ID NO: 196 - DNA, 1482 bp, Unknown
  Unknown gut bacteria
ttggcggcggcctttgtcgcgctgctgatcaagctcgacgcgcttccggcgaagtatctttatgcggggattgccgtactggtcatcgcatcggtgttcatcgtgccggtgatgttcagcaagcgcggcaaaaaaggcaggaaaatcggagcttccgttgtcgcgctgcttctgatcggagtgttcggcgttggcacgtggtatctgacagatacgctgcattttatcgataccattacgcaggtcaagcaggaaacagaagactattacgttgttgtgccgcaggaagcgctctttgaagacatcaacgggattgacggacaaattgtcgggacccatatgacgagtgatttacgctattcggaagcgaaggcgaagctgcaggaggaggtccaggtgacctatgcctatgaagcagatgtcaaaaccttaatcgaaaaactgctcgcgggagaatatcaggcgatctttttgccggcggccacctacgacaatctgaagacagaagagaatgcggacagcggaatcgacgcggatctggacactttggcgaaggtgctggcaacgatttcgattccgattgaaaccgaggatcagacctccgcggtcgatgtgacgaaagagagctttaatgtttacatcagcggttccgacatgtccggttctatcgacgttacgaaccgcacggatgtcaacatgattgcgacggtcaatccgcggacgcacgaggtgctgctgacctcgatcccgcgcgattattatgtgacactgccgtccaagaacgccaaggacaagctgacccattccagtctctatgggatgcaggaaagcatcggcgcattggagaacgcgttcggcatcgacatcaactactatctgcgcgtcaactacagtacgatcatcaagctggtcgatgcgatgggcggtatcgacatcaattcagaacacgacttctatacctcgggcatgaaggggatgccggagctgaatgggcatcactttgtcaaaggcaagaatcatgttgacggcaagctggcgctggcgttctgcagagaaagacatgctttcctggccggtgatatgcagagaaacgagaaccagcaaattgtgctggaagccattctcaaaaaagctctgagcagcaagacgattctgaccaaatacaccgcgctcctggacgcagtcaaggaaaacatgtccaccaacatgacgccggaagaaatgtcggcgattatcaaaatgcagcttgctgatatgccggactggaagatcaaaagacaggcgattaagggaacgaacgcgtatgaatactgctacgcgctcggctttaaggcggcgacggtcgatgcgattccagaggaagaagcgaaggctgtggatgaaattgtaagaatagcgacagaggatatacagacagaaagcgggacaaaacaagatgcagagcaagaagacggacagaaagatgaaacgggtgatcgctaa

SEQ ID NO: 197 - DNA, 1200 bp, Unknown
  Unknown gut bacteria
atggaggaaacgaaaatgtctgatgaaatgaaaacaatggaagctaccgtcgatacgaaggaaacggaaatgcctgtgcttgtactgccgggcgaggaagaaacgcagctcgaccaaatgatggtagaggcatctgcacagccggaaacggtcaaagaggtccacatcgaggataagattcagctgaccgacgcggagaaaaaggcagtagacgatttcgcggcaaagatcgatatcagcaacgcgaaccatatcctgcagtacggcgcggacgcgcaggcgaagattacccagttctcagacatggcactggaaaaggtcagaacgaaggacctcggctctgtcggcgataccctcagcagcttagtggtggaactgaagggcttcgacccgaacgaacagaaaaaaggcttcttcggtcttttcaaaaaagcagggaccagcatcgcggagctcaaggcgaagtatgacaaggcagaggtcaatgtcgagaaggtcgtggatgtgctggaaggtcatcaaattacgctgaccaaggacatcgcggtactggacgaaatgttcaaggcgaatatgaccaactttaagcagctttccttatacatcgtggcaggcaagaaaaagcttgaagaagtgcagaatgtgacgattccggcgatgcaggcaaaggccgcggaaaccggcgcgatggaggacgcgcaggcggcgaacgattacgcgaacctgtcgaaccgcttcgaaaagaaactgcacgatctggatttgaccagaaccgtttccctgcagatgggaccgcagatcagattgattcaaaataacgacactctgatggtcgaaaagattcagaccaccttactcaatacgattccgctgtggaagagccagatggtgctcgcgctggggcttgcgcacagcgagcaggcgatgcaggcacaaaaggcggtttccgataccaccaacgaactgctcaaaaagaacgcggagctgctcaaacagactaccgtcggcgtcgcgcaggagtccgaacgcggtatcgtggatatcgaaacactcaaacacaccaatcagatgctgatcgatacgttggatgaagttgtgaagatccagaacgacggcagagcgaaacgcaaggccgcggaagtggaactgatgaatatcgaaacgcagctgaaagataagatgttggaattcagaggctaa

SEQ ID NO: 198 - DNA, 1410 bp, Unknown
  Unknown gut bacteria
atggcattggcaaaagactatcagtccgtcatgggcagatccaacgaaattcaaaaagaagccctcgggcttgactacgctgactttgagacctctccgatttccttcgactatgacgctttgatgaaatccacaggatatacgttagacgaaatcgaaagaattcaaggactgcacggtgtcggcaacacaccgcttctggaactcagaaacattaccaaattagcgcgtaaatacgcgaaaccgggctttggcgcaagaatcttcgccaaagatgaatcctgcaacgcttccgggtccttcaaggacagacgcgcggcgtgcgcagtcgctcacgcgaagaaattaggctataagggcgttatggctgcgacctccggcaactacggcgcggcggttgcttctcaggccgcgatgcagggattaaactgcatcatcgtccaggaatgctacgactcccatggtgtcggacaaccggagatcgttgagaaggcgagaaaatgcgaagcgctcggcgcggaagtcgttcagctgaccgttggaccggaattgttctactccttcctgtccatcatggaagataccggatacttcaacgcttccctgtattctccgttcggcattgccggcgtggaaaccttaggatatgagatcgcgacacagtgcagagaaaagctcggcaaggatcctgacgtcgttgtttgcacaaacgcgggcggcggcatggtgaccggtacggcgcgcgggctgctcaaagcaggctgcaaggcagaggttgttgctgcttccatcgacttaacgggactttccatggcgtccgatgtggacttcaataaaaaatcctgcacgacaggacacaccggtttcggcgttccttatgctaccgatccggatcactccgacgttcctcgttccgcagcgcgtccgctgagatatatggacaaatatctcacgacgacacagggtgaggttatgtatatgaccgaaatgctggcaaatctggaaggtatcgaaagaggtcctgcgggaaataccgcgctggcggctgctttctcctatgcgcaggaacttccggaagacgcgatcgtcgtagtttccgagaccgaatacaccggcgcgggtaaacacatccagccgcagcttgattttgcaagagacaacggcatcgacatcaaattcggagatccgaaggacgataagcctggtacaaacctgatcttaccggctaaccctggtctgatcaagcataaagtggctgacatcgaacacttccgtaagtctctgattaagaaggcagttaagaaagccggcgtaaagccgaccgctgccgacctggaattcctcgcggttgagacaaagacagatgttgactttgttaagaaaacgctggaagcagaaggcttactgtag

SEQ ID NO: 199 - DNA, 1077 bp, Unknown
  Unknown gut bacteria
tacgatctggggctgtttgaggtggatgaacgctccgctttgcgtgtttatccttatttgaagccggattatatgctgatcacaaatctttctcgtgattctatcatgcgaaacgcacatccggaatatatccgcgatattttgacaaagtacatcccgaaagaaaccaaattgattttgaacgcggacgatttgatctgctgcggcatcgcgccggaaaatccaagggtttactttggcattgaaaaaatggataccgacgtgacggactgcgtcaatctcatcaatgatctgcagatctgtccgcagtgtcaccggagactggaatacgaatatcgccgctataaccacatcggcagagcctactgtccgcattgcggtttcaaggcgccggcttatgattacgcgggctgccatgttgatcttgacaagatgcgcatcgacgtacgggatgctgccggcattggtcattacaggctgcttaacgagagcatctttaatatttataatgtggtgtccgcagtcgccttgctgcgcgaaatcggctacagccatgcgcagatcgagacgtttttcgcgaagctgaacattgtcggttcccgttacgacgcggagaccatcggcagccgcacgctttaccgcttgcttgccaaagagaagaacgcgttcgcgaccacgcgtgtctttgattacatcagcggacttgacggagataaagagatcattctgatgaacagctgtcagggggatatgaagcactggtccgagaacacctgctggctgtacgactgtgattttgaatttttgaatcgggataatatcaagaatatcatcctgtgcggaccaagacggtttgaccacaaactgcgtcttttgctggcgggcgtgccggaggagaagctttccttcgcggagaaggaaactgacgcgccggacaagctgcggctctttgcgaacgaccagatctatgtgctctacggaacggattccatcgcgctgggcaaaaaagtcgccgatcaggtcagaacgcttttgatcgcgaagaacaaggaggagggcgaagctgatgaaaattga

SEQ ID NO: 200 - DNA, 1146 bp, Unknown
  Unknown gut bacteria
atggcaatcattatttatgtcatcctgctgatccgttcagactgggtggcgcttccggtctgttttttgatgtgctttccggtggtctacacgaaccttttgggcggtttggacgcggtttctgcggagctgttggaggtcgcggagatttacgagctgaacggcaggcagcgcctgcagcttgtgtatctgccgtcactgctgatgccgctgcaaacttcgctaaagctgatcgcgggactttcgtggaaggctgtcgtggcagcagaggtattggcaatccctgcctattccttaggctatcagatgctgcaggctaaatattatctggagacgccgcgcctctttgcctatatcgcggtcatcgcgtcgctcagtatcgggtttgaaaagctgatctgccggctggtcgagccactcacatggaaagcttatgagggcagcaagctgaagaaatggctgcatgctaagaatgctgcgcaaaagcaaggaccggaaaacggaagagaagtaggtgcggcatcgagtgacgcaggacgaatgcctaccggaaaagttcgacagccgcaatcgtgtagtatgagaaaggacttaggtttcggagatagtagaaagggcaatatcggtggtggaaacttcgtggcgcccgcggtcgcggtacgacatgtcagcaaatcctttgacggtcagcgcgttttgcaagatttgagtctgcgcctggaagcgggacagatcaccgcactgatgggaccgtccggcatcggaaagacaacgctggcacgtatgctcgcggggctgacgctgccggacagcggtcagatcaccgtcgacggcacatatcggctttcttttctctttcaagaagaccgtctgctgccgtggctcaatgtttatgataatatcgcgcttgcatttttgaacgcgcgtcgaagattcatatgtgacagtgcagaaggagtttcccgttttggaggtagcgacgcatctgatttgcgaagaaacgcgcactcagccgactcgttcaccttgcagaaacacgcgcggctgaccactctgcccgcctcgcggcagctgagtggaacagaaattgacaggcgaatccgcaatctggcagaagcgctggagttgacggaggccctgtacaag

SEQ ID NO: 201 - DNA, 1038 bp, Unknown
  Unknown gut bacteria
atggcggttggattgttttggaatgatcgggtgtcgtttgagaagcatgagtgggcaaaacgcttcttttttctgggaaacaatacgggaaatctcgtgtttatccgggcgctgaaggacatctttcaccccgtgatgattccgctgtgggatgttacgtcggacacgttccgcgaccgggcggacatcacccactacatcacgaccgagctgatctggctgaccccgaatcagacgtatccgcacgtttggacgatgctgaagcgaatcggcgataaaccgctggttccaatcagcgtgggcgtgcagagcatggcgcgcaatgtggacatcacgctccacccggacacggtcaagctcctgcggacgatggcggagcgcgctgtgctgggcgttcgcggcgagtacaccgcggcggtgctggagaagaacggcatcgtcaacttccgcattatcggctgccccagcctgtatcagggaatgaacgaaaagtttcgcgtggagaagaaaccgttcgacccgaaaatgcgcgcgtgctgcaacttccgcactttctacggcacgctgtccgacccggaacggcagttttttaccttctgcgcgaaccgcgacctcggctttgtggagcagaacgcattcccgctgacgctggaaaactgctgcggcgacgagtaccagttccgctatttgcaggactggctgaagcggcaaatgcacgttttcttccacattgaggattggctggcggggggcaggcagtacgactttccgcttggcagccgcttccacgggaacgtgattgccatcacgagcggcattccggcgctgacgatggtggtggccagccgcatggacgaaatgacccgcctgttccgactgccgacgctgccgatggaggatttccggctggaaaggccgctggaatactactacgacttggcggactacaccgatttcaacaaggcatacccggaaagaatgcgcgttttccgcgattttcttcagcggaacgggctggcggaggcggcgggcggatga

SEQ ID NO: 202 - DNA, 1272 bp, Unknown
  Unknown gut bacteria
gtactgatggcgggacggctgatttttcactgtgacggcaacaactttttcgcttcctgcgagtgcatagagcatcctgaatggcgggatgtaccgatggcggtcgctggcgacccgaaagaccgctgcggcatcgtcgtggcgaagaacgagctggcaaagaaagcgggtgtcaagacgacggacaccatctggcaagcgcggcagaaatgtccaaacatcctcttcgttccgccgcatcacgacgagtacgcgcgcgtgtcacggcgtatgaatgccattttccgcgaatatacggatttcgtggagcctgcttcgattgacgaatcgtatctggacatgacaggcgcgccgggattctacggcctttccccacgcgaactggcggatttgctccggcggcgcgtgcgggaggaaatcggcatcacgatttccgtgggcgtgtcgttctgcaaagtgtttgcgaaaatgggcagcgactaccgcaagccggatgcgacgacgctgattttccgcgagaactatcaagaaatgctctacccgctgcccgtcgcgacgatgctctatgccggtcgcgcgtccgtgcagacgatggcacgccacggcatccgcaccatcggcgaactggcggcgcgttcccgcgcagacttaaggaggatgcttggcaagtctggcgagcagctttggctgtacgcgaacggcttggatgacagcccggttcggcgctatgaggacaagccagaagtgaagtccgtcagccgcggcatgacctttcggcgcgatttggtcaacatggaggaagtgcgctgcggtgtgtccgtgctggtggatgaaatcgcggcgacactgcggcaaagcgggttgaaaggcagcgtcatcagcgtgacgctcaaagcgccgacgctgcacaccctgtcccaccaagttaccctgccgcacccgacgtatttgcagcaggaaatccgcacggtgacgatgcagctgattacagaccactggtcggtttcggcgaagtcgcctgttcggtcgatcactgtcggcgtatcgcacctgtccggtgaaaacgaggcatatacggaacagctgagcttgtttgatttgtgtacttcggtcggtaatgcagaaaaagaaccgacggtcggtctggaaaaacaggaaaaagtggaggcggcagtggcaaaactgcggcagcgccttggcaacgatgcggtgtcccttggctgttacgataacgatgaaatcggcgtgcggcaatatgggaaaaaacgctga

SEQ ID NO: 203 - DNA, 945 bp, Unknown
  Unknown gut bacteria
aaagcctgtgaaagcggcgaaggctgtgaagggaggcaaagcggcatgagtcaggcaacgatgaaagtgcagcccaagacaaaagaccagcagaccggcgctcatgcggtgctgaccgcgcggcgcattgtggcgtatgcggtgctgattctgctctgcgcgctgtgcctgttcttcttctacgtcctcatcatcaacgcaacccgcccgcacgcggatatccagaagggcttctcgttcctgccgggttcgtggacgtcgctgtgcaataacttcacgcaggtgataaacaacgcgaacatcccgattatctccggtatgcgcaattcgctcatcgtttccgccatgacggcgatttttgcgtgctacttctccgcgctgacggcgttcggcattcacgcgtaccgcttcaaggggcgcgcgctcgcccttaccttcatcctgctgattatgacgatgccgacgcaggtttccgcgctgggctttgtgcagctgatgggcaagatgaacttgaaggattcgctcctgccgctgttcctgccgtctatcgccagccccgcggtgttctacttcatgtaccagtacatgcaggcgagcctgccactggaggtcatcgaagccgcccgcatcgacggcagcagcgagttcggcacgttcaaccgcatcgttctgccgatgattaagcccgctttggcggttcaggcgattttcaccttcgtcggcgcgtggaacaactacttcacccccgccctgattctgaactccgcgaacaaaaagacgctgccgattttgattgctcagctccgcagcgccgacttcctgaagttcgacatggggcaggtctatatgatgattgccctctcgattctccctgtcatcatcgtctacctcttcctcagcaagttcatcattgctggcgttgcggtcggcggcgggaaggagtaa

SEQ ID NO: 204 - DNA, 759 bp, Unknown
  Unknown gut bacteria
atgctgacggtacagcgggtttacgagctgattgacgcacttgcgccgtttgacacacaggcggatttcgacaattccggcttgctggtaggcaatccacaggcggaagtaacgggcatccaccttgcgctggatgtgaccgaccgcgtgattgacgatgcgctggcagcgggcgcgaacctgattgtgacgcatcatcccctgatgttttccgcccggaagcgcctgactgaggcggattacgaggggcatctgctgattcggctgattgcaaacggcttatcgctgattgccgcgcacacgaacctcgaccaagcgtccggcggcatgaacgacacgctggcgggactgctggggctggagagcatcgtcggcgagggcttcctgcgcgtgggagatttatccacaccgatgactgcggaagcgttcgcagattttgccgcgcggcagttaggcgacacagtgcgcgtgatggggcatcgggaggcgctcatccagcgcgtcggcctctgctccggcggcgggtgcgacgagtgggcggatgcgcacgccatgggcgcggatgctttcctcacgggcgaggtgaagcaccacattgcgctggatgcatcctaccacggcgtggtgctgttggaggctggacactttgccacggaaaatcccggtatttttgcgctcatgaaggctttacaaaacgcgccggatatagtacaatggaaaatgcacatttcgcgctccgaacgcagcgcgtatgagtga

SEQ ID NO: 205 - DNA, 1077 bp, Unknown
  Unknown gut bacteria
atgacattccgctggtatggccgcgagtccgacccgattccgctgaagtatgtgaagcagattcccggcatgtccggcctgatgggtctgctggataagcccgccggtgtcgactggcctgaagaggaggtcaaggcgctggtggaggaagtccacgccgctggactggagctggaagtggtcgagtctgtcaatgtccacgaggacatcaagatgggtctgcccacgcgcgacgaatatattgccaactacatctcgaccatccgcacgctggcgaagtacggcgtgaaggtcatcatctacaacttcatgcccgtctttgactggctgcgcactgacttggcgcgtgtcatcccggaggacggctcgaactccctgtacttcgacgagaaggatttgggcgaaatgggcccgatggaaatcgtccgccgcaccgccgccgattcgcagggctttacgttgcccggctgggagccggagcgtctggcgctgctggaaacgaccctgcgccagtacgaaaagctcacgcccgatgacctgcgcgcgaactacaagtacttcctcgatgctgtgattcctgtctgcgaggaagttggcatccgcatggcgtgccatcccgatgacccggcatggccgattttcgggctgccgcgcattgcgcatagtcaggaggatttcgataagattatcaagctccatgacagccccgcgaacaccgtctgcctctgcaccggctctctgggctgctcgccggacaacgacattccgtccatcatccgccactttggcgagatgaaccgcatcggcgcgatgcacgtccgcaacatcaagttcctgggctaccatcacttccgcgaagccgcgcacctgtccgaagcgggcgacctgaacatgttcgacatcatggaagccatctacgacacctgcccggacacttacatccgccccgaccacggccgcatgatctgggacgaaaagggccgccctggctacggtctgtatgaccgcgcgctgggcgcgacgtacctgaacggcctgtgggaagccatctgccgcatgaagggcgaaaagaagtga

SEQ ID NO: 206 - DNA, 852 bp, Unknown
  Unknown gut bacteria
ttgcgccataaggagggcttgcacaaatacatgggtacagcttggattattgcttccggcaaaggcggagtgggcaaaagcaccctctccgcctgcctcggcatggaaattgcgcgcaatggtcagcgcgtctgcattgtggatgcggatatcggcctgcgcgatcaggacgtgctgctgggcgtgcaggattgcattgtatatgatattctggatgttgcgaacggcatttgcccggtggatgatgcgcttgtcgtgccgaagccggacgcgctgccgaatctgtctctcctgcccgccagccagttcgcccgcgcgaaggagctggaagccaaggcgttccgcaaaattctgcggacgctcaaaagcaatttcgaccatgtgctcattgatgcgccggcgggcattgagcgcagcctgcgcggtctgctgagcaatgaaatcaacgagtgcgtgctggtctgcacgccggacgatgtatgcatccgcaacgcggagcgaacagcgagcgtcctgcgcaaaaaggggctgacggcgcagcgcgtgattgtcaaccgcctgaatcccgactacatccgccggggtgaaatgtacgccgcacagactgtcgcgctgacgctggacatgccgctgctgggcgaaatcccggaggatgcggaaatttaccgcgcgctgctgcatcatcagagcgtgatggagggcgaaagcgaggggcgcaatgccattgcccgcatcgccctgcgcatgacgacggacgaggacgtgccgctgccggaatacgggcaaaagcggacactcttccagcgcctgttccagcgccgcagaaaaggagatgagaagcatgttcgctaa

SEQ ID NO: 207 - DNA, 543 bp, Unknown
  Unknown gut bacteria
atcaccatgaaaatgaaaggagggcaaagcatggagcagcaatcccccaatgaacgccgcttggaagactggatgcgcacctacggcaccgccatcctgcgcacatgcttcgtcatcctttccgacgcgcgtgaagccgaggatgccatgcaggacaccttcctccgcgcctggcgcgccatggacaccttcgagcagcgcaacggcgcgagcgtcaaaacgtggctgatgcgcattgccatcaatgtctgccgcgattatcagcggaaacggtggtttcggcacatcgacatgcggcacgcgctggaagacttgccgcagggcatgatgaccgtgctgccagaggatcgggaattgatgctggacatcctgcgcttgcccgacgacctcaaaaagccgctgattctctactattatcaggacatgaaccttcaggaaaccgccgatgcgctgggcatcagcaagtcgacggtgcatacgcggctcaaaaaagcggaacaggcgctcaaactttcgctgacaggaggtgactgctatgtctga

SEQ ID NO: 208 - DNA, 909 bp, Unknown
  Unknown gut bacteria
gagtacgcaaacaacaaaggagcagaaatcaccatgaacaagcaatggaattggaaaacggttcttcagcacgagcaagccatcgtgtggacgcagattgtgctgggctgcatcatcggcggcgcggcgtatccgctgtttctcacgccctgcaacatcgcgcccggcggcttgaccggcgtcggcatgattttgaactacctcttccagttccccatcggcacaactgcgctggtgctgaatattccgctgtttatcatgggctatcgcagcatggggcatgtgttcgttatccgctcgctggtggcgacggtgctgttttccctggcaattgatattctgcggctgcagccgctgacgagcgacccgatgcttggcgcgattttcggcggtgcgctgatgggcgtcggcttgggactgattctccgtggcggcgcgacgaccggcggcacggatatgctggcgaaaatggtgcatcaaaagctgcctttcatttcgaccggtatgtttctgatgataatcgactgcgttgtggtgatttttgccgccgtctgcatcggcacgaccgaagcgctgtttgcgctggtatgtattttcatcaacggcaaagtgattgacatggtgatgctgggcttgtcgaggaacaaagcgtgctttgtgatgagtgacaagtgggcggagatttcgcatcaggtgctgcacgacatggacagaggggctacgcagctgtcggcgcgtggggcgtattcgggcaaggaacgccccgtgctgctgtgtgtcctgccgccgcaggaggttgcgcggtttaaggagattgtgcggaaagaggatgaccgggcgtttatgttcatcaccgaagcgcatgaggcgctgggggagggctttgataggctggcggaaaaagactga

SEQ ID NO: 209 - DNA, 537 bp, Unknown
  Unknown gut bacteria
caaatggatcgttttctggaggaatctgtaagcaaacaccaccgcgcggcggaagaggtactgtactacgcgtcgtgggtcgtgatgattgtgtccgcgattctggcgttcatgtacctgaacgtcatgttttacagcttcagcatctcgatgctggtgatgacgctggtgttcacgggtatcgcggtgtacattttcttcttccatgaccgcctgcgcacggagtacgactacacgttcaccaacggctccatggatttcgcacaggtgttcaacaaccgcaagcgcaaggcgctgggcagcctgaacgtggcaaaggtggatgcgttcggcaaggttgccagcggcagtttccatcggcatgtgtccgcgccgggcgtgaagcagctgcgctggttcctcaatcgcgacgcggaactgtactatttcgccttctccaaggacggcaagaagtccctaattgtgtttgagccgagcaaagccatggtggataacatccgccactatctgccctttggcgcgtatcaggagaattga

SEQ ID NO: 210 - DNA, 369 bp, Unknown
  Unknown gut bacteria
atgaattttacaaactacgaagaaatggctgccatgattctcttcggcatcggcttcacaacgctgctgctgcacaagaacatgattaagaaaattatcggtttctcgatgatggacagcgccatttacctctttctggctgtcaagggctacattgcagggcggaaagcgccgattgtggtggacggcattacgtccatggaagcctacatcaaccccattccggcaggtctggtgctgacgggcatcgtcgtctccgtgtcggtgacggcgctgatgctcgcgctgaccgtccggctctatcggcagtatcacacgctggatattgacgagattaccgcactctgccggaaggaggaggaaacctga

SEQ ID NO: 211 - DNA, 348 bp, Unknown
  Unknown gut bacteria
atggatgcagaaatgctgcggaatgtgctgacgatgctgggcacggtgctgggcgcgattttggtgctgatgctggtggcgaaaatcacgagcatggtgcatgtggaggcggacgatgcgcgcgcgccgattgacagcatggaagcgagcgtcgtcggcaagcgcacgctggtgacgcaggaggacggcgcaccgaaaaccatctactatatgaccttccagaaggtgaacggaatgcggatggagctggaagtgccgggcgaggactacggcttggcggcggaaggcgatcagggcgtgctggtcgcgcgcggggaagaatttatcgtctttaagcgaatgatttga

SEQ ID NO: 212 - DNA, 843 bp, Unknown
  Unknown gut bacteria
atgaatgtatgcatcgacgttcaggacgtttccttcacctatgaggatgcccctgaacccgctctccaccatgtctccctgcaagtccacgaaggcgaatttctcgctgtcctcggccataacggctccggcaaatccaccctcgcaaagctcctcaatgccctctatctgcccacagaaggacatatcaccgtcttcggcatggatacccaaagcgacgatgagctctgggaaatccgccagaaggcagggatgattttccagaatcctgataaccagcttgtcgcgaccgtcgtccgggaggatgtcgcattcgggctggagaaccttggcgttccccgcgaagagatgattccgcgcatcgacgcggcgcttcaagcggttggcatgagccagttcgccgaagccgcgccgcatatgctctccggcggacagaagcagcgcatcgccatcgcgggcattctcgctatgcagccgtccgtcattatcgcggatgaatccaccgccatgctcgacccgtccgggcggcgggaggtgctgtccaccatccgccgtctcaaccgcgaaaaaggcatcaccgtcgtgtggattacccacttcatggaagaagcggcgcaggcagaccgcatcatcgtgatgaatcagggcgaggtggcgctgtccggcacgccgcgcgaggtgttcccgcaggtggataccctgcgcgaattgcaccttgacgtgccgcacatgaccgcattggcggattcgctccgccgagacgggatgcccctgccggggaacatcctgaccgttgacgaaatgaccaaggaggtgctgacgctgctatgtccctcgaagtaa

SEQ ID NO: 213 - DNA, 468 bp, Unknown
  Unknown gut bacteria
atgctgccgaaagtttccaagggattccgcgccatttttgtcgcggtgatgtgtgtggtgtgcgtggcgctgtgtgtgctggcggttcggctggcgcagcagggcgagcagcttcggctgacgcaattgcagctggatgcaagtctggcgcggttgaagctccagcagacgcagcgcgcgcaaatcgacgttgacctgccggaaacgctggcgcaattgcaggcggtgcagcccgaagcggatgcagcgtccgcgcgcgagcaggaactccgcgcccggcgcaagacgctccgcagcgagaatgcggaattagcagcgcaggcggaaacgctcacgcagcagctcgctctccttcggaccccggacagtgagctgatcggagaggtggagacgctgcaaaagacgctttcatcccttcaggcgcaggtggacgccgcacggcagctccttgggcaggcagaggagtga

SEQ ID NO: 214 - DNA, 891 bp, Unknown
  Unknown gut bacteria
atggcgaaaaagcaaaagctgtgctataattcaatcgaaaatctttttcggaagaaggggttcacgatggtgtttctcatcattctgattgtgctgattctgctgtacgtctttctgctgattccgcgcctcccccgccgcgacatgtccgcgctgacgaaggtggattatgcccatcgcgggctatggaatgcgcagcggccggagaacagcctgtccgcatttcgatcggcggtcgatgcggggtacggcattgagctggacgttcaccgcacgaaagacggcgtgctggtggtgcatcacgacgacaatttgaagcgcgtgtgcggcgttgaccgtcggattgcgcagagcacgctggcggaggtgcgcgcgtgccacttaagcggcacggacgaggtcgtcccgacgtttgacgaggtgctggaggcagtcggcgggcgtgtgccgctgattgtggagctgaaggtggagcagaatgtggacagcctgtgcagcgccgtccgggagcggatgcagcgttacaacgggctttggtgcatggagagcttcgatccgcgcgcggtgcagtggttccggaaaaacgcgccggaaatcatccgcggacagcttgcgttcgggctgggcggcgaagcggcgcacaagggcgtgaagccgctgacggcgttctttatttccacgctgatgcagcacgttttgagccgcccggattttctggcgtacgaagccatcagcgaacacgggctgaatctgccaatgcgccttgtgcgcctgatgcgcccgtggatggtcgcgtggacgatccgctcgcaggaagcgctcgaccacacgcgcggcaaatacgacatcgcgattttcgagggctttgtgccgccggcaaaacgcagttaa

SEQ ID NO: 215 - DNA, 360 bp, Unknown
  Unknown gut bacteria
atgaaaggaactgttatgccttacatagaaacgacctccaacgtgtccattcccggacgaaaagagcaggtcatcaaggatcgcatgggcgatgccattgagaaaattcctggcaagacggaaagctggctgatgctgtccttccgcgacaatgccgcaatgtacttcaagggcacggacgccccctgcgccatctgccaagtgaagctcttcggcggctctgcgacggaggaggattacgccgcgctgaccgaggcgctgacggacatcctgcgcgaagaactggacattgacagcgaccgcatctatgtgacgtatgaagaaatcggcttctggggctggaacggcggcaatctgtaa

SEQ ID NO: 216 - DNA, 369 bp, Unknown
  Unknown gut bacteria
atcctccgccatgccattccgccccttccggctcgtcagaaaatccccaatgtctatcataccacgttcggcacgaaatggcaagattgtttttccgcttccgcatacactcttcttacaaaggaggagatttgtatgtggattttgcttcccgctttcgttttgacgctgctgctctgccgctgctatcgccccggcacttggggcgcgctgctgcttaactgctggacgtttggcactgtgctgttgatggcgtggaatctgctgcccttgccgcacgtcggcatcaatccgatttcatcgttgttgacaggcgcgctgggcatttcagggctgcccctgacggtgtttctgaatatgatgccgtaa

SEQ ID NO: 217 - DNA, 732 bp, Unknown
  Unknown gut bacteria
atggtctggtcgattgtcgcgctggaagccgtcagctttacggcgctgctgacgctcggcgcaatctgggcgggcgctgacatggtgatgattgtgtcgctggtgaaatacggaggaatccatatggcgtttttcgagaacacccgcaagccgacaggcttcggcggccgcctcatggtcgccatgatgaacatcgggcatcgggcgcttgcggactgggggcttcgcttcctgccgctggcggagaatgcggatgtgctggactgtgggtgcggcggcggcgcgaatctgcgtctgatgctgaaaaagtgcccgacgggaaaagtgtgcggtatcgactattctcccgtcagcgtagagaagtcgcgaaagctcaaccaaaccgccataagcgctggccgctgcgaagtgctgcaggcaagcgtgcaggcattgccgtttgatgacgcgcagtttgacgtggcaacagcattcgagacggtgtatttctggggcgacttgcccgcgtgcttccgtgaagttgggcgcgtgctgaagcccggcgggacgttcttcctctgcaacgagtccgatggcgatcatgcgcaggacgagaagtggacggagaagattcccggcatgacgatttacaaggacacacagctcaaagccatgctggaacaggtgggtttccgccaagtggagacgcacaagaacggcaaaggctggctgtgcgtgacggcacaaaaataa

SEQ ID NO: 218 - DNA, 1023 bp, Unknown
  Unknown gut bacteria
ggcatggcgaagatcaggaataattatgaaaaaagctggtttccgcggctgctgaagtggctggacggcggttcgggtctgctcgatgatgccatggcgcacgagctggacgaaggcagtgaagagcacctgctgcccgactcgcaggacgccctcacccgcgaaacgaaattcgagcagcaccgtcaggagagtttggacaaggacgagacgctgtacgagcgctaccatcaatgggcgcacacgcgcggcaagaagctgctgacgtggctgtaccgtctgctggcggtggttgtgtgcttctccatcatctgggtgctgctgcagacggccagctacctgccgccattcggcaatcccgacaacccggtcaacaacgaagtcagccagcgctatatcgagaagggcatggaggaaaccggcgcggtcaacatcgttgcgggcatgattctggactaccgcgcatttgacaccttgggtgaatcgaacgtgctgttcattgccgcctgctcggtgctgattctgctgcgcgtatccggcagcaaggacggcaagccctccaccgaacagctggaagccgaagccgacgaccgcatgtatgagccgaagaacgacgccatcctgcagcacgcggcgaattttcttgtgccgctgattctcatgttcggcgtgtacgtcattttgaacggacatatttcccccggcggcggcttctccggcggcgcgattatgggcgcagggctgattctgtacctgaacgcgttcggcttcaagcgcacggagcgtttcttcactttcacgacgttcaagattgtgtcctgcgtcgcgctgtcgttctatgcgttgagcaaggcgtacagcttcttcaccggcgcgaaccatctgccgtccatcatcacaacgggtacgcccggcatgattttctccgcagggctgattccgtacctgaacatcgccgtcggactggtcgtctgctgcacgatgtacgccttctatacgcttttcagaaagggggacatgtaa

SEQ ID NO: 219 - DNA, 696 bp, Unknown
  Unknown gut bacteria
atgcgctacaataagtttgacgtgacaaactcattcgcgaaagcaaggggaggcaagctcatgaagtatgcaggaaggccgctgggcatgtggatgctgttccaccgctcgttcacgcggcagctgacggcggtgctggggcagtcggcggaatccgccaaggcaacggagaaggcagcgaagcaggagtataggcggattatcgcgcgcgtgccggattttgagccgggcgaccgcttccagatgaacctcgtcaactgcgcgatgctctgcgcgtatgtgctgcatatgcccaagcgcccgaccgtgcagacgctgacggattactacgcgaagtccatgatgacgcccgcgatgcgctggttctgccgcaagagcgggaagaacaagttctctgacaaggacattgcggggatgaaacaggcggagaagctacgcgccgccgaccgcaacccctactcgtggaacatggactatctgccctatgcggatggcagcggctacgaggcgcggttctataagtgcggcatctgcgtgctgacgaaggagctggggctgtatgacctcacgcccgccatgtgccgactggattacacgatggcggaagcaggtgaaacgtcggactttgtgcgcgaatacacgctggcgtccggcggaccgtactgcgactgcgggtatcataagaagcagaaataa

SEQ ID NO: 220 - DNA, 768 bp, Unknown
  Unknown gut bacteria
atgattgaaaaatggacaacccccatcccgaagctgagcgggcgcgaaggacgcaccgtctatgtgtacgtccccgacgaagcgcaggagaaccccgaagcgcgctatcctgtgctgtacatgttcgacggtcacaacgttttcttcgattccgacgcgacctacgggaagtgctgggggatgaaggaatatcttgaatcgacaaacacgccgctgattgtcgtcgcggtggactgcaaccattcgccgaataacgggcggctgagcgaatattcccccttcacgtttgaagacccgaagctcggctacatccgcgggcgcgggcgcacgacgatggactggttcgcgcatacgctgaaaggcatgattgacgaaaagtacccgacgctgccggggcgcgaaacgacgtggattgcggggtcgagcatgggcgggctgatgagcctgtacgcggtgactgcgtttaacgacgtgtattcgcgcgcggcgtgcctttcgccgagcatctggtttgccacgcgcagccttgaccgcctgattcgcgacgcgcaatttgccccggacaccgtgatttatatggactacggttcgcgcgagatggcgcaccacgacaacatgcgcaagcagtacgccgccgtaacaagccgtctgctggaaaagcaggtgctgctgacgagccgcatcgtccccaacggcgaccactgcgaagcctgctgggaagagcagattcccttcttcatgcacattctgttctacaatcgcgaataa

SEQ ID NO: 221 - DNA, 690 bp, Unknown
  Unknown gut bacteria
atggaaatcattgcacgaatcgaaaacggctttcgggagaaattcggcgtgccgcggcagtcggggcttgtgccggaggtgatttcccgcgtcgtgatggcggaaaagtacagcgtccgcgaggcgttccgcggcattgaggattactcccacctgcggctgctctgggggatcgaccgcgcgcagcaggatgattggcggccgactgtgcgtccgccgcggctgggcggcaatacccgattgggcatgttcgcgacgcgctcgccgttccgcccgaaccgcatcggtttgacggttgtccgcttgattcgcatggaggaggagaacgggcgcatcacgctcgtcgtctccggcgcggatttgatggacggcacgccaattgtggacatcaagccgtacctgccgtatgtggacagtgtgccggatgccatcggcgggttcaccgagcagaccgaacgccatcgcctgacggtggattttccggagaagctcaaaaagtatgttcccaagcagaacctgcccgccgtgatgggcttgctcgcgcaagacccgcgcccggcgtatcagcatgacggaaagcgcgtgtacggcgtgccgtatggcgaggtggatattcgctttgtcgtcgagggagacatgctgacggtggtggaggtcgtgccgtacacggaaaaggaacagaaaaaatga

SEQ ID NO: 222 - DNA, 885 bp, Unknown
  Unknown gut bacteria
ttgctgtgttcgcttgcgtcccccgcgcccgtgtggtacaatagacacgaggtgaacaacttggcgaaaacactgtattgcaagaagtgcaacatggacgtgccggagggcgaagcgtgtcccgtgtgcggcaaaacgccgcccgcccgctccatgcgcgtcgcgtggctgtacgcccggccgcgcgcgctggactggatgggctggaacgccgtgatgcgcattgccgtgccggtgctggccgcggcgaccgtgctggggcttgtactggagctgctgcttggcggcggcgcgggcgttcggcaattattgaacagcggatttttgtgggtgatggggatgctgctcctctttgtcgcggcggtcacgatcctcgtcttcgcgctcggcggggcggatgagctgtactgcgtggtagacagccgcggcttccatgtgcggacggcgctgccgggggcaaatcgcgtgaagctgtggatgcacggcaaatccgccgctttgatggacacggcggacacaaacgggcgcgtcatcatcagcgaaaaagacctcgcgtggaaggacattgcccgcgtgcagctatggacggacaagcggctgatgctgctgtatttgccgcgctggtggaggaagctgtccgtgccgagtctgctggcaaagtggaacgacgtgctgacgatggtggacgagaagctgggcaagaagaaggctgtggagctgccggaggactgggcgcatcagctgccgccgcagcgcgtgcaggagaaaaaagcgcgcaaaaccgccatcgaaaccgacgtgattccgccgcagacgacgctgccggaggacgaggaggactatcgcccgctggatgaagtgctggaagaactgcgcggaaaataa

SEQ ID NO: 223 - DNA, 1443 bp, Unknown
  Unknown gut bacteria
atgcattccgggagactggaaaatgcacctttcaaaggagaagtcgctatgtaccgcaaaaatgcgtgggaaaacctcgcggaggacgaaaaggaacagctttccgccttcgcaaaggattatatggaattcctgaacaacggcaagaccgagcgtgagtgcgtcgcggagggcgtgcgtcaggcggaagcaaagggcttcaagaacctgatggacgtcgtcaagaacggtgaaacgctcaaggcgggcgaccgcgtttatcgtgcgtggatgaacaaggatatcatgctctttatcattggtgagaagccgatggagtgcggcatgaacattctgggcgcgcacatcgactcgccccgcattgacatcaagcagaatccgctgtatgaggatgagcaccttgcgtacctcgacacgcactactacggcggcatcaagaagtaccagtgggtggcgctgccgctggcgctccacggcgttgttgtcaagaaggacggcacgaccgtcacgctgaatatcggtgataagcccggcgaccccgtcttctacatctctgacctgctgattcaccttgccgctgatcagatgggcaagaccgccgcaaaggtgattgaaggcgacagcctgaacatcatcatcggcagcgaaccgaagaaggataccgacaaagacccggtcaagaccgcgattttggacattttgaaggagcagtacagcatcgacgaagaagacttcatttccgccgaactggaagctgttcctgcgggccatgcgcgtgacttgggcttcgaccgcagcatgattatgggttatggccacgacgaccgcgtgtgcgcgtatccgtcgatggcggctgtgctgaattatgaaggcacgccggaatacaccctcgcggcggtgctgaccgacaaggaagaaatcggaagcgtcggtgcaacgggcatgggcgctatgtactttgagaacacgatggcagaactgattgcctgcgtgacgggcgaggacaagccgctgaccctgcgccgctgcctgcagaacagccgtatgctctccagcgacgtgagcgcgggctttgacccgaactttgcgggcgtgttcgagaagcgcaacgcgtccatcgtcggcaatggcgtgacgttcaacaagttcaccggcagccggggcaagtctggctcgaatgacgccaacgcggagtttgtcgcgcaggtgcgccgcatctgcgacgaagcgaacgtgtgctggcagacggcggagctgggcaaggtggatgtcggcggcggcggaacgattgcctacatctgcgccaagtacggcatgaacgtcatcgactgcggcatcccggtgctgagtatgcacgcgccgtgggaggtcatcagcaaggttgacctgtgggaagaatacaagtgctactgcgcgttcctgaagggcgcacgggagttctaa

SEQ ID NO: 224 - DNA, 945 bp, Unknown
  Unknown gut bacteria
atgatttatgttggtattgacgttggcggcacaggcattcaggtcggtctggtggacgaaagcggcaagattctgtgcaagggcggcatcgtcacccgcacggatatccccttcgacatgcaggtgaaagcgatggcggactgcgtgctagacaccatcgacaagggcggctacacgctgggtgacgtgaaggccatcggcgcgggcgttcccggcgtaaccgacccccgcacgggcaatattgcgttctgcaccaacctcggctgggtggacgtgccgtttgtgcaggagttcaacaagcacattgccaagcccgttttcgtcggcaatgacgcgacggtcgcagggctggcagagagcgtcgctggcgtgagcgcgggctcggacagcagcgtgttcatcaccctcggcacaggcgttggcggcggcatcgtttttaatggcaaggtctggaacggtttccacggcgtcggcagcgaaatcggtcacatgattctcgaacttgacggcgagccgtgtacctgcggcaactacggctgcgtcgaacgctactgctccgcgaccgccattatccgcatggcgcgcgagctctgcgcggtgcacccggaaagcgaaattgtgaaggtgtgcgagggcgacctgaaccgcgtgaacgcgaaggttgttttcgacgcggcgaagaacggcgacgaaatcgcgctcaaggtcttccaccgctatgtgaagtatctgggtcagctggttgccagcctggttaactgcatcgacccggaggttatcgtgctgggcggcggcgtgagcaaggcaggcgacttcctgctggatgctgttcgtgcggaaacgcgtcgctatgtgctgtacaagacgctcccatcggcgcgcattgagctggcgaagctcggcccggatgcgggtatcatcggcgcggcgatgctgggcaagtaa

SEQ ID NO: 225 - DNA, 450 bp, Unknown
  Unknown gut bacteria
atgaaaaccgttcgacaagtggcaatcctcgatatcatcgaaaaacaggaaattgaaacgcaggaggaactcgccagcgccctgaatgcgcggggcatccgcgtgacgcaggcgaccgtatcccgcgacattaaggaattgcggctgctgaaagtgctgaccccctccggcaagtacaaatacgcaacgggcgatcaggcggacaacaatctgaccgaccgtttcattcggatgctggcggaatcgctgctgtctgtctcgtcggcgaacaacctgattgtggtgaaaaccttgtcgggttcggcgaacgtcgcggcggaagcgctggacagtatgcactggccagaggtgctggggacgctggcaggcgacaacacggtgctgctgattatccgctcgaacgaggagacgatcaccgtcaccagccgcatccgggaaatgatgaaataa

SEQ ID NO: 226 - DNA, 477 bp, Unknown
  Unknown gut bacteria
atgcgactaagtgactctatcgagacttttatcaagacgcttctggcggaagatgagccggaggtggaactgaagcgaaacgaactggcggaatatttcgggtgcgcgccgagtcaaatcaattatgtgctggcgacgcgcttttcccccgaccacggatacctgattgaatcccggcgcggcggcggcggctacatccgcatcgtccgcattgtgcagagcggcgcgcagcagctgatgtacctcatcaacgagcgcatcggcgacgccatcggggaggaggaagcgtcgcgccttgtgcagcagctgacggagcagaagctcgtcacggcgcaggaagccgctctcatgcgcgccgccattagcgcacaggcgctcgccatcccgattcccgacagtatgaaggacgcacagcgcgcccgcatcttcaaggcgatgctgaccagcattgcacggcagaatcggacgatgccatag

SEQ ID NO: 227 - DNA, 462 bp, Unknown
  Unknown gut bacteria
atgcctgtctttttcgggcatatgaaggaggaaatgcctttgaccctgcgcgaagaagcgccgatgactaaggatgatgcacgccgcctgaatccactccagctggcgtatatcggggatacggtctatgatttgctgacccggtcgcgcctgctgtaccgggggtataatctgcatcactgccatcaggcggcggtcacggtcgtcaatgcacacgcacaggcggaggctttgacacgcatcgagggagcgctgaccgaggaagaaaacgccattgtccgccgcgggcgcaatactcacgcgcaccacgctgccccccgaaatcagaccgccatggactatcaggcagcaacggcgctggaagccctcgtcgggtatttgtacctgactgggcaggaggcacggttgcttgaactgttccgaaaaagtcaggaggttgcatcatgccccgctcaaccatga

SEQ ID NO: 228 - DNA, 1200 bp, Unknown
  Unknown gut bacteria
atggaaaagattcagatgaaaacgccgctggtggagatggatggcgacgaaatgacccgcatcctgtgggcagacatcaagcagctgctgattgagccgttcgtggacttgaagacggagtattacgatctcggtctgccgcaccgcgacgaaacgcgtgatcaggtgacgattgacagcgccaacgcgacgaagaagtacggcgtcgcggtcaagtgcgcgaccatcactccgaatgcccagcgcgtgacggagtacaacctgcacgagatgtggaagtcgcccaacggcacgattcgcgccatgctcgacggcacggtcttccgcgcgccgattcttgtcagcggcgttcgcccaacagtccgcacttggcagcagccgattaccatcgcccgtcatgcctatggcgacgtctaccgcaattcggaaattcgcatccccggcgcgggcaaggcggagttggtgttcacgggtgcggatgggcaggagattcgccagacgattttcgatttcaaggggccgggtgtcgtgcagggcattcataatctggatgcgtcgattacgtcctttgcccatgcctgcttccagtacgcgctgtcggtcaagcaggacttgtggttctccacgaaggataccatcagcaagacctacgatcaccgcttcaaggacattttccaagaaattttcgatgcgcagtataaggaaaagtttgagcaggcgggtatcacctatttctatacgctgattgatgatgccgtggcgcgcgtcgtgcgcagcaagggcgggtttatctgggcgtgcaagaattacgatggcgacgtgatgtccgacatggtggcgacggcgttcggctccctggcgatgatgacctccgtgctcgtttcgccggacggaaagtttgagtacgaagccgcgcacggtacagtcacgcgccactactacaagtatctgaagggcgaggagacgtcgaccaaccccgtcgcgacgattttcgcgtggtctggcgcactccgcaagcgcggcgaactggatcatctgccggacttgatggcgtttgccgacaagctggaaaaggcgaccatcgacaccatcgaaagcggcgtaatgaccaaagaccttgcgctgctgtgggaggggacgcctgcgcaggcggtcaacagccgcacgttcctcgaagccatcgcgtcgcgcatggcgtaa

SEQ ID NO: 229 - DNA, 537 bp, Unknown
  Unknown gut bacteria
ctgtgcggggagcgtggattgaattatcatttatccgagattcacgaaaactggagggatttacgaatgccaaaggtctggacggacgataccgcgctcatggagggaatgacagacaatctcttcgaggcgctctacaaaatgccgaagtatttcctgcgcattgatgacattgcgcattcgctggagatgccgatttccagcctgctggtgctctgcgtgctgcgcgaggggaaaatcagcattggggaaatcagtgaacggctgtgcatcgccaagccgaacgtgacgccgctggtggaaacactctgcgcgcgggggctgatttcacgccagcgcagcgacaaagaccggcgcaaggtgcttgtcgggctgatgccggaaggcgaggcaatggtagagcgcattcgtggcgcaatacgcgaccaaatgatgagctggccgcgcgactataacctgagcgagatgaagcgcgtcaacaacgcactggcggcaacgctggaagtggcggatgacgtgatgcgccgccgccgctga

SEQ ID NO: 230 - DNA, 909 bp, Unknown
  Unknown gut bacteria
atgcaacccatccgccaaggaggttcccgtatgcaatgtaccctctgcccgcgcgcctgccgcgctgagcgcaatgaatccacgggcaacggcttctgccagctgccgaccaccatgcgcatcgcccgaatcgcgccgcacctctgggaagaaccgccgatttccggcaagaacggcacgggcgcggtgttcttctccggctgtacgctccgctgcgcctactgccagaacgccgacatcagccaccgcaacgccggacgccccttcacgccgcgcgaattggcggattccctgcgacggctggaggatatggggatgcacaccatctccttcatcaccgcgacgccttatgtcccgcagatattggagacgctggatatttaccggccgcatgtgccgctggtgtggaatacgtcggggtatgagacggtcgaaacattgcggatgctggacggcgtgatggacgtgtacctgcccgacctcaagcaccggagcgaaaagatggggcagctctgcgcgaaagcgtcgaactactttgccgccacatccgccgccatcaccgagatggtgcgccagacaggaacgcctgtctacgatgagaacggcatcatgacgcgcggcacgctcatccgtcacctgattctccccggtctgacgagcgaaagctgtcagctgctggattgggtgaaggagaacctgccggagggtgtgccggtcagcctgatgcggcagtacatcccgtgcaacaacgtgtcgattccgggattgacgcggacgattacgaaccgcgaatatatccgcgtgcgcgaccatatgctggatttgggactgccggggtatttgcaggagccggaaagcgcatcggaggattttgtgcccgttttctgcaaggacgagagctttgtgtga

SEQ ID NO: 231 - DNA, 690 bp, Unknown
  Unknown gut bacteria
cagagcctctggcgcctccttcagaaaggaattgttatgaagaaacagaagcagtcgtttgtggtgctgggcttggggcgcttcgggtcgagcgtggcgaggagcttgtgcgaattgggacatgaggtgctcgcggttgatcgagacgagaagctggtagaggccatcgcgcccgacgtgacgcaggcggttcaggcgaatgccgtggatgaggatgcgcttgcggaactcggcgtgcagaacttcgatgccgccatcgtcgccattggcacggatatccgcgccagcattctcgcaacggttttgctcaaggaagctggcgtccccaaagtcctcgcgaaggccgtcgatgacctccatgcccgcgtcctctataaggtcggcgctgaccgcgttatcttcccggagcgcgatatggggcagcgcgtcgcccgttcgctcgtcgcccccaatatcctcgacctgatggcgctttccgacgacgaccagattgccgaactcaccctcccgacggactgggcggacaaaaccatcgtcgaactcaacatccgccggaattttggggtaagcgtgctgggcatccaccgcggcggcaaatttctcacttcacccggcgcagaaacaatgctgatggcgggcgatgtgctgctggtgatgggcaaaaaggaagcgatttccgctgtgcaataa

SEQ ID NO: 232 - DNA, 486 bp, Unknown
  Unknown gut bacteria
gtgtacaatatgcctgaaatccatcaggaaaggatgaggaatatgtctcgaatcgaaaccgtacgcgccgcgatgatgcaggcaatgaaggatcacgacaaggagcgcaaggaagcgctgtcgctgctgctgtccgcgctgaaaaacaaggcgattgacaagcgcgccgacctcacggaggacgaagagaacgccgtcgtcctgcgcgaaatcaagcagtgtcaggaatccattgagcaggcgaacggccgtgaggatattatcgcggaaaacacgctgcgcatgaaggtttatcaggagttcgcgccgaagatgatgtccgaggatgaggtggaggcggaagtgaccgctgtgttggcggaactggggctggatgcgccgacctcgaagcagaaggggcttatcatgaagacgctcatgccgcgcgtgaagggcaaggcagacggcgcgctggtgcagaatgtgcttgcgcggcatctggcgtaa

SEQ ID NO: 233 - DNA, 1341 bp, Unknown
  Unknown gut bacteria
atggaggaaggacggaatcacatgaccaatcagaaactttccccggcgaagttcactctgctgggtttccagcacatgttcgccatgttcggcgcaactgtacttgtgccgaccttgacaggtctgtctgtcagcgcaaccctgctctttgcgggtctgggcacgctgttgttccacctcatcacgggcggcaaagtccctgcgttcctcggttcgagcttcgcgttcctcggcggctatgcggcggtgaaggcaatgccgcagttcgtggacggcacgatgaactggattccctacgccggcgtgggcgtggcggtcgcgggtctgatttccgtcgttgtcgcggttctgttcaagatcttcggcgcgcagaaggtcatgcgcttcttcccgccgattgtcaccggccccatcatcatctgcatcggcatgattctggcgaactccgccatcaacaactgctccaataactggctcatcgcgattctggcggtggtcatcgtggtggcgttcaacatctggggcaagggcatgttcaagattatcccgattctgctgggcgtggtcggttcttacgccgtcgcggcggtgacgggtcaggtggacttcacccctgtcaaggaagcagcttggctgggtctgcccttccagtggaaggataccgcgttctccctctttggcggctgtgacggcacgctgctgctgaactgcatcatcactgttgccccgattgcgctggcgacgatgatggagcacattggcgatatgtccgctatctcctcgacagtcggcaagaatttcatcgcagatccgggtctgcaccgttctctgctgggcgacggtctggcgacgacgatggcggcgctcttcggcgctccggcgaacaccacttacggcgagaacaccggtgtgctggcgctgacccgcgtctacaacccggcggttgtccgcatggcagcagtgctggcagtcgtattctccttctgcccgaagttcgcggagctgattcactgcatgcccgcggcgaccatcggcggcgtgtcgctgattctctacggcatgatttccgcggtcggcgtgcgcaatgtggttgaaaatcaggtggacttcgcgaagagccgcaatgtcatcatcgcggcggtgattatgtcccttgcgctgggcatcaacttctccaacgcgggcgcgattgtgttcaccgttggtcaggtgaccatcagcctgtctggtctggcggtggcgtgtctggtccggatcctgctgaacgcggtgctgccgggcaacgactatgtcttcggcaagagcgaacagggcgatcaggcggtcaacttcaaggtgtaa

SEQ ID NO: 234 - DNA, 1086 bp, Unknown
  Unknown gut bacteria
atggagaagtatcgtgtaggcattgttggcgcaacgggcatggtcggtcagcgctttatttcgctgctgaaggatcatccgtggtttgaggtgaactgtgtggcggcgtcggcgcgcagtgccggaaagacgtaccgcgaggcggtcggggagcgctgggcgttcgcgtgggagattccggaaaaggtggcgggcatgaccgtcgtcgatgcggcggatattgacgaagtgagcaagcatgtggacttcgttttctgcgccgtggacatgaagaaggacgaaatccgcgcgctggaggaagcctacgcgaagcacgaaatcccggtggtgagcaacaacagcgcctgccgcggcatcgaggacgtgccgatggtcgtgccggaaatcaacgccgatcaccttgccgtcattgaagcgcagaaaaagcgccttggcacgaagaccggcttcatcgccgtcaagccgaactgctccatccaggcctatactccggctttggccgcgtggaaggaattcgagccgcacgaggtcatcgtgagcacgtaccaggccatttccggcgcgggcaagacgttcaagacgtggcccgaaatggtggataacgtgattccctacatcggcggcgaggacgagaagagcgaaaacgagccgctgaagctgtggggtcatgtggaggatggcaagattgtcaacgccgcgctgcccgtcatctccgcacagtgcctgcgtgtcgcctgctccgatggccatatggcggcggtgtccgtcagcttcaagaaaaagccgaccatcgagcagattaaggaacgctgggcaaactacgagacggaagcgcagcgcctggagctgccgagcgcgccaaagcccttcctgcagtattttgaagacccctcccgtccgcagacccgccttgaccgcgatttccagaacggcttcggcgtgtccatcggccgtctgcgcgaggataagctgttcgactaccgctttgtctgcctgagccacaacacggtgcgcggcgcggcgggcggcggcatcctgacggcggagctgctctgccgcaaggggtacattccgcaccgggtgtaa

SEQ ID NO: 235 - DNA, 870 bp, Unknown
  Unknown gut bacteria
atggcatcgaaggtttattttacgcgcaatatcacccccgaaaacgtgctgaagctctacgaagcctgcggtctggagctgcaggggaacgtcgccgtgaagctgcattccggcgaaaagggcaaccagaacttcctgccccccgaattttggcggccgatgattgcgcatgtgcacggcacggtcgtcgagtgcaacacggcgtatccgggcagccgcaacaccaccgccgcccactggcagaccatgcgcgaccacggctggtcggacgccttcaccgtcgacagtatggacggtgaagcgcctgatttgcagctgctcatccccaatggcaaggtcatccagaagaactacgtcggcaagcacctgacgcgctatgattccctgctcgtgctgagccacttcaaggggcacccgatgggcggcttcggcggcgcgctcaaacagctgtccatcggcgtggcatcctcccacggcaaggcgtacatccacggcgcgggcgacgcgaaagtcggcttcggtgcggatcacgacagcttccttgcgtcaatggcggacgcggcctcttccgtcgccaagcgcttcgctggcaaggctgtttacatcaacgtgatgaagaacctgtctgtggactgcgactgctgcgcagtggcggaaaacccctgcatggcggacattggcatcatggcgtcgctcgacccgattgccatcgaccaagcctgcgtggacatgctgtacgccgcgacggacgatccggggcagaaacacatgctggagcgcatcgagagccgccacggcatctacaccatcgaatgcgcggcggagcttggcttcggttcgcgcgaatatgagcggattgacctcgactaa

SEQ ID NO: 236 - DNA, 849 bp, Unknown
  Unknown gut bacteria
gtcaaggggcagcgccccttgggaggtatctcaatgaaggaattgcatcgggcaagggtcgtcgccatcggcagcgaagaggatatggcggctgtctgccgtacattgctcgcaaactgcgattggctggaaatcccggatgaccgcccgccgtattcgctggaggaactgcgccagcaggtcaaaaagcacgcggaggagctgggcggcgaggagagcggattctactatggcatggtcgcgcgctatacctatggcgacgcggataaccgcacctgccgctttgatattgcgcgccagcccagcggattgtggacggcgtgcttccattatgatggcgaaacgcccttccagagcgaggactggctgtacctgcatgaacacgccgggcgcgtgccgatgctggcgattcatgcctgcgcggattttgcggcggataaggggatgaccgtctttaccggcggacagacgctggatgagtggtcgcagatggcggaaatctggttctggctgatggagcagtacgaaatcggcaatccgccggaggaagccgtgcagcacctgaagaagctggaaaccatcatgcgccaaagcgacttcgacatgaccatccccgaacttcttcgggggtgcatcgaccacctgaacgacgtcatggcgcacacgaatcagccggatgaactgcgccgcctgatggacgaatgcgccgaaagaaaagattatcaggggctgttcgtcgtgcagtgtcaggtggcggaaacggtgctgtgggactgcacgcacgttgatttgtggcttgcgaacctcgaaagcatcctgcgcgagtggcagaaggaaaatccggcataa

SEQ ID NO: 237 - DNA, 720 bp, Unknown
  Unknown gut bacteria
atgacgcaacgcatgaacatcgtcgattacgtcatcatcggcatcattggcatttccgtgctgttcgggctgtatcgcggcttcatcgccagcgtgctgaacatggggtgcgggctgatgtcgttcctcgcgtccttctgggtcagtccgaagctcgccgccgccgtgcagtccaaccagtcttttctcaacatgctgctgcactacacggatgcgtccagccgcatcggcgaccttgaaaccgccatcccgaacgtcgcgacgctcaccagccagagcatcaacagcattctggagaaggtgaacctgcccgcgccgctggacacgctgctgcgcgtgaatctggagaacaacgtatacgcctcgtcagggctgtccaccgtctccgattacgtcagccagacgattttgcaggcaagcatcaacatcatttgctttctcgtcagctttttggtgctgtacattgtcctcgctatcgtgctgaacctgctcaaggcggtgttccgctttcccatcctcaagcagctcaacggcttggcgggcggcgcgttcggcttcctccgcggattgctcgtctgcctcgtgctcttcacgctcgttcccctcgtgcagacggtcatcccgctggacatggtgaacgacctgattgcccagtcaaccctcgcgccgattttctccaacggcaacctgattctcgccatcatgaacggcaaattgtaa

SEQ ID NO: 238 - DNA, 918 bp, Unknown
  Unknown gut bacteria
atgaagggcatggagtcttacctgttcgcagacgtagaggctgcggcggatactatggtggtggaaggataccacaagccgggcagcttgacccgctccagcggtgcgtggattcacgcggcaggcacggcgatgtttgaggcagggagacgccccattaagccgcatgaccagtggatttggttcgcggtggaggcaggcgaagcgacgctggtttggcaggggcatgagctgacgctgaaacagcaggaaacgtgcttcctgcccgccggcaaccgcgacgctgccctgcagattgacgagagcgtccgctgcgtgtggattgcgctggaaggcccgcttgcgccgatggtcgtacgcaagatgggcgcgctgctgcatatgccgctgaaacagggggcgctgccgagccagatgtacctggcgaagcaaattgtgcaggtcatcgtccgccacacggacaccagcgacgcgacatatcagctgcagcacctgatgtacgggatgctggcaagccactggggtcagccggtcgccatggacgcgatgctttcgcacgagattgcgaaggtcgtggacaccctgcgcgcgaatcagtacaaggacaacttctctctggcggagatggcggcaatttcccgtatgccgatggaaacgttccgcaagcgcttcgtgagcgaagtgggcatgccgccgctgtcgtatgtgctgcactgcaagatggaacgcgcgaaggagctgctgcgcgaggaagggcacacggttcgtcaggcgggcatcgaagtcgggatgcaggatccgtaccacttctccaagcagttcaagaacatcgtcggcatcagcccgtcggcgttcatgaagcaggccgccaagccggatgcgaccatccgcggcagcagcaaagtagaaaagaagtaa

SEQ ID NO: 239 - DNA, 759 bp, Unknown
  Unknown gut bacteria
atgtatgtcctcctcttcttcgcctgctccttcctcggctggtgcatggaggtcacctgtaagctcgtgcagttcgggcgcttcatcaaccgcggctttctgctcggcccgctgtgcccgatttatggcacgggcgctgtgctgatggcgtactttctgcccttgtggacaacgcaggtcgagtcgacattcctgcttgcactcgtcctttgcggcacgctggaatatatcaccagctggctgatggaaaaactgttccacgcgcgctggtgggactactcccagaagcgcttcaacatcaacgggcgcgtgtgcgcgagcaacctgctggcgttcggggtgatgggcgtgttcgtcgtcaaggtgctgaaaccctttgcgtttgggctgttcgccaaaatcccgactgtctggctggatgccattaccatcacgctgacggcgctgctgattgcggacgtcgtgatttccgcgggcgtgctgacaaagattcgcggcgcggcagaatccgtccgcgcggacaacaccgaagccatcaccaaggcggttcgcgaggcgctcatggcgcagggcttcctgctccgccacccgctgcacgctttcccggaggtgcaattctacaataaggcgcaccttgcccgcctgaaggcgaagcacgacgaattgcaggcgaatatgcgcgaaaaacgcgagaagctccagcaggaacttgaccgtctcgaagagaagcgcaaggcgctcaagaagggcaaaaagtga

SEQ ID NO: 240 - DNA, 933 bp, Unknown
  Unknown gut bacteria
atggcagaacggagaggtcaggtggcagtcaaggatttgccgccgaagctgcaaaagaagctgcgccggcagaagattatgcccaagaaagcccgcaagctcaaccgctcgatggcgggcaacgcgctgctgtttacgctcatgttcatctgcggcgtcttcatggcactgccgctggtcatgattatcaacaacgccctgaagccgctggacgaattgtaccagttcccgccgaagatttttgtgcgcaacccgaatctgcgcaacttctcggatttgttcatcctgatgaacgactcgtgggtgcctttcagccgctacatcatgaacaccatcatcatcacggtggcgggcatggtgggtcacgtcatcgtggcgtcgtgggcggcatatccgctggcgaaggacaaattccccggcaaggcgctgctgttcggcatggtcgtgctgtcgatgatgttcaactggacggtgacgcagattccgcagtacgccatcatttcgtggctgcacatcaacaacacctatctggcgctgattctgcccgcgtggtcgttcggcatgggtttgtacctgatgaagcagttcatggagcagctgccggattcgctgatggagtcggcgcgcgtgcagggcgccaacgaatggcagattttctggaaaatcgtcatgccgaacgtcaaacccgcttggctgacgctggcgatcttccagttccagcagatgtggggcaataccggttcgctgttcctgcgtgacgagcaattgaagcccatgcagtacgcgctccagcagattacggctggcggcgtgtcccgcgcgggcgcggcggcggcggtcacgttcatcatcatggcggtgccggtgctgttcttcctgctgtgccagagcagcattctggaaaccatgacgacttcgggcatgaaggattaa

SEQ ID NO: 241 - DNA, 735 bp, Unknown
  Unknown gut bacteria
atgctttccggtgaatttcagaaaggaatgaacaaaatgccctactattattattgggactggacgtatctgctgattatccccggtttgattctcggcctgatcgcgcaggcgaaggtgaaaagcgcctatgcgcagtgcagccggattcccgccaagtgcggtctgacggcgagtcagatggtcgcggatttgctccgccgcaacggcaacacccgcgtgcgcgtcgggcatgtatcgggcgaactgaccgaccactacgacccgtcgaaggaagttctcaatctctccgacggcgtgtacagcagcaacagcattgccgcgatgggcatcgccgcgcacgaggcgggccatgccatgcagaagctggagaactacgcgccgctgaacctgcgctccgccatcgttccggcggtgaacatctgctcgtcgctctccacgccgatgttcattctcggcttgattttcgcgtggcagccgctggtgtacatcggcatcggcttgttcgccgcatcgactgtgttcgcgctggtgacgctgccggtggagtttgacgcaagcaagcgcgcgattcagatgctgtccgaaggagggtatatttccggcgcggaggaagagcggaatgttcggaaagtgctgagcgccgccgcgctgacgtatgtggcggcggcggtgacgagtctgctgtcgctcttgcgcttgattctcattgccaagcgcaatgaccgcaattga

SEQ ID NO: 242 - DNA, 525 bp, Unknown
  Unknown gut bacteria
atgaacatggcacagaatcctacttttgttattacgatggcggatggccgcgaaatgaagggcgaactctaccctgaaactgcgccgcagtccgtcggcaattttattgcgctggcgaacagcggcttctatgacgggctgatttttcaccgtgtcattccgggcttcatgattcagggcggcgatcccaagggcacgggcatcggcggccccggctaccacatcaagggtgaattcgccatgaacggcgtgaacaaccagctcaagcacacctacggcgttctgtcgatggcgcgcagcatgatgcctgattccgccggcagcccgttcttcatcatgacttcggacagcccgcacctcgacgggcagtacgcggcgttcggcaaggtgctggaaggcatggacgtggcggatgcaatcgtcagcgtcaagcgcgacatgcgcgataagccccttgaaccgcaggtaatgaagtccatccgcgtggaaaccttcgggcagacctatcctttcgagcagatgtaa

SEQ ID NO: 243 - DNA, 873 bp, Unknown
  Unknown gut bacteria
atgcccaagaagacccacggactggcgcgcggcttggattcgctgctgccggaagtagacatgatgacatccggcggcggacaagaaatcgcgattggggacattgacccgaatcctgaccagccgcggcgggcgttctccgaggaaagcatcgcgcaattggcgcagtccatccgggagcaggggcttttgcagcccattctggtggtgccaatgaacggcgggcgctaccgcatcgttgcgggcgagcgccgctggcgcgcggcgcggatggcgggacttgaccgcgtgccgtgcatcatccgcgagatggatgtgccgacgcagatggaaatcgcactggttgagaacttgcagcgcgaagacctgaacccgattgaagcagcgcagggcatccagacgctgatgcgccaatgcggctacacgcaggaagcagtggcggcgcggctgtgcaagagtcggcctgccgtggcgaacctgctgcgtctgctgacgctgccggaggaaatcatcacgatggtgcggcaggggacgctgagcgcgggtcacgcgcgtgtactggcgggggtggagtcggacgagatgaagatgacgctggcacggcagacgattacgaacgagtggagcgtccgacagctggaaaacgcggtcgcgctgatgcgcaagagcaccccgacgctgcccaaaacaccgcagaaggtgcattctctgcctgcggagctgacggagctggaaacgttctgccgcgagacgttcggcgttcgcgcgacgattaccggcaatcagaagaagggcaaaatcacgctgcagtactactcggcggaggagctggagcaggtttatgagctgctgcatcagctgcatcacgactga

SEQ ID NO: 244 - DNA, 957 bp, Unknown
  Unknown gut bacteria
gtgaaacatatgcggaagattattgtggactgcgaccccggcatggatgactcctcagctatcatcatggcagttaagaacccaaatctcgacattcaagcggtgacgacggtcaacggcaattatcccgtggacataacctaccgcaacgcgcggcgcatcatgcggatgctggggcgcgaggacattccggtctaccgcggctgctcgcgcccgctggtgcgcgacatcccgaacgacccgtttacccacgggcgcgacgggcagggcgaatcctttctgccggattcggagctgccggagaacccgacccacgccgtcaatgcgattatcgacctcatccgtcagcagccgggcgaaatcacactggtctgtctggcgccgatgaccaatatcgctatggcactgcgccttgccccggacatcaaggataagattgtcgaagtgattgccatttccggcgcattcgggctgaatgaggcgtctttcctcaacgctacgggcgacacgcctcaaagtgagtggaacgtctacgttgacccggaagcgacgaagcaggtctacgaatccggtttgaaggtgacggcgattgggctggacgtcgcgacgtacttctccgtggacttcacggacgaagaccttgcgcggctggcggcgagcgacaagcccgaagcgaaattcctccatcaggcgatttccttcgtgcatgggcgcggcttccaagcctactgcgcggtcattgactgcatggcggttgcggcgacggctgacccgacgctgctcaagagcgtgcgcggccgcgttggcgtatcgacgcaggacggtttgacccttggcatgacgattatggatcgccgccatcaccacgtctggacgaacctgccggaaatcaacgttgccgttagtgccgactatgcccgcttcctgcacgggctgattgaggactttttgaaataa

SEQ ID NO: 245 - DNA, 1077 bp, Unknown
  Unknown gut bacteria
atggagcgtgtgtataatttttcccccggcccgtcgatgctggcacagccggtgctggagaaggcgcagaaggacttgatggtctacggaaacacgggcatgtccgtgatggagatgtcccaccgcagcaagatgtataccgatatcttcgacaagacggtcgcggacttgcgcgcactgatgcacatcggggatgattacgaggtgctgctgctgcaaggcggcgcgacgctgcaattttccgcgattcccttgaatctgatggtcaagggcaaggcggattatgtcgattcaggcaatttcgcgcaccttgccgcagaagaagcaaagcgctacggcgaagtcaatatcgccgcgaccagccgcgcggacaactacacctacgttcccgacatggcggcggcgaagttcgaccccgacgcggattacgttcacatcacccagaacacctccatctacggcacgcggtttgtggaactgccggatgtcaaagcgccccttgttgcagacgcaagctccatgattctctccgaaccgatggatgtgaaccgctacggggtgatttacgccggggcgcagaagaacatcggcccgtccggcctgtgcgtcgtggttgtgcgcaaggacttgctcggccacgcgaagcccatctgcccgaagctgatggactggaaggtcgaagccgacaagggcagcatgtacaacacgccgaacacttggggcatctatctcgccgggctgacgttcgactggctgctgtccatcggcggcgtggaggcgatttatcaggtgaatcaggagaaggcaaagctgctgtatgacttccttgataacagcaagctgttcaaggcgacggcgcagaagaagtatcgcagcttgatgaatgtgacgttcgtgacgggcgacgcggagaaggacgcggcgtttgtgaaggcggcggcggcacagggattggtgaatttgaagggccatcggacggtgggcggtatgagagcgtcgatttataacgctatgcccatggaaggggtcaagaaattggtggagttcatgaaggaatttgaaagggaaaatgtttaa

SEQ ID NO: 246 - DNA, 252 bp, Unknown
  Unknown gut bacteria
atgattgtcaaaccgattacctttccgaatcatcagccgctgaaccgcacccttgccgcgcaggtggtgcaaaccgccagccgctttgacgcgcgcgtgatgatccgccgccatcagaaggttgtcaatgccaagtcgatgctggggctgctgtcgctggatgcggacgagcagaatgagatgttcctcgtctgcgatggcgcggatgaagaagcggcatcggcggcagtgctgccgttttttgaggcgtaa

SEQ ID NO: 247 - DNA, 1023 bp, Unknown
  Unknown gut bacteria
atgggtgatatgcggattatgctggtggacgacaacggcgaccttcgccggggaatgcgcgactatctggcgcggcaggagggcatgaaggtggtggcggaatgcccgtccggtgcggaggcgctcgaagcgctgggaaaggtgcgcgtggacgtgatggtgcttgatctcatcatgccgcagatggacggcttcgcgctgatggaggaagtccggcggcagcagctggcgaatccgccgcagattatcgtcgtatcggcgctggggcgcgacgatttcatcatgcgcgcggtgcagctgggcgcacggttctacatggtcaagccgtttgacatggcgtcactggcggcgcgcatccgggaaagctgcgggcagggcgttgtgccgctgggaacggcgctgaacgcaagcgcacgctcgctgtccatcgacgaaaagctggcgagcctgttcctgaccatcgggattccggcgcacatcaagggctaccagttcctgcggacggcggtgaagatggtggtggacaatccggacatgatcaaccgcatcacgaaggagctgtatccgagcatcggcaagtgctacaacacttccgccagcaaggtggagcgcgccattcgccacgctattgaggtcgcgtggagcaggggacgcattgatacgctcaacaaggcgttcggctgccgcgtagcaacgaaggaggataagccgacgaacggtgagttcattgccatgctggcggaagttgaggatgaggcggagttctgcatccgtcaggttcgtggggatgagttcgcctgccgccgggtcatgaccgacaagatagtcgatggacacgccgaagtagtctgcgatgcgggtcagaacggcaatgtccggctcggtatcgcggttctcatactggttgatggactgctggctgaccttaacgaaatcagccagagcgcgctggctcagaccttgagcggtacggagtgccttcaaattcgcgagcatagtaaggaacaacctcctgttatttga

SEQ ID NO: 248 - DNA, 789 bp, Unknown
  Unknown gut bacteria
atgattagtgcagtttatcgcagaaacagcataaaaggggaggaaaaaccaacgatgtacgaagaattgcagcagtggattgatgagagccgccgcatcgtgtttttcggcggcgcgggtgtttcgacggagagcggcattcccgatttccgctcgcaggacggattgtatcatcagcagttcgcctatccgccagaggaaattctgtcccacaccttttttgcgcgccatccggaggagttttaccgcttctaccgcgcgaaaatgctccccttggacgcgcagccgaacgacgcgcatcgctttctggcgcagctggaagccggcggacgtttgacggcggtcatcacgcagaatatcgacggcttgcaccagaaggcgggcagcaaaacggtgctggaactgcacggcagcatccaccggaattattgcctgaagtgtgcgcgcttttttccgccggagtacatccgggacagtgaaggcgtgccgaaatgcccctgcggcggcatcatcaagccggacgttgtgctgtacgaggaagggcttgatgatgcgacagttcgcgcggcggtgcgccaattgcagcaggcggaactgcttatcgtcgctggaacgagcctgacagtgtatccggcggcggcgctgctgcggttcttccgcgggcggcacatcgttcttatcaaccgcgacgcaaccccgctggacaatcaggcggatttggtgctgcatgagcgcgtaggagcggtctgccgccatctgcgcccgacaccattggaggtgggggaatga

SEQ ID NO: 249 - DNA, 1887 bp, Unknown
  Unknown gut bacteria
atggcaaaaatcgactggggcgaaaagctggatctgaaaatcaggatgctgcccgaaagccccggctgctacctgatgaaggacaaagacggcacgattatctacgtcggcaaggcggtcaacctcaaaaaccgcgtccgctcctacttccgcgacacggagcacacgccgaaagtcgccgccatgatttcccacatcgacgacttcgatattctcctgtgcgacagcaacctcgaagcgctgtgcctcgaatgcaacctcatcaagctgcacaaaccgtactacaacatccttctcaaggacgataagcattatccgtacctgcgcgtcaacctgaaagagccgttcccgcgcctgaccctcgcccggcggatggagaaggacggcgcgaagtacttcggcccatacatcggcgcgacggcggttcggcaggtcatcgacgcagttcgcggcgtgttccccctgcggacgtgccggaaggaactgccgctgaaaacaccctgccgcccgtgcgtcaactacgaaatcggcaaatgcctcgcaccgtgcgccggaaaatgcaccgaagagcggtactgggacatgatggacggcgtgctggcgttcctcggcggcgactacaagcaggtactggacgtgctgaaccgcgaaatgatggactacgcggcaaagatgcagtacgagcgcgccgccgtcatccgcgacaaaatccgtgacgtgcaggggctgatggaacggcaaatcgccatccagactgaccggagcgagcaggacatcctcgccattgcgcaggacgggctggacgccatgattcagctggtatacgtctgcggcggccgcatggtcggcggcgaccactttgccctcccccgcgagggcagcgaacccgccggcgacgtgctggcagagttcctgacgcagtattatcaggagggcaacctgattccgcgcaacattctcgtgcaggagctgcccgacggcgcgcaagcccaattagagcaatggctgcggcagcagaagggcgcggcggtgacgctggtcacgccccggcgcggcgagaagcacgatttggtgctgctggcggcgaaaaacgcccatgacgcgctggagaagcggaacgcccgcgcgagcatccgcgaagagcgcacggtcggcgcggcggcggcactcggcaaggcgctggggctgcccaaggccccacggcgcattgagggctacgacatttccaacacgcagggcgttttgagcgtcgcgagcatggtggtgttcatcgacggcgaacccgcgaaaaaggaataccgccgcttccgcatcaagacggtcgagggcgcgaacgactttgcctccctgaacgaggtgctggggcggcggttcgcgcacggcttgcaggagaaggcggaacgcgaagaacagggactatcccccatcggcggcaaattttctgacctgcccgaccttgtgctgattgacggtggtccgcagcagctgcgtttcgcgcggcaggcgctgctggacatgggcgcggacgtcgcgatgttcgggctggcgaagaagcaggaggaaattttccttcccgaccgcgaagacccgatttgccttgaccaccacacgccggagctgcacctgattcagcgcgtccgcgacgaagcgcataggttttgcattacgcaccaccgcggattgcgcgggaaagcgagcattcacagtcaattggaggatattcccgggattgggccgaagcgacggaaggcgctgctgacgaagcttgggtcgatgaaggcaattcgtgaggcgacggaggaggaattgctgaaggtgccggggatgaatcaggcggcggcgaaagcggtcagaaaatgggctgagggggcgcagaaaaaggattaa

SEQ ID NO: 250 - DNA, 915 bp, Unknown
  Unknown gut bacteria
atggagggaaacgccatgccgcgcagaaagtttgacaccacccagcggggaatatccgatactcacactgatgcgcctatcgccacgagcatttgcgagaacaagctggtctatgccgagcggattcgcaccctgcgagcagcggcgaacctatcgcagggcgagctggcggaagccatgaatctggggcgcgcggcgatttccaactgggagacgggacggacgcgcccggacatcgccaacatcccgcgcctatgcaacgtgctgggcatcaccgtggcggcgttcttctccgacacgccagaggaagcgggctggaacgacgccgagcgtgccctcatgcggaactatcggaaattgagcgcaatcaatcaggagctgctttccgcgaccgcgcagacgatggtcgcgctggaagagcagtatccggggctaccgaagcgtcccgccgcgccgaagctgacgcccgaacccgcgcgcttagagctgctggaactgccatatgcggatgacccagtcgcggcaggcacgggcgacagcggatttgccgccagcgggcacacgacgttcctgcacgcgacccccgacacgcgcggcgcggacatggtattccgcgtcaacggcgacagcatggaaccgaaatatcccgaccactgcaacgtgctggtgaaattcaccgacgaaccgcttggttcgggcgatatcggcatctttcaggtagacggcgcgctgtacatcaagcagtaccagtccgacggtctgcattcgctgaacaagcacttcaaaatcatgcgccgcaagtcctacgacgaaatcaagaccatcgggcgcgtcatcgggattctgcccgacagcgatttcgccacaagcgcggaaattcaggattttcaggcacaggaaaatcagcaggaataa

SEQ ID NO: 251 - DNA, 1878 bp, Unknown
  Unknown gut bacteria
atgacggcgggcaggccgaaacggcacagcgcctcctttcgccgcgtgctggtgctggtctatggcacggtgatcctcttcgcgctgctgattaccggcatttacacggtcgtttcgccgcagattttcgccagcaacaagatcagcgacctgatccccaaggggcagatcatcgccgggtatatcgagagcacactgcgcggcgagctttcctccacctacctcgtgccgctcatcggccgcagcacctcccagtgggaggcgacggtctgggtggtggacgcgagcggcgacacgctcatccgcacccagcagatcgaggggcggcgcgtcggccgcctgcccgccaagctcagcgaatccatgctgccgcaggtgctctccggcgagatcgccacgcatgtgggcagcatggaggatctgaccgtctccgacggcgcgagccatcgcaaatccgcccggtcatccggcgtgatgaacggcctgagcgaaggcagcgccaaagcgcccgagaccgattccaccgaagaggtgatgaacggcaacctcgtcgtcgtcgccgttccgatcacattcatgggcgaggtcatcggcgcggtgttcatggcgcaatccatgaccgagatcatgggcggcatgcaggcgctcaccaacacgctggcgctctcgctgctgctggtcgggctgctgatgctcccggtcgtcctgtttttcgcctcccgcatggtgcggccgatcacgcggatgcgcaccgtcgccctgacgatggccggcggcgacctgaccgcccgcgcggaggacggctccaacgacgaatacggcgaattggggcgcgcgctcaactacctttccagcgagctgggcagcaccatctcctcgctgcaaatggagcgcaaccggctgcaaagcttgattaacggcctttccgaaggcatcatcgctgtggacgcgaagggcgcgaccacgctgattaaccccgccgtctacggcctgctgaaccttcaatccaccgatgacaatgtgcgcgccgccgcgccggatgtgttcgccatgttcgatcaggcgctctcctccgcgcgggccgtcaaaaagacggtttggcagggcgacgtcgcgctgcatatctccgtttcgccgctgctgctgcaaagcggcgaggtgaccggctgcgttggcatcgttcccgacgtgaccagcgcggagcggctggagcagacccgccgcgattccgtcgccaacgtctcccacgagctgcgcacgccgctgaccgccatgcgcgcgctgatcgagccgctgcgcgacggtctggtgaagaccgaggaacagcggcagcagatttatgacgtcgtgctgcgcgaaaccatgcgcctgtcgcggctggtcaacgacatgctggagctctcccgcctgcaaagcggcacggcctcgctctcccgaagcgtctttgccccgctcccgctgttcaacctcatccacgaaacctattccgcctacgccgaggactatcagcagaccttcgtctacgacgtgccggaagacctgccgagcgtttggggcaatccggatcgcacccagcaggtgctcatcgtgctgctggataacgccttcaagtatacgccggagggcggcgtcgtcacgctgagcgcctgcgcggagggcgacgttgtccgcgtccgcgtccgcgacaccggcgtgggcatccccgcggcggatctgccccacgtgttcgaccgcttctacaaggtcgataaatcccaccacagcaagggcaccggcctcggcctcgccatcgcttacgaaattatgaagcacctcggcgaggagatgagcgtcaccagcgagcccgggcagggaagctgcttcaccttcacgctgcat

SEQ ID NO: 252 - DNA, 2253 bp, Unknown
  Unknown gut bacteria
atgaagagacgggaacgggatcgggcgacgaggggcgcgaaggactatcggctgctgtgggcgggtctgctgctgctggtcgccctgatttttgcctgcgtcggtttcagctgcggccacatccgcagggggctgaaaaacgccgcggacgcggagatggccgaaacgacagccgagaacgcggccatgctccggctgacgctggaaagccgctttgcgctgctggacaacgtggccgaaaaaatagcggaagacccgcaaaacgcgcggaaaatgctgacgaatctcgggaaatacgccaacggctacggcttcaagcgcctcggctatatgaactcgacggggcggacggtgaccagcgacggcgaaaccggcgatttcttctaccgcgcctatttccgcatggggatggacgggcaatactgcatcaccggcgaaatcaacgaccggctgggcaacggagaggccgtccatattatgagcgcgcccgtgcgcaacccgaagacgggcaaggtcatcggcgtggtctttgcggattatacgccggaaatgtttcaccagatgatggatgtggaaaccttcggcggcgaggggcgcggctacatcgtcgaatcgagcggcgaaatcgtcgtcgcctcgtcaagcgcgcgtctcacggggacgggcaatctgctggacgaggtggcggatttttcggagaccggccgtcaggacgcggaggcgctccggcaggttctcgccggggagcagccgggcgatgggcgcgtgctgggcgcggggaagctgcgcttctgctgccggaagattgaaaacggtcggcaggacgacacgtggtatctggtcatggtgatggacgtcggcgcgctctacgggcggatgtacggcgtgttttcgagcatctgcagcctgctgagcgtgaccgtgctgatgtgcgcggtgttcatctttgctatcctgatggcgtatcggcgctacaacgaaggcctgcgtcaggcggcctacaccgacgcgctgacgggcggcagcaacttctccggctttttgatgaaggtcaacaacgcggagggcggctacatggtctcctgtgatttggacgattacaggatgatcgcgagcatgttcggcgcgcagaagggcgacgagctgctgcgcggcatgtacgagtgcatcaagggcgggctgacggagggcgagccggtggcgcgcgtggacgcggatcacttcgcctttcatctggtggagcgccagcgctcggcggtgctcgaacggctgcgccagattgagcgcaggattcgccgcctgtcggataaaatgggcgtgattcacctcgtgccgcggttcggcatttacgcgatgcgcccggaggaggatgcccgccgctcgtgcgagctggcgaatctggcgctgggcgcggcgcggagcagcgccgacaacaccgttgcgttttatcaggatctggatcaaaacgctttctttgaaaacatgcagctggaggatcgtttcgacgaggccatcggcgagcatcagtttaaggcgtattatcagccgaagtgcaaccccaaaacgggcgaaatcgtcggcggcgaggcgctggttcgctgggtgcaggaggacggcaccatgctcccgcccgatcgctttatcccgctgtttgaaaagaacggcgccatcggcaagctggatgaatacatgttcacctgcgtctgcgcgcagctcagccagtggcgcagggaagggcttgagattcggccggtgtcggtcaacctgtcgcgcgcgtcgctgtgccgtcagggcgtggcgctggcgtataagcgtattctggagggctacggcctgtccacgtggatggtgccgctggaggtgacggaaagcgcgatgatctccgacgacgcggtgatctccgtccttcaggagttttatcgctacggcttccgcatcgagatcgacgacttcggcaaggcgcaatccaccctgccgatgctcaagctgccgtttgtcgataccgtcaagctggataagagcctgatcgactgcatcggcgaccgcaagggcgagatcatgctccggcaggtcgtgcgcctgtgctacgagctggggctgtataccaccgccgagggcgtggaggccgaggatcaggtggatttcctgcgcgcgctggattgcacggatatacagggctacttcttctccccgccgctgccggttgaaaaatataccgaaaagctccggcagcaggcgcggaaacgggcttga

SEQ ID NO: 253 - DNA, 1407 bp, Unknown
  Unknown gut bacteria
atggaggagaaaaccatgtcaaagctgttcatttccggcggcacggtcatcgacccggagaccctgtcgcgctttcaggccgatgtgctctgcgaggacgggcggatcgccgccatccaaccggcgcagtctggcgcgccgaaggacgcgcgggtaatcgacgcttccggctgcttcgtctgccccggctttattgacccgcacggccatatcgacggctgcaaatacaccggcacgctctccctgcttcagggcatcacgacgacggtaggcggcaactgcggcttttccccgctggatatagacgcatttctgcgcagccagacggcatttccgattcatcaggcggagatgatcggcctgtgcgcgctgcgcgaggcggcgggcgtcaccgatctgttcgccccggccaaacgcgcgcaggtacacacgatggaagccctctgcgagcgcgcgctgcaaagcggcgcggccggcgtttccctcgggccgggctacgcgccgggcacgtcgcttgaggagatggaggcgctgtgcacgatagcacgccgctacggcagacccgccgccatcgacacgcgcatgttcgccatgaccgacctcaactcgctcagcgaggccattgagctggccgaggtcacgggctgccggatgatcgtctcgcactttgaatatcaatacggcgttggcgtcgaatacaaggcgctggagatgctggagctggcgcgcgcgcgcggcgtggatatgcgtctggacagcggtatgtacaaggattggtgttcttccatcggctcggcgctctttgagcccgtgaccatgcgcgacaacggcattgagctgcgccacctgcgggtcatcacgggcgagcacatcggcctcgtgccggatcaggcgctctatgaacacctgcgcgcggcgcacccgtgcgacgcggtggtggtcaacacgggcagcgaggaggccgtctacaccattcagcgctacccgatgacgatggtttccaccgacacgggcagctacgctcccggcgaagggcacccgcagatcgcgggcagcttcccgcgctatctgcgcaaaatggtgatcgagcgcggcgagctgagctgggagaaggcgattgagcatacgacgctcctccccgcgcagacgatggggctcgggcgcaaggggcgcatccgcgcgggcatggacgccgatctgctcgtcttcgaccccgaaacgatttgcgaccgcgcggatttccccggtctcggccgcccggacgccgcgccggagggcattcgttttgtcatcgtatccggcgaaatcgccgccgaaaacggccgcgcaaccggcgtgatggccggtaaaaccctggattcgtttgatttcatccattcgagccgccgcgccatggcgggggattga

SEQ ID NO: 254 - DNA, 1587 bp, Unknown
  Unknown gut bacteria
atgaaaaggaagaacaagagcacgctgctcgtctgcatcaactgcatgatcatcacgctggccatcctgctgctgccgctggcgttctttgaaacgagcatctatgtcaagcgcagcgcgaacacgttcgtcggcgacgagaaatacgtcgaggcgcgcgcggaggtcgaggccgtcgcggcgcagcacgagggcgcggtgatcgaggagagcgtgaccgagcgcgtcaactccaagggcgtcaccacgtcgatggtcaccttcacggtgaaggaaaccgtccgccgcaacgggctggatttcctgctgcatggcgtcggccacagcgagggcatgtcgggcgtcggcccggcgaacgtgatgcgcctgctgctcggctcgatggcggtttcgctggtgctgctgctgtgcgcgagctgcaagacgctggaactgccgcgcacggatctgcccaagacggccaaccggctgtatacggccgccggcgtgtttgcgctgatcgcgtggttctgcgtaccggcgttcgtgcgggcgatgaactacacgttcgcccggcaggtggatctgctggtcggcgggcacatccagaacgacgcgctgctggcgcagctcaacgccttcctctacggcgggcaggcgggcgacggcctgatggagatgctcagcgggctgacggtgaaaaccaactgggcgatttgggtggcgtttgcggcgctgttcctgctgctgtgcgcgatcacctgcctgcgctgcggcgagctgaaaaagacgctggcgcgcggcgggctgtatctgttcgtgattgcgctgtgcatcttcatcctctatccgttctacgtgatgctcattaccggcttccgcagcaacgcggagacgacggatatgtatttcctgcacatgatgccgacgaagtggatttggagcaacctcaaggatatctgcgaccgcggcgttctgcgcttcctgctcaattccatcatgctctccaccggcgcgacggccatcgcgatgctctgcggcattccggcggcctacgcgatggcgcgcatgcatttcaaggggcgtaacctgttcctcggcttcgtcattatgagccagatgttctctccggtggtgctgctggtcggcatttcccaactgatgaacgcgctgcacctcaacgatacgatcctgggtctgatgctgattaacgcggccttcaaccaggcgttcgccatctggctgctgcgcggcacattcgtttcgatctccccggagatggagcaggccgcctgcatcgacggctgcaacacggtcggcgcgctttggaacatcctgctgccgatggccgcgccgggcattgtgacgacgctgatcttcgtgttcatcaactcgtggaacgaatacacgatctccaccgtgctcatttccaccccgacgaacaagccgatcaccgtgggcatcacccagttcagctcgtttaacatgatcgagtggcaatacctcttcgcggcggcgctgctggcgaccatcccggtcatcattctgttcatgtgcattgaaaagcacctcgccgaggggctgacctccggcggcgtgaagggttaa

SEQ ID NO: 255 - DNA, 1563 bp, Unknown
  Unknown gut bacteria
gggcggctggcgctggcctcgcgcggcgttcagcttttgacgacacggcgaatggacacggcgaaggagattgccgaagaactgaatcaggataacatccgccgccgtgagctggagattgacattttcaagcaggcggacgagatgacgcggcagcagattgattttatgaacgaacgcgccattgtcgtctgcggcgagggatggaatcccggcgtcatcgggctggcagcttccaggctggtggaaaaatacaaatggccgacggtgctgctcgctcaggacggcgatatctgcgtcggttctgcgcggtcgattcccggcgtgaacatccatgatgcaatgagcacatgccgcgacctgttcgttcgcttcggcgggcatgcgcaggccgccggattgacgattgaagctaaaaatgtgccggaatttagaaggcggctgagcgaggccattcgggcgcaggccgcgccggaagcatttattccgacggaggaatatgacctcgagttggagctttccgaaatgacggaggcgtttgtggatgcgttttccgctatgcagccgacggggttcggaaatcccgcgccggtgttctgcgtgcgcggcgtgcacacgacggacgtgcgaaccatcggcaaagacggcgcgcatctgcggatgaggcttgcgcagggcggcgaaatgcggtcggctattggctttcggatgggcgaccgtgcggccgatctgccggaaatcattgaagcgatcatcacgctttccatcaacgtttggcaggataagcgcagtgtgcagtgcgaactgcgtcagcttcaggcgtatatgccgggaaaggcgttcattgccgaatgtcagcggcagagcgacgtactggatgacgcgctgctgaacgccctgtgcctgccggagggggaagcgttaggcattgaacagatgtcccttgagcaggcgaaaacggttctggccggtgaatttgaaaagggctatcagggcattctgatcggtgtgcatacgctggcggcgatgaagctgctcaacgtgcatctggctgtgatgcatgcccaactggactacgccattgagcggacgagtgacattcgcggctttaacgcgctggtgatgacgccggactgggcgaacatcgcgttttcgccgaggttgattgtcgcgatggacggctttttgagcgacggtgagcgcgcgctggctaagcgccagtttcccgaggcgcgcatcattgaagtgaccaatatgcggacgcagagcgcggcctgcgcgggcaggctgctgccgagcgacgatgcgctgcgccaactgtataaggcgctgcgccagcgggaacggatggattgcaccctaaacgtgctttccgccgcaatcgggctggacgagagcacgattcgatgcggcatgcgcatcatggagcagcttgggctggtcgaatatacgcttcagccgtttcgctttcagctcatccccagcggcaaagtgtcgctggaaagcagcatgcttcgcgcaaagctgttacagatgaaggacgaaggggggaaaccgttttga

SEQ ID NO: 256 - DNA, 1314 bp, Unknown
  Unknown gut bacteria
atgcgcaagcagggcattgacggaacggggatgctcaacctgtacgacagggtgacgggcattttcaacgagatttttgattcgcggctgctgacggcggcgattttcgcgctgatcggctattgctcgctgttcacgcagcggaaattcccgatgcgctggatgatcttcgtgctcttcggcatgatcctgctggcgtttgtgacgctgacggcgcgcacccccggacaaaaggcgcgcgtgcactttcacaagggcatggcggggctttggttcgcgctgcacgggatgatggtggtttccggcctgttttacgaggattggctgccggaaagtgtgccgcttctgatctgctacccgatcgtgttttccgtcttcgtttcgcgcgacgacgattcgacgttccgctccatcctgcgcggcgcggtgttcgcggtgctgccgtttctggcgtggtcgtatgcggccgtgccgctgagcttcgcctatccgggctacaagggcgtcttttatgacgcgaactgcctgtcgatgtgctgcatcgtgatggcgacggcggcgctgttgctggcctacgcgagctttgtggagaagcggatgaaggcggcggccgcgtatctgctgctgggcgtctgggcggcggcgacgctgctggcgacgctctcgcgctcggggctgctggcgttcgcgggcgtgatggtgattctggtttcggcgatcatcgcgggcacggcgaagcacccggcgcggctgctggcgctggtgggtgggttcatcgtggtttgcggcgcggcgggcgtgaagatcacgaaggacaaaatgtatgaagcggcggtggaggattacaacctcgccgtgtacaaccacgagacatacggcaacccgatcaccgtgcccaagccggaggacaggacgatcagcatggacgacctgaccagcgaccgctggggaatctgggcgaccattctggaaaacctgacgtggaacggccataaggacagcgtgatctgggaatgggtcgccaaggacggcgcgggcgaccgccactacaacgcgcacaatgcgtttttcggcgtggcctacaacaacggcttcatcgccggcctgctgctggtcgcctacacggcgctcgcgttcatccgcgccctgcggtattactgggcgcaccggaaggagagcccctacgccgcgacgccgctggcgttctgcacggtgttcattctggtgggcatgttcgaatcggtctacgcgccattctcggtgatcggctgcgcgtattttctggttcaggcgccgctctggcgcgcggaataa

SEQ ID NO: 257 - DNA, 1470 bp, Unknown
  Unknown gut bacteria
atgagcagattgatccgcatcaatccgcgcgacaacgtcgccgtggcgctccagccgctcaaggccggtgaagaagcgctcggcgtgacgctgcgcgaggatatccccgccgggcacaagtttgcgctctgcgacatcgccgaaaacgagaacgtcgtcaaatacggcttccccatcggccacgcgacgcagcccattttagcgggaagctgggtgcacacccacaacgtcaagaccaacctctccggcctgctggaatacggctatcacccgcatccctgcgccatgcccgtggatcgcaaggccgcgttcgagggctatgtgcgcgaggatggccgcgtgggcatccgcaacgaggtctggattgtgaacaccgtcggctgcgtcaacggcacggccaagacgcttgagcgcatggcgcaggcggcctacggcgaccgcgtggacggcattcactgcttcgtccacccctacggatgcagccagctcggcgaggatcacaggaacacccagaagttgctcgcctcgatggtgcgccatccgaacgcgggcgcggtgctcgtactgagcctcggctgtgaaaacaacaacgtaaacgaattcaagaaggtgctcggcgattacaaccccgagcgcgtgaaattcctcgtcacgcaggacgtggaggatgaaatcgaagcgggcatgcagcttctcgacgagctgactgcctacgcctccgccttcaggcggcggacggtggacgcttccgagctggtcatcggcctcaaatgcggcggaagcgacggcctctccggcatcaccgccaacccgctgctgggctgcacgtccgatctgctggcgcgccacggcggcacgacgctgctgaccgaggtgccggagatgttcggcgcggagaccatcctgatggatcgctgcaaggatgaggcgaccttccgcaaggcggtcgatctcatcaacaatttcaaggaatacttcatccgccacgggcaggaggtctacgaaaatccctcccccggcaacaaggcgggcggcatcaccacgctggaagacaaatccctcggctgcacccagaagggcggcacggccgaggtgcgcgacgtgctccgctattgcgagcccgtgaccgagaaggggctgaacctcgtgcaggggccgggcaacgacctctgcgcgatcacggcgctgatggctgccggggcgcagatggtgctcttcaccacggggcgcggaacgccggtcggcgcgccgattccgacggtgaaggtttccaccaacaccccgctcgccgaaaagaagcgcgattggatcgacttcaacgccggtattctcgcgcagggcgcggacatgcaggagacaaccgaggtttttttcaaaaagctgctggccatcgcctccggcgaacggacgcagagcgagacgcacgattatcgcgaaatcgcgattttcaaggacggcgtaacgctgtaa

SEQ ID NO: 258 - DNA, 1827 bp, Unknown
  Unknown gut bacteria
atgaaaaagcatgcggtagcgctgctgacagcgctttgcgtagcggctggctgcacggccagcgccgatacggccaagcacgagcgtgtttatgtggttgtcaatcacgacggtgaggtgcagaccctgctggacaacgttcaccttgaaaatggtgacgcgctggatgtgctctcggatcgcacgatgctgaaggatattgaaaacgtcagcggccatgaaacgttcaccctcgacggtgaaacgctgacctggcaggccgacggcagcagcatcatctatcagggcacgtccgataagcgcccggacgttcttcctcacgtcagcttcacgctgaacggcgaaagcgccacggcggaagaaattaaaaacggtcagggcgttgtggcgatggacgtcagcttcatggtagcggaaaacgttccgtatcttgccctgactctcatgcccatcgacgacgctacgctgaccgacgtgagcgtggagaacggaaaaatcgtgagcgacggcagccataagctgctgattggctgggcagttccgggcatggacaccgacgccgatctgccgacgcatttcaccctgacggctacggccgaccacgccgacttgagctggatgatgacgctggcgaccagcgacccgatcgactggctttgcagcgcagccgatgaaagaatcggcgatttgaacgacaacgtcaatgagctgaagacgggtctgaccgcgctgtgtgacggcgaagcgctgccggagggcgagggaacgctgcacgatggtctttccgcgctgttcacgctgtatgatggcgttgcggcgcttaatgacggtgccaaatccctgagcgacggcgccaagagcctcgatgacggcgcatctgaattggaaacgggtctgacaacgcttgtcgccaacaacgacgcgctgaatcagggcgcggcacagcttttcagcgccgtgctcgcgacagccaatcagcagctcgcggcggccggactggatgcggccggaatcacgctgccggaactgacgagcgaaaactacgccgacgttctggatgcggcgctgactcagctcaatcccgaaacgctgcttgaaaccgccaaggaaacggcgcgcgcacaggtgaaggccgaagtaatgaagcaggaaaaggcggttcgagaggctgtttctcaggcggtcaaggcgcaggtgctggaaggtgtgcttgcgcagagcggcctgagcatgacggcagaggattacggcaaggcggtcgaagccggtcaggtgacgcacgaacaggcacagcaaatcagcgcgaccgtcgaacagatgatgaacagcgacgacgtcaaggccaagctggaagccgccgttgccgaacagattgacgcgcttgtggagcagaatctggcggacgaatccgttcagaagcagcttgaagaggccattgcgcccgcgaaagccggttatgatgcgctcaattccctcaaaacgcagttggattccgtccatacgtttgtaaccgggctgagcagctacacggatggcgtcagtcaggcggcgcagggagcgactactctgcacgccggcagcacgcagctctccgacggcgcagtgcagctgagcgatggcacagcccagcttgccgacggtcttgacgcgctcaagcagacgttgaatgccgacgttctgccgctgctcaacggcgacgtgcagaaagcgctcgacgtgttcgaaaacaccaagaatcagcttgccgccgaagtcagctttgacctgatcgacgacggcatggcacacgatatggtttacattatccgcacggatctgaacaaataa

SEQ ID NO: 259 - DNA, 2097 bp, Unknown
  Unknown gut bacteria
atgatccgctatctggaaaagcagaatcttctcattttggaaacggaacgaacgtcgtattggatcggccttgcctatcccgcgccggtctgcctgcactggggcaggaagattgcgccggaagacgcggacatgtttgaaccgctcggcgaccacagctcctttgacacggaattgtggcgggagcggatggaatacccggcctttgacgggcggacgtttgaaaacgtatcgctgaaagccgacgcgccgctgaatctgcggacgaaggacgtgcgcgttcagggtcagcaggcggaaatcacgctggcggacgaggtaagcgtcatggaggttcgcctgatataccgcgtgtttgaggattgcgatgtgattcagaagcacgcaaggctgacggcgaacgcgccgatcaggctgacgcgcatggacagcggcgcgtgtctcctgccgcacgaggcgaagccgtggacggcgcactatgtcgtcggcgcgtgggcgggagaattcaggcggcgcacggccaagctggaagaaggagaactgcggctgcaatccgtgcgcggcatgtccggcccgcacatgaacccgttcctcatcgcggcaaacagcgaggacgaggagacgggcgaggcctacggcgtggcgctcgggtggagcggatgctggcagatcacggcatcgtccacggtgtttggcaatcaccgcatcacggcagggctgaacgacgcggatctcgtctgcccgatggagcgcggcgaatgctttgaaacgccgccgatggttttgtgcatgagcgcggaaggcatgggcgcgctgagcagaaggatgcacgatttcgagcgcgaccatctcaaaccgaacaggccgccgcgccgcgtgctctataattcatgggaagcgacgcagttcgacgtgcgggcggacgcgcagatgcggctggcggaacgcgcggcgaggatgggcgtggagcttttcgtggtggacgacggctggtttggcgcgcgccattccgaccgggcggggctgggcgactggacggtcaacccggagaagtttccgaacggtctggaggagctgatcgaccgtgtgcacgcgctgggcatggatttcggcctgtgggtcgaaccggaatcggtcaacccggacagcgatttgtaccgcgcgcacccggattggattcacaaactggacggccgcgaaccgctgactcagagaaaccagtatctgctcgatttcggaaagccggaggttgagcgattcgcgctcgacatgctgcgcggcctgctgaacacatacgcgatccgctatctgaaatgggacatgaatcgcgcgatgaccgacgtatgcgaaagcctgacgcccttcgcgcgggagcggcatgttctggcgctctaccgaatcctggacgcgctggaaaaggagttccccgatgtggatatcgaggcatgcagcggcggcggcgcgcgcgtggatttgggcatggcgaagcgaacggcgcaattctgggtcagcgacaacacggacccgtttgaccggctgttcattcaggaggggtatacgctgatgtatgcgccgatgatgatgagctgctgggtgacggacacgcccgcggacggacggcggcgcgggcgggcggattggcgctataaattccacgcggcgatgtgcggcacgctgggcgtcggcgcggatatatcgaagctgagcgacgaggaaatggcgctgtttacggcggaaatcgcgcggtataagatgtggcggcatgtcgttcaaaacggcgatttgtaccgcttgcagcgcccgtccggcggcaatgtcgcggcgaccgagtacgtttccaaggatcaaaacgaagcggtactctttttgttcatgcacagccgaaagtgcggcgaggtgattccgcgggtgaggcttcgcgccctgagggaggacgctcgatatttctgcatagagacgggcaaaacctatgcgggaaggacgctgatgcatctggggctgagcgcggagctgaacggggattttgacagcggagttttctattttcaggtggtgaaggaaggatatttatggataagcaaacaacaggaattgtga

SEQ ID NO: 260 - DNA, 1425 bp, Unknown
  Unknown gut bacteria
atgctggtgttcctgctcgccgtttcggcttttgcgatggcggaggccgaccccatccgcgtctcctcgctcagcgaaccgcagtccgtcatctccgagcaggacgtctcgatcaccatcaagatttacaacagcagccagacggatatgaccgaggaaatctcgctctatgatccgaccggcggcgtgcccgtgagcacgtataacggcttgcagggcgagcagagcgtgacctataccggcacgtggcacgtgacgcaggaccagatcaaagaaggcaaaatcaagtattacattcagtacagctttgattcgggcaacgggctggataaggttgtccgcgccgtgccggtgaccatccagaccgaggccgccgcgccgcagttgactgcgacgtataccctttcgccgacgagcgcgcgcaaggggcagaaggtcgcggtggaatacaccctctccaacacgggcaacatcgagctgcgcaacatcgccatcagcaacgagggcgtcagcagcaaaaagctgaccgcgccctccctgtccgtcggcgaaaaggtgacgcttcaggatagcttcaccatgggcgacagcgagctggtcagcaagccgaccgtgacctatcaggccagcggcgagagcaagacctacaccatttccgacatggcgcgcaagaccgtgaccttggcgcaggatgggctggaggctgcgctgacgaccgatgcgggcgacaacgtatatcccggcgaaaagatccatctgaagctgagcatcaaaaacacgggcaataacggctacaccggcctgaccgccacgctcagcgacggcaccgtgatggcctccgatatttcgctggccgccggcgcgaatttcgagcagaccatcgagtgggcgcccgcgcagagcggcgcggtcaccgttcaggtggacgggatgagcgacaacggcgaggcggtctccgtcgcctccgaggagctgacgatcaccacgcaggacgcgagccaggcgctcgtgctcgacgtgaccgcgcaggcgcagaccaccaccatttacagcgaaccggcggttgtccgtttcgccgtgcaggtgaagaacatcggccagacggacgcggcgaccctcaccgtgaaggaagccggaacgaccgtcgccaccattccgtcgctgccctccggcgagagccgcacgctcgtgttcgatctggaaacgagcatcgcgggtcagattcagttcgtggtttccggcaaggatgcggcgggcaacgacaaggcatacgattccaacgtcatcgagctggcctatgtcgcgccgacccccgaaccgacggccacgcccgcgccgacggccgtgccgccgacgcccagcccggaaccgacggcgacccccgtgccgaccatcggcgaaatcatcgcccggcgcgtgaacccc

SEQ ID NO: 261 - DNA, 1425 bp, Unknown
  Unknown gut bacteria
aaaaacgtgcctgattttctgagccgcgtcagcgcgtattgggcttctcttccgggaacgcatctgcttgtgttcacgcttgtgatttgggcggccttttcgctggttctgctggccgacgcgcgcaaccagctcaaccagtggtgcttcaccggcggcatgatgttcagcgtcggcgcgctcaaggaatatctgtattacggcctcgccccgtcgctgattgcctccggcatatggacgcaggcgggcgcgtcgctgatgtattccgtcctgagcgcggctttctatttactggccattccctgcgtgatgatgttcgcgttttacttcgcgcagctcaaccaaacccgcttcttcccgctcctgcgcgtcgtcgtctggcttccggccgtctgcctgagcgtccgttttccgcccgatcgggtggcgtcgctccagcgcgacccggtgttctgcctgagcatcgcggggtacaacgtgctgttcggcctcatcgccacgctgatcctgctgcgcgccctctggatggagcgccacggcgggcacaaccggcagcgccgcctcgtggcggtcagcgtgcttctgccgctgtgggtctggctcgtcgcggcgttcccctatcacgcgctgggcatcccccatctggataaaatctggcagatcgagctgccggtcgtcctgtttacgctgtgcttcctcctctatcatgcgtttcgcgagggcatatggggcatgcgtctccggcgcgaaacctacgattggagcgggagcggcgaggtgttgcagcgcaacacacagtacgtcgcccacgcgctcaaaaacgacctcaacaagatcgactggtgcgcggcgctgctggatgaacggctccccgaaaaccgcgagctgcaaatcatccgcggctcggtcgatcatctgcgcgcgctcctccagcgaacgaggatgcacaccggccgcgtggttctcaaccccggcgactgcgacgtccgcgcgctgttcgagcagatcatccgcgaaacgccgcacaccgacgcgctgcgcatcgaaatcgaccgctgcgacgacgcgccgctgtactgcgatccgtcgcacgtccgcgaggcgctgaccaacctcgtcggcaacgctgttgaagccatgcgcggctccggccggatcacgctttcctatgtccgcaccgcgcacaaagcctccgtctccgtctgcgacgacggcccaggcatgaccccggcagcgcagaagcgcatcttcgagccgtattacaccaccaaaacctccggcgaaaatttcggtctggggctgtattactgccaaaacgtgatgaacgtacacgagggcagcatccgcgtcagcagcgcgcctggaaagggctgcacctttaccctgatttttccgctggccgcacaagggaggcgcaaaccgtga

SEQ ID NO: 262 - DNA, 1776 bp, Unknown
  Unknown gut bacteria
atgatttacggcaataaagagggtatacgcgattcgatgctggctaagctggaaacgctgtacgatatcgaaattccgacagaggtcttcgccccggcggagctgctcgatgcgctggcggcgttttcctgcgcaatcaaccgggaaatcagcatgtatatctcgcgcagcggcgaagtgctggatatcaccatcggcggaatcagcagcgtcgatttgaaggatatgcatttgcgccgcaacacaaagcgcctgagcatggtgcgctgcatccatacgcatccgggcggaaatccgcagctttccgatgtggatatcagctctctgcgcgccatgcgttttgacgcaatggctgccgtcggcgcaaaggacggctatgcaaccggcatacagtcggctttcctcggttcatacgtcggcggcgtcaatcaggttcacctgacgaatatcgtgtcgatccataagctgccgcagcgcgcgtggatggatgcgattgagcgtgcggacgacgaggtgctgatcggtgcgccgaacagcacgcaggaggagcaggaacgcgcttttctggtggggctggacagcgacgaatcgctgctggagcttgcgcggctggccgaaaccgccggcgctcaggttgtcggaaccatgctccagcgcaaaacgcgcccggacacggccacctatatcggaagcggcaaggcggacgaactctctctggcgtgtcaggccagagacgcggacgttgtgatctttgacgacgagctatccggcgtgcagacgcgaaatctcgaagatattttgcgcggcgcaaaggtcatcgaccgaacgacgctgattctggatatttttgcgcagcgggcgcagtcccgcgaggggcgcttgcaggttgaactggcgcagatggcgtatcagcttccgcgcctgctcggtcacggcgtggccatgtcccgcttgggcggcggtatcggcacgcgcggcccgggcgaaacgcggctggaaatggacaggcggcgcatccgcagacggatgagcgacctgcgccgggaaattgatgaactgagcggccagcgcagtctccggcgcgcccgaagagagaaaaacaaggtgccggttgtggcgctggtcggctacaccaacgccggaaaatcgaccctgctcaatacgctgagcggcgcggacgtgctggcggaggataagctgttcgccacgctcgatccggtggttcgcacggtcaaaacgcctgtcggcggcgagtttttgctggttgataccgttggtttcatcagcaagctgccgcatgcgctggtcgatgcgtttcattcgacgctggaagaggcgttgctggccgatgtgctgctgatcgtttccgacggcgcatccggcgagatgatccgccagcacgacgtcgtgctcgaagtgctctcgtccctcggcgcggcggataaaccgatgatcgacgtcatcaacaaggccgatctgcccggcgttacggcaaacgaatggcccggcgcgattgcaatcagcgccaagaagggcgaagggctggacgcgctgctggaagccatccgcctcaaactgcgcggcgcggcaaggccgatgcgcgcggtgattccctatgcgcagggcggcctgctggcgaaaatacacgccgacgggcaggtgctcggcgaggaatatacggcggaaggcatcgacgtgacggcgttggccgacgagcagctcttcggccgtctggccgcgcagctgggcgaacaggccgtcacgtggcaggactaa

SEQ ID NO: 263 - DNA, 1050 bp, Unknown
  Unknown gut bacteria
atgaaacgaaaaacttgggcgcttgcgagccttgcgcttctgctcgccgcaatcgccgccatctgcctgacggtgatcgtcattgatccgtttcaggtgtatcgtccggcgacgcgctatctgccgccgattgatagaaccacgcaggtctacgccaacgcgggcgttgcgcgcagctacgcatacgacagcgccgttgtcggcacatccgtgaccgagaatttccggccgtcgcagatggattcgctgctcggcggccgctttatcaagctgtgcacctccgccggaacggcctataaccacgcgctgctgatggatttggccttccgcacgcacgacatgcgccgcatcgtctacgggctggacgtctattccttcatcgcccggctcgaccagaccggcagcgacgtgccgctgtatctctatgacgacagcctcctcaacgacgtatcctattggctcaaccgcagcgtgctggccacgttcctgccgcgctgcctgagcgcatgggggcagaagcaggacgattccatccgcgacagcatgtattgctgggcggggcaggatgaatacggctccgtcgcgctgtataccgcccgcttcaccgcgccggaaaatccgctgcccgcggacgcttacatccggcaggcgcaggccaatctggacgcgcatctgcttccctacgtcgccgcgcacccggaaacgcagttcgatatcttttttccgccgtattccgccgccgagtgggcgacgatggaaagcaagggcacgctcgagagcatgctcgccctgcgttcgctctgttacgacgcgctgagcggctttgcgaacgtgacgatttacgatttcaccacgcgcgcggattgggtgctcgacctgaacaactacaaggacgcgctgcactacggccagtggatcaacgacgcgatcaccgaatgtatcgcgcgcggcgaaaacgtcgttgccgaccgcgaaacgctggacgcagcgacggcgcagcttcgcacatgggccgacgcgcagattgaggcgggcggctggatattctga

SEQ ID NO: 264 - DNA, 1584 bp, Unknown
  Unknown gut bacteria
atggtggttgaccgcgagcaggagatcgagcagtttgagccggaggaatactggtttgtggacgcggagctgcgcgcgggcggcaaacagctccatgcgcggctgatcgcgctggacggcgagcgcgtgagcctttccgatcaggcgcaggcggacgcggcgaaggcgcgcgtggaacagggcggctttgtcatccgcagcgtgaagcgcggcgaaaagcgcaagcatcccgccccgccgttcacgacctccaatttgcagcaggaggccagccgaaagctcggcttcaccacggccaagacgatgcagatcgcccagcagctctacgagggcgtggacatcgaggggagcggcacgctgggcctgatttcctacatccgtaccgacagcgtccgcctgagcgacgaggcggtggccgccgcgcgcgaggcgattgcggcgcgttacggcgcggaatatgtgccggagaagccgaacgtctacaaggggcgcaagagcgcgcaggacgcgcacgaggccatccgtccggcgaacatcgacctgcggccggaggagatcaaggcctcgctgaccaaggatcagtttaacctgtacaagctggtgtatctgcgctttgtcgcctgccagatggcggacgcgctgtatgaaacccagcagattgaaatcgcctccgagagcggcgcggttctgcgttcgagcgccgagcggctgaaattcgcgggcttcacggcggtgtatgaagagggcacggacgacgcgcccgcgcaggacgaggcgcaggccggcgcgatggcggacgtgaacgagggcgacaaggcggagctgctgggcgacgaggccacgcagcacttcacgcaggcgccgccgcgctacacggaggcctcgctggtgcgcgcgctggaggaaaagggcatcggccgcccgtccacctacgcgccgacgatctccaccattttggcgcgcgggtacgtcatgcgcgaaaagaagcagctcttcccgactgagctgggcattatgattaccaacatgatggaggagtatttcgcggatatcgtggatatcgccttcaccgccggcatggaggagcagcttgacgaggtggaagagggcaagctggattggcacaaggtgctttccgatttctacggcccgtttgaaaagacgctggaaaacgcggaggccaagatcgaaaaggtcgaaatcaaggacgaggtttcggatgtgccgtgcgacaagtgcggcgcgatgatggtctacaagctggggcgctacggccggtttttggcctgcccgaacttcccggactgccgcaacacgaaggcgattcagattgaaatcgacgcgccctgcccgaagtgcggcggcaagctcttgcagaagacctcgcgcaagggacgcaagttctacggctgcgagcgctacccggaatgtgatttcgtttcctgggagatgccggttcgggagaagtgcccgaagtgcggaagctacatgacgctttcccgcacgaaaaagggcgatttctacgtctgtgcgaacgaaacctgccgcgagcgcattcccgcgccgcaggaagagaacgaatga

SEQ ID NO: 265 - DNA, 2151 bp, Unknown
  Unknown gut bacteria
atggaaattctgctggcgctggcgctgctgggcgtcgtgtttctgacggcggcccattcggacacggtttccgcgcggcagcagatggcgacgaccattcgatacatccaggaacaatgcaaccgctacaaccgcattgagctggccggcgagaccaagagcctgatgcgcgtgatggagagcgtcggccatattgcccgtcagatggcggcggacggcgaagaaagcgcgccgctttcggagtatgcgcagatgggatatgtctccgggctgattgtgatggatgagacggggttcgttctgtcggattatcacgggacgggcgaagcgccccggcagcttggcgaatatctggattcccccgcgctgctggacgcggcgctttaccccgaaaagcgctacgccacgcgctttgtctgcgcggacgggagcatgattgatctggccgccgtcgggcggcgggatgcgccgggcatcgtcgcggcgtattaccgaacgccggtggaatatctcgatgcgtttcggctgtccatcgcgctgatgctttcggggtacagcccggaaacgagcggcacgattgtcgtcaccggcggcagcagggtcgtggccagcaacgacgagacgctcatcggcggcaacgcggaggaaatggcgattctgcggcagattcgtcaggcgtacagcagcggtgagctggtgcgcgcgagctggccggaggattcttttcggcggtattacggcatgatggggtgcgggcggaatttttacgtctatgtgtatatgccggaaaagacggtgtttgcaacgaccccgcagagcatgctgttcgcgctgattttctatgccgtcgtcctcgcgttcgccaaggcggttcgctttcggacggcgcagagctatcaggagcggcagtatcgcgtgcagaaggaatacgcggagaagctgcgcgccgcgaacgccgagctgagcgccgccgtggatcaggcggatcgcgccaacgcggccaagaccagcttcctttcccgcatgagccacgacattcgaacgccgctgaacgggatcatcggtctgctgcaaatcgacgacgcgcacccgagcgacgtcgcgctgctgaccgcgaaccgggagaagatgaaggtggcggccaaccatctgctcagcctcatcaacgatgtgctgcaaatgagcaagctggaaagcggcgaaatcacgctggcgcacgagccgctcgatttgaaccgccttttgcgcgatattctgaccatcgtggagcagcgcgccgccgaggcgggcgttgcgcttgaatatgacaggcggcaattcgagcggatgaagcccgactgcgtatacgggagcccgctgcacctgcggcaggtgtttttgaacgtctacggcaactgcatcaaatacaacaaggtcggcggcagcgtgacgacgctttgccagaacgtcggcgagagggatggaatcgtcacctatcgctgggtgatccgcgacacgggcatcggcatgagccgggcgtttttggcgcacatctttgacccgttcgcgcaggagcacaccgacgcgcggagcgtctatcacgggacggggctgggcatggccatcgtcaagagcctgattgacaagatgggcggcagcatcgaggtgagcagccgggagggcgagggttcggaatttgtgattaccctgccctttgaaatcgccgaggaattgcccgaaccgcagcaggcggcatgggagacggagacggcggatgtgcgcggcctgcgcatcctgctggccgaggacaacgcgctgaacgccgaaatcgtcaaaaagctgctggcggatcgcggggcggaggtcgaggccacgccggacgggcggcaggcgctggaggcgtttgaaagccacaagccgggcacctacgccgccatcctgatggatgtgatgatgcccaacatggacgggctcgacgcgacgcgggcgattcgcgcgctggatcgtgcggacgcgaaggtcatccccatcatcgcgatgaccgccaacgcctttgaggaggacgcgcgcaagtgcatggaggcgggcatgaacgcgcatctgcccaagccgattcgaatcgagcggctcgtcgccgtgattgcggggttctgcggcgcgcgtcaggcctga

SEQ ID NO: 266 - DNA, 1761 bp, Unknown
  Unknown gut bacteria
atggacatgacgacagagatgacgaccgaagaaaaaaagctgccgggctatctgctggatgcgccgaaaaacggccatatctacggaacgctttcctataacaggcggagcaaatgctggacgatcaagggcgagccgtgcgtgacggagatggcggcgcggctgtttccgggcagtcagcggcggcggggagaagcgcgattcacggcgaaccggcgaatcatcggcgatgtgaactggctgatgctgcgctatccgctggaaatcgcgccgagagaccgcgcgctctgggagaacgcgctgatgcaggcgcgggaacacgcgattcagcgcgcgcaggccgaaaaactgccccgaaggagcgcaccgccggaggggacgttcgagggggagctgcgggaattccagaaggatgggctttccttcctgctggcgaatccgcggacgctgctggcggatgaaatgggtctgggcaagacggtgcaggcgctggcctgtctggcggcgacaggggcgtttccggcgctgatcgtcgtgccgccgcatcttctgcgcaactggcaggcggaggccgcgcgcttcctgcgcatcaagggaaggccgccgcgcgtctgtgtgctcacgggcttgaagccgtatcagcccccggaggcagacgtttacatcattcactatctgctgctgcgcggctggaagcaggcgctgccgcagatggggttcagcgcggtgatctttgacgaaatacaggagcttcgccacggcggcacggagaaatattcggcggccagcctgctggcggaaggctgcgaacgggtgatcggcctttccggcacgccgatttacaacaaggggtcggaaatttggaatgtggtcaacatccttgacttccattgtctcggcgattgggagagcttcacgcgcgcgtggtgcgacggatatgggaatcatctggtgcgcgacccggcgctgctgggagaccacctgaggcgggaagggctgattctgcgccgaaccaagcaggaggtgctgaccgaactgccgcccaagcggcggctggtgcaggagattgacgcggacgaccgcgtgtatcgggagctgatgcgcccggtgatcgagctgctgggcagcctgcgtgcgctgcacccggaagcgaaggagcgcgccatgctggaggagcaggtcggccggggcgaacggcaggccacgggcgtggccaaggcgccgttcgtcgcggcgtttgtgcgcgcgctgctggataacggagagaaggtgctgctgtttgcgcaccaccacgcggtaatggatgtctataagaaggaactggcgagttaccgcccggcgtttatcacggggcgagagacgacacagcagaaggacgacgcggtgacgcggttcatgggggagaagacgaacctctgcgtgatttctttgcgcgcggcctctgggctgaacctgcaaagggcgagctgcgtggtcttcggcgaactggattggtcgcccgcggtgcacagccaagccgaggacagggcgcaccgcatggggcagaaggattcgattctctgctattatctcgttgcgccgcagggatcggacagggatatgcaggatgcgctggggctcaaggtgagtcagttcgtcgcgctgatgggcgacaaaacgccggcgttgagcggtgtgcaggacgctcagcaggcggcgaaggcgcatatcgaaaagatgctgaaacagtatgacgcagcgcaaacaaatgatcgggtttga

SEQ ID NO: 267 - DNA, 990 bp, Unknown
  Unknown gut bacteria
atggtcaacgaagcggatgtgcggctgttttcccacaagtgcaaagcgatttttgagcaggtggggcgcgatatcatcggtcaggaggatatcgtggagctgacggtgatcgcgatgatcgcgggcggcaacgtgctgctggagggcgtgccgggaatcggcaaaacacgtctgatccgttcgctgggtcgcgtgttttccctgcccttctcccggattcagttcacgccggatctcatgcccgccgacatcaccggcaccaacgtgctggagaaggatgagaagggcaacgcggtatacacgttccgccccggcccgattttcagccacatcgtgctggcggacgaaatcaaccgcgccacgccgaaatcccagagcgcgctgctggaagccatgcaggagcatacggtgacggtggacggcaaggactatcgcatggaggagccgtttttcgtgctggcgacgcagaacccgatcgagcaggagggcacctatgccctgccggaggcacaggtggaccgcttcatgttcaagctgctgatgcgctacccgacggtggaggagatgaagcagatcgttctgatgacgcagaagaccatggacgaggtcgcagacggcgtggtggacggcgaaacgctgctgcgcatgcgcgagaccgccaaggaaatccccgtcacggacgacatcatcaactacacgatgcgtctggtttcctcgacgcagccctcctcgccggaggcgggcgagaccgccgcgcggatgatccgtttgggcgcgagcccgcgcgccgcgcaggcgctcattacctgcgcgaaggtgcgcgccatggtatccggccgcttcaacgtcagccacgaggacatcgacgcgctggcctgcccggtgctgcgtcaccgcgtgaagctcagctatgaggcgatggccgagcgcgtcacgccggacgaggtcatcgccaggctcgtggacgacatgaagaaaaagcgcagataa

SEQ ID NO: 268 - DNA, 1479 bp, Unknown
  Unknown gut bacteria
ttgccccaacgcctgtttgcgctgctgctgtgcgcagcgcttttgatatccgccgttccgcccgcgctggctgaggatcagcccatcgaggcggagcgcttcgtcgccccgacgctcccgccggacgccatcgcatgggataagaaccatccggatattctcgacgaagatatgctctatgcgcacagcgccattttgatcgaggcggacaccggcgaggtgctctttgaaaagaacgcggacgagatcatgttccccgcgtccacgacgaagattatgaccgcctacatcgccctgcaaatgtccgatctggaaaacgacgtggtcacggtgtcgcaaaacgccattgatctcgttccgccgacctaccagaccatcccgctcatcgccggggaacaggtgccgatgctcgacctgatttcggtcatgctgatccgttcgggcaacgaggccgccaacgccgtcgcggaatatctcgccgggagcgtcgagagctttgccgacctgatgaaccagacggcgcagatgctcggctgctcgccgaatacacatttcgccaacccgtccggcgtgcacgacgaaaaccactacaccaccgcgcgcgatctggcggtcatcgcgcaggcctgcatgaaggacgagcgcttcgcctcgatcgtctcccagacctcctacgacatgcccgccacgcagacggagagcggcgcggcgggtcacccccggcgcaccatcgtcggcagtacggcgatcctcaaccccgaaaacgaaacctcctattatcgctacgccaccggcgtcaaaacgggctacacgctcgccgccggctattgcttcgtcggctcggcgacaaagggcggcatcgacctgatttccgtggtgctctacgacggcgatacccgccgctacgaggacaccaagcgcctgttcgaatacggcttcacgcagatcgaatccatcacgccggaatcgctctacgccgaggatccgcgcgtgatcgacgtcaccggctttgacaccagcgacgcccagcacggcgaattgacgctgggcatccgcgccgtggacgaaggcaaggacatgaccatcgtcggccggaaggacaacattgatttcctccgcgaaaacttcggtcaggtttcctcgatccgctggacgcgcgaattccgcgccccgatcaacgtcggcgacgtgatgggcattctcacgttctattccgaaaacaagggcgtcgccgaatacgagctggtcgccacgcgctccatcgccgcccgcgccgacgcgccgctgacgctggagcagatcgaggcctacaccgcgcaggatgaaagcccgtggccgcgcttctcgtgggatttgctcgtgccgccggggctgattctcctcgcgctgatctggctgattcgcttcatccgccgtcaccgcaaaaagcgcatcaaggcgccgaagatcaagccgattaaaaagaaatatctgcggtaa

SEQ ID NO: 269 - DNA, 1545 bp, Unknown
  Unknown gut bacteria
atgaaatcggagcggcatttggatgtacggagaaaacacatgaagcgaatcctgacattttttattttcatgttgctggcgatggggccgggggcggcgggcgcgcagaccgtcgtgatggacgaggggcacgtcgcctttgattacccggatagctggctggtcgtttcgccccagctctgcggcgtgtacgcgccgctgctggaggacgcggggcttgacgcggacgagctggcgcgggagcttgagcagacgcgcacgctcagccgcgcatacaacgagaattacacgcagtatctgtccgtgctgatcggcgaggacgaactttcgcaggaaatctacgaaatcgaaaacgcgacggacagccagcgcgcgacgctgcgccgccgcgtggaggccaacagcttctgggagacgaccggccttcggacgcaggacgcggaatggcagaaggaagacggcggctattggctctacgcgcattacaccgtcacgcgggcgggcgaaacggtggggcgcgggctgcggtacctcaccgttcgcaacgggctgtatgtggagatggattggcgaatcgcgagcgggcgcttctccgggcgggatctgaacgccttccgcgcgcggctggcggatctggtcgtcacggagcaaatcgccgagccggtgcgcgacgtgaagctggaggcgcagatccccgccgagacctccaaggcgcaggtggagatcacgggaacggcgaccgctggcgcgacggtgatcgccgaaacgccggacggcaacggcgcgatgctgacgctggacgcggcgacggcggaggcgaagggaaaattcacgctgacgattgagcttgaaaaagaaggccattatgacgttacgctgacggcctccaaagagggtatgaacgacgcgacgctctcgggcgaaattgcttacagcgccaagacgctgcccgtctccggcgtggaggagagcctgtttgtcaccggcgacacgacgacgatcgccggtacgacgctggcgggcgttcagctccagcttgtgacgcccttcggcgtgagcaaaaagcgatccggcaacgacggcgcgttttccttcgagctgacgacgaaggacgcgggcgaatacaaatatacgctcattttggataagagcggctacaaacagcggcgtgtgcccttcaccgtgacccgaatcatcacggacgatcaggagcaggaaaaaatccgccagtccgccgtgaagatctcctataaggatctgcagaaggacaaggaggagaatcagggcaaggtgatgcggctgtacggcccggtgagcgaggtcagcagcagcgcgagcgtgtactatgtgcgcctgcaatacaacaaggacgcaaagggcaagtggtacaacgacgtggtgatcgtctgcgacgcggacacgggcgcgaaggttggcgacatgatgaccgccgtggtgacggtggacggcgtatacgacgagcaggatgcgagcggaaacgacgtggcggtgccgcggtttaatctgctgtttgtggacaagatc

SEQ ID NO: 270 - DNA, 1770 bp, Unknown
  Unknown gut bacteria
atgatcagaaagacgaaaatcgtgtgtacgctcggcccggccagcgacagcgaggagatgatctccaagctgatggacgcgggcatgaacgtatgccgcctgaatatgtcccacggctcctacgaggagcagggcgcgcgcatcgaccgcatcaagcgcctgcgccgggagaagaacatcccggtcgccatcatgctggataccaagggcccggaggtgcgcaccaagacgctcaaggctgacaaggtgaccctgcaggcggggcaggagttcatcctgaccagccgcgacatcgagggcgacgaaacgcaggtcgccatcacctatccgcggatggttgagctggtgcaccccggcaaccgaatcctgatcgacgacggcctgatcgcgctggacgtcaagcagatcacgggcggcacggacatcgtgtgcagcgtggtcaacggcggcgtgctcggcggccgcaagggcatttccgtgccggacgtcgatttgcagatgccctccatcggcgaaaaggatcgcagcgacatcgtcttcggcattgagaagggcatcgacctgatcgccgcgtccttcgtctgccgccccagcgacgtgctgaccctccgcaagctctgcgccgacaacggcggcagccatgtgcagatcttctccaagatcgaaaaccgcatgggcgtgaacaacttcgacgaaatcctcaaggtttctgacggcatcatggtcgcgcgcggcgatttgggcgtggaagtcgatatggaagaagtgccggtgctccagaagcagttcatccacaagtgcaacgtggcggcgaagccggttatcaccgcgacgcagatgctcgattccatgatccgtaacccgcgcccgacccgcgcggaggccagcgacgtggcgaacgccatcatcgacggcacggacgcgatcatgctctccggcgagacggccgcgggcaaatacccgattgaggccgtcggcacgatggtgcgcatcgcgacctatatcgaggcgcatcagatgcacgacaacacccagcttctccagcaggaggccgtccgcaacgcgacggttcgcacggtggccaacgccgtatcctattcctgctgccagatggcgcgcgacctcaacgcgaacgcgatcatcaccccgagcaactccggcacgacggcgcgcatggtcgcccgcttccgcccggattgcccgatcatcgccccgaccccgagcgagcacgcatacaaccagctcggcctgagctacggcgttgtgcccgcgcacatgggcgtgagcggcgacacggacgagctcatcaacaccgccgtcgaagcggcgcagcagagcgggctggtcaagaccggcgacgtggtcatcatctccgcgggcgtgccgaccggcgtttccggcacgaccaacctcatcaaggcgcacatcgtcggcaacgtgctcctgcgcggcgaaggcgtgggcagcggctgtgcgagcggcaacgtctgcaccgtcaacacgctcagcgatttggagagcgactttaaggatggcaacgtcatcgtcaccaaaatgaccaccagcgagatgctgccctatatgcgccgcgcgagcgccgtcgtcgtggagagcaccaacccggagtgccacgcggctgtggcctgccaggcgatgggcatcccgctgatgatggatcgttcctatcaggcggtgcacatgctcaagagcggcatgatgattaccgttgacgcgaacgagggcttcatctataacggcattaaggcgtaa

SEQ ID NO: 271 - DNA, 2064 bp, Unknown
  Unknown gut bacteria
atgaatgacgtttttatgaaccgggagctttcctggctcaagttcaacgagcgagtgcttgaagaggcggaggatgaacgcaccccgctttgcgaacggctctccttcgcatccatctatcagagcaacctcgacgaatttttcatggtgcgcgtgggttcgctggtggatcaggacgatgttacgcccaagctgcgcgaaaacaagaccaacatgaccgcgcgggagcagatcgaagcggtgatcgaccgcgtgcgcgaattgaacgggcggcgggacaaggtctatgcccgcctgatggaaaagctggaggagcagggcgttcggctggtcgatttcagaaaaatcggccggcaggagagcgagcggctcgaacgctattttgattcggagatcgcgccgctgatttcgccctccatcgtcggccgccgtcagccgttcccgttcctgcgcaacaaggatatctacgccgtggtcgtgctggagggaaagaagggcaagtataagctggggatcattccctgcagcgcgggcgttttcccgcggctgatcgaggtttccgccagcgaaaagacgtacatgctcgccgaggatctgattctgcatttcattccgaaggtgtttgagggctacgtcgtcaaggccaagagcctgatgcgcgtgacgcgcaacgcggatatcgacgcggacgcgctctatgacgacgatctggattaccgcgagttcatggtgcagttgattaagcgccgcaagcgccttgcgccggtgcggctggagctttcccgcgagctggacggcatcatcgtcgatacgctgtgccgctatatggatgtgccgcgcgaatacgtgtttatgagcgccacgccgctggatttctcgttcctctttgggctggaggatgtgctgcgccagcgcggcgagctgttctacgagcggcggattccgcagaaatccccggcgtttgtcaacggccggtcgattttggcgcagattcgcgaaaaggacaagctgctttcctatccttacgagagcatgaagccgttcctcgaaatactgacggaagccgccaacgacgacagcgtggtttccatcaagatgacgctgtaccgcgtcgccaagcagagcaaggtcgtcgaggcgctctgcgaggcggcggaaaacggcaaggacgtgctggtgctggtcgagctgaaggcgcgctttgacgaggaaaacaacatcgagtggagccgtcggctggaagaagcgggctgcagcgtgatctacgggctggacgggtacaaggtgcattccaagctctgcctgattacgcggatggaggaaacgggtgtcgcctattacacgcagatcggcacgggcaactacaacgaaaagaccgcgcggctgtataccgacctgtgcctgatgaccgccgaccacgacatcggcgaggaggccaacgccgtgttcaatgcgctggcgaagggcgaaaccgtgcacgagacgcgccgcctgctcgtcgcgccgcactgcctgcaaaacaaggtgctcgcgatgatgaatgacgaaattcgccgcgcctgcgcgggggaggacgcttacatcggcgtgaagatcaactcgctgacggacaaggcgctgatcgacaagctgatcgaggcctcctgcgcgggggtgaaggttgatctcgtcgtgcgcggcatctgctgcctgattgcgggcgtgccgggggcgacggaaaacattcgcgtcgtcagcatcgtcgggcgtttcctcgaacactcgcgcatctatatcttcggccgcggggagcgcgcgcgggtctatatcgcctcggcggattttatgacgcgcaacacgctgcgccgcgtggaggtcgcctcgcccgtgtatgatccggatatccgcgcgcggattctggatatgttcgacacgatgctccgcgacaatgtgcaggcgcgcgagatgggtgcggacgggctgtatcgccgcctgacgccgggggagaacgcgcccctcaacagtcaggaatattttttcaggcaggcctatgaagccgtcagccggggaaaccagacggaataa

SEQ ID NO: 272 - DNA, 1383 bp, Unknown
  Unknown gut bacteria
atgacgctgatgctgtttgccgctttggcggtttatatgcgcgcgcggctggaatacgcgggcacatgggggcagacgctgagccttgcggcgctgtttacgcttgtcgcgggcggcgcgatggcgcttgtcgcgcggctgcaaaagcccgagcgcggcgcgctgctgctgagctgcacggtgatcgcgctgacgatgctggcgcgggtcagcatgctcgactatcagacggcggattacaacgcttttttgagcggctgggtgaaggtgttccgcgagggcggcttttacacgctgggcgaaaacgtcggcgattacaacctgctgtaccagtatgtgatgctgatgatcgccaaaacgccgctgcacgacctgtatctgattaaattcttcacggtgatctttgactatgccctcgcgctggcgatgatgcaggcggcggggcatttcgccgggaaaaaggctgcgctgccggtgatgctgatcgtctgcgccctgcccacgacgctgatcgacggcgcgtgctgggggcagtgcgacacggtgtacgtgtttttaatcgttatgagcctgtactggatgaagacaaagaagcccgtcggcgcggcggtcatgctttcgctggcgttcgcgttcaagctgcaaaccatcttctttttcccggtcgtgctgctggcactgattcacggggaatacaagccgaggcacgcgctggtcttcgcggcgacgtatctggtgacgatgctcccggcgctgatcgccggacgctcgtttgcggacgccgtgagcgtgtacgccaatcagtcgatggggcagtattacgagcggctcttttacaacgcgccgaacctctatacgttcttcccgctgcgcgaatctgccaatcggcaggaatttacgtggctgcgctatctgtccggcatcgacggcgaggcgaccaacgcgtacatcgatcaggcgctcacgccgacgtaccagaacgcggcgctctacgcctgtattctgctgacgctgctggtcgtcgtctactggctgatacacgcgaaggaaatcacgccggagatgacgctggatttcgcgctgttcttcgcgatttttctgccgtttgtgatgccgaaaatgcacgaccgctatttcttcctggcggatatgctctccgtgctctacgccgcccgctatcgggacaggcggttcatgccgctgctggtggtcagcgcctcgctgatgagctatatgccctttatcacccgccagcgcccggcagacatgcggattctggcgctgatgatgctggcggcgctggtcgtcatctcgcgggatgtgctccgcaagatgcgcaaaaaccgcgcggcgctggcgatgaagggaggcgaggccgcatga

SEQ ID NO: 273 - DNA, 1563 bp, Unknown
  Unknown gut bacteria
atgaaaaacgcagttggacgcgatatcccggaggcgctccttgtgaacggcaaggaggtctatcagggcaaaaattacatggacggcaagtatttgcagaaagccgccccctgcacccgccgctatgagcgcccgcaggagagcaagattgtagagacgctggccgacgcgctgcgccagtgcggcgcgaaggacggcatgaccttctcgttccaccaccacctgcgcaacggcgactatgtggtgaacatggtcatgaaggccgcgattgaggagctggggctcaaggatctgaccatcgccgccacgtctctgggcgaggcgcacgacccgattgccgaatacatcgaggagggcaaggtcgtcggcatccagaccagcggtattcgcggcagaatgggtcaggttgtctccgagggcaagctcaagaccccggccatcatccgcagccacggcggccgtccgcgcgcgattgaggcgggcgaggtgcatatcgacatcgcctttgtggccgcgccgacgagcgactgcgtgggcaactgccgcggcatcggcggcaagagcaactgcggctcgatgggctacgccatgacggacgccaaatacgcggatcacgtggtcgtcgtcaccgattgtctggtggatttcccgaacatgccggcctctgtcgaggcgattgacgtggatgcggtcgtagtcgtcgattctatcggcaacccgaagaagatcgcttccgcggcggcgcgcatcagccagaacccgcgcgatttgatgatggcggagaacgtggcgaaggtcatcgcctccacgccgtatttcaaggatggattctccttccagaccggcgtcggcggcccgagcctcgcggcgaacctcttcctggaaaaatacatggacgagcgcggcatcaagatgggctgggccatcggcggcatttgcggcccgatggtggagctgctcaagaagggcaaggtcggcaaggtcatcgacgtgcaggactttgacctcgacgcggtcaattccatcaaccagaccccgaatcactttgaaatgagcgccagccagtatgccaacccggcgaacaagggcgcgtttgtcaataagctggatttcgtcgtcctcgcggcgctcgaaatcgacaccaaattcaacgtcaacgtgctcacgggctcggacggcgtgcttcgcggcgcgccgggcggacacccggatacggcggcgggcagcaaggtctgcgtcatcgtgaccccgctggtgcgcggccgcatggcgacggtctgcgaggacgttgtgaccgtcacgacgccgggcgactgcgtggacgtgctggtgacggattacggcattgcggtcaacccgctgcgccccgacctcgtcaagtgcctcgacgatgcgggaatcccgcacgtttccatcgaatcgctcaaggagaaggcctacagcattgtcggccgtccggacgcggttcagtttgaagacaaggttgtcgccgtgctcgaggcgcgcgacggcaccatcctcgacgttgtgcgccagatcaagccgtacaccttcgaggactaa

SEQ ID NO: 274 - DNA, 1797 bp, Unknown
  Unknown gut bacteria
atggaaggaaagcaaaaaagggagagctttcgcaaaaaggcggggctgctggcgcaccatctgaggccggcagcctccgcgtttgcgctgggcatcggcgcgtcactggcggccacgctgctgcgaacgctttttacacagatcattcgttttaccgtcgatcacgcgctgctgggggagacggacgggcttccggcgttcctgctggatgcgcccgccgggcgaatcctcgtctggtgcgcggcggccgcggcgacggtcgcgctgctggaattcggcgcgggctttgtgcaggattccaacctgcccaaggggtcggaacggtttgtgaagtcgctgcgcgacgcgctctacggccacattcagcggctgccgtatagctggcatgtgcaaaacccgaccggcgacatcatccagcgctgcacatccgacgtggaggttgtccgcaattttatcgccgagcagatggtcgagctgctgagcacgacgttcctgattgcggtctacatgatcgccatgtttgcgatgaacgtcaaaatctcgctgttcgtgttcgcgttcatcccggtgatcgtcggctattcgctggtcttctacaagcgcatttcgaagggctatcagaaggcggacgaggcggagggcgagctctccagcgcggtgcaggagaacatcaccggcgtgcgcgtggtgcgcgcctttggccgcgaacgcgacgagctggaaaaatttcagcggaagaacaacaattacgccaatatctggatgaagctcggcgacatgatgacggtgttctggtcgctgggcgacgtgatgagcatggcgcaggtcttcggcgtgatcgccatcggcgtgcagctctgcgtgaagggcgaaatcacgctgggcacctacctggcgttcgtcagctacacgcgccaactgacgtggcctgtccgcgcgctggggcgcacgctgtcggagatgagcaaggcgggcgtttccatcgaccgtctgctctatatcctgggcgcggagccggaaaaaggcccggaagcgccggcggcggcgaacctctccggcgatatccgctttgagcacgtgagcttcgcctatgcgcagaagaaggtgctcgacgacgtgagcttcaccgtcaagggcggctcgacgctcggcgtgttcggcgaaacgggaagcggaaagagcacgattgcgctgctgctggcgcggctttacgaccccggcgagggcagaatcaccatcggcggcgtggacgtaaaggacatgaacccgagcgagctgcggcgcggcgtgggcgttgtgctgcaggagccgtttctgttttccagaacggtcgcgcagaatatcgccatcacccgcgaaaacgtcagccgggatgaaatcgagcaggcggcgcgggaagcctgcctgcacgatgccatcggcagctttcaggccggatatgaaacggtggtcggcgagcgcggcgtaacgctctccggcggacaaaagcagcgaaccgccatcgcgcggacgctgctggagcacgcgccgatcatggtgtttgacgacgcgctctccgccgtggacgcgaagaccgacgaggccatccgcggcaggctgcgcgaggcggcgggtggctcgacgatgattttgatcgcgcaccgcgtcgcaacgctgatgcaggccgaccagatcatcgtgctcagggacgggcgcatcgtcgagcagggcgcgccggaggcgctcctggcgcagggcggcctgttcgcgcggacggcgcggatgcaatccgccgagggagagggggaagccgaatga

SEQ ID NO: 275 - DNA, 1149 bp, Unknown
  Unknown gut bacteria
atggataagctcctgattcaaaatgcgcgcgtttatcagaacgggcagttcgtgcgcgccgacgtgctttgcggggacgcgctgattgcgaagatcggcgaaaacctgaccgatgaggaagcgcgcgtcattcaggcggacggcctgcgccttgtgccggggttcatcgacgtgcacacgcatggcgcggcgggcgtggacgtgaacgcggcggacgaggcggggctgcgcaggattgcggcgttcttcgcgacgcagggcgtgacggcgttcaacgcgagcgtgttgaccgatacgccggagaccaccgaaaaatgcctcggcgcgattgccaatgtgatgagcgaccggggcatgggcgcgcagctcttgggcgcgcatctggaagggccgttcctcgcgaaggaatacaagggcgccatgccggaagcgctgctgcgcgagggcgacgagaagctgctgcgcgcgtatcagaaccggtttccgggcgtgatccgctacatcaccgtgtcgccggaagtgcccggcgtggtggacatgatcggtaaaatcagccaagacgtgacggtggccatcggccattccggcgcggattacgacacgagcatggaggccatccgccgcggggcgcggtgcgtcacgcacaccttcaacgcgatgcgcctgttccaccagcatcagcccgccatcatgggcgcggcgctggaaagcgactgctggtgcgaggccatctgcgacgggcggcacctgcatcccggcacggtgcgcatgctgctcaagtgcaagggctgggatcgggtcatcgccatcacggacagcatcatggcggcgggtctgccggacggcaactacaagcttggggtgaacgacgtggtcgtccgggatggggacgcggtgcttgcttcgaacggcgttcgcgcgggcagcacgctgacgctcgcgcaggcgctcaggaacatcgtggccttcaccgatcatcctgtgcaggacgtgatcccgctgatgaccgccaacccggcgaaggcgctgcggatggacgaccgaaagggcagcatcgaggtcggcaaggacgcggacatggtgctgctcgacgatgcgctgaacgtcgtgacgaccgtggggctcgggcgcgtgatctacaccgcctaa

SEQ ID NO: 276 - DNA, 1575 bp, Unknown
  Unknown gut bacteria
atgtcgcttaccgtcctgctggctgtcgcctttgtcggcgcggcgctgtattacgtctgcccgctgcgcctgcgctgggtgctgctgctgctgctcagctacgggttttatctgacctgcggcctgtccgccctgcccttcatcgccctgacgacgctgacgacatgggcgggcgcgctggtcatcgcccgcgtcggcgaaagcggaaaggcctacctgcgcgagcacaaggccgagctgaccgccgaagcgaaaaaggctcaaaaggccaggacgcgctcgcgccagcgcgtctggtttttcgcggtgctgctgctgaatttcggcgtgctggccgtgctcaagtatctgaaccccgtgatggcgtggggcgcgtcgctgctgggcggcagcgcgccgtcgctggggctggttctgccgctgggcatcagcttttatacctttcagtcgatgggctacctgatcgacgtctacaacggcaaatacgccccggagaagaacccggcgaagttcgcgctgttcgtctccttcttcccgcagttgattcaggggccgattgcgcgctttgaccagctcgaaagccagctcgtcacgccgcaccgcttcgaccttgacggtatcgagcgcggcctgctgctgatgctctggggatggttcaagaaaaaggtgatcgccgaccgtgccctgtcgctggtggaagcggttttcggcaaccagagcgcctacggcggcgcggtcatcgtcgtcggtgtgctgttttactccctccagcaatacgcggatttttccggcggcattgatctggtgacgggcatcgcccagctcttcggcatacagcttgcgccgaacttcaagcggccgtatttctccgtatccctcggcgatttctggcggcgctggcacatcagtctgggcgcgtggatgcgcgactacgtgttctatcccttcgcgctgacccgcccggtttcccgcatgagcaaggcgctcaagaaaaaggccggtacgcacatcgcccgcgccctgcccgccgcgctgggcaacattctggtgtttctgctggtgggcgtctggcacggcgcgcagatgaattatgtgctctgggggctgtataacggcgtgattctcgcgttcaccgcgctggtcgagccggtctataagcggatgaacgaccgcctgccgcggctgacggcttccggcggcttccacgtgttccggattttgcgcacgttcctcgtcgtgaacatcggctggtattttgaccgctgcgtccgcgtctccgatgcgtttgccatgctgcataagacgttcttcgccttcaacgcgcagcagctctttgacggcacgctggataccctcggcctggcggccaaggattaccgcatcctgctcgtcgcgacgatcattctctttgtcgtctccctcatgcaggagcgcggcgtgaagatccgcgattttgtgctctcccgcccgctggcgctgcgctgggcggtgctctatgcgttcattttcttcgtgctggcaaccttcggcggctcgaacgtcgccgcttccggctttatgtacgcggtattctga

SEQ ID NO: 277 - DNA, 1368 bp, Unknown
  Unknown gut bacteria
atgaccgacgaagcatatcgaacggagcatttcggcctggacgagcgaacggcgcagtccgcccgcgacgtcatggatattttggtgggaaacgcgctggcgatcagcgcgctggatctggataccggggaactgcggctgattaagcgcggaatcgagctgccgcagatcgaagcggataagccgatgctgttttcgacgtttaacaatctgctcatcgcccaaaagctgattcatcgcgaggacggagacggctatctgcgcggcacggcgctctccgcgctgcggacggtgttcttcggcggggagaagcaggtctatctgcggtatcggcagaaggttgacggcgaataccgctgggtggcgctggcgatcgtcgcggggaagcggtgcgaaccggggtgcgcgcaggtggcgatggtgctcagcggcgcaagcgggagcggccacgccaaccgcccgagcgagccgcgcggggtggattatgactgcgacccgctgacggggctgctcaaccgcagaaggttcgagcgcgatttggaatggtgggggcgaaaccgccccgaaacgctgacgtgcgtgtatatcgacgtggtcggcctgcacgaaatcaacaaccatctggggcacaaggccggggacggcatgctctgcgcggtggccggcgcgatgcagcgcatgttcccgctggcggatacctaccgaatcggcggcgacgaattcgttgtgctctgggcggaccacacgggcgagcagggcgcggaggcggcggcgcggatcaaggcgctgctgcgcgaatccaattacgaaatttccgtcggcgtgcaccagatcgagccggacgagaacctcgaggatggcgtggatcgggcggaaaacgccatgcgccgcgacaaggaggcctattatcgggagacgggcaacctcgaccagatgcgcgtgctcaacgaaaagctcgaacggattctggttgaaaagcgcgatatggacatgtttctgcgcgcgattgcgccacgctatatcggcgtgtatgccgtggataacgacacggggcggatgcggagcatcgtcatcccagaccgcttccggcggatcgtgaaggaagcgaaggggttgttcatcccggcgctggcgcaatatgccgaggaggttgtggcggacgcatggcgcgggagcttcgacccgttactcgatctgcccggcgtcatccgccgcgtcgagcgggagggcatggtctgcgcgaccttccggcgcagggacggcgcgtggattcgcctgcaggtgatgcggtatctgcccgatgaagacgagggtggcggaacgctgtggattttttccgccgcagacgcggacgaacagcgcgcttga

SEQ ID NO: 278 - DNA, 1686 bp, Unknown
  Unknown gut bacteria
atgaatggcggagcaatgctcaacgcatatccggacagcctcggcggcacgttatccgatattgcacagctattggaaagcgaagcgttcgcggatgcattccggtcgttctacattttgccgagcgtgttcaacacggatttggatcgcggtttttcggtcatcagctatgatctgaaccgcatgctcgccgcgccggaagacgtgaagcggctgaaagaaaacggaattgatctcaagctggattttatattgaaccacctttccgtgctttcgccgcagtttcaggatattttaaaaaacggcgacgcatcgccgtatcgcgattttttcattgattggaatcaattctgggcggggtgcggcgaaatgactgacgccggatacatccagccggaagaaaaatacattcgaggcatgttcttccgcaagccggggctgccgattctgatggttcgcctgccggatgggcgcgatgtgccgtattggaacacgttctatcagcaggttcgatatgacccggtcgatgcgcaggatttgatgcgcgcttcggatatgcagtatggcgaggcgacggttttggccgcgcggcttgacgcagggctggaggccgggcagaagccgcaggagctggatttcacgggctttgagcgctaccgcgaggcatgcgttcaactgctggaaatgcggcggaaatatcttggtcagatggatttgaacctgaaaagcgagcgggtttgggcgtattatgacagtgtgctgggcaagctggccgaatacggcgcggcgattgtgcggctggatgcgtttgcctatgcgcccaaaacgccggggctgcgcaattttatgaacgagccggacacgtgggacacgctggaacgcattcgccaaatggccgattcgcatggtttgacccttttaccggagatccatgacccttatgcggcgggaacctatgaaaaggtcgctcgaaagggctatatgacctacgactttttcctgccggggctggtgattgacgcgattgagaaccacgacggcacgcggctgatgcgctgggcggaggaactcagggaaaaaaacatccgcacggtgaacatgctcggctgccatgacggaatcccgatgctggatttgaagggactgctcagcgacacagagattgagaagctgatcgcgctgattgtcagccgcggcggcatgattaagaatctgcacggcgcgaagaacgtctattatcaggtcaactgcacgtatttcagcgcgctgggtgcggacgagcggaaaatgctgcttgcgcgcgcgattcagctgttcatgccgggcaagccgcaggtctggtatttggatttgtttgcgggcgaaaacgatctggaagccgttcgccgcggcggcgaagcggcgcataaggagatcaaccgcacgaacctgacgcgggacgcggtggcggacgcgctgaaaaaggatgtggtgcgcgatcagcttgcgctgcttcggatgcgcaacacctgcccggcgttcgatttcgacgcggacatgaccgtgcgccagccgcagaacgatcaactggaaatcatctgggaaaaggacgggagccgcgcgagcctgcgcgcaaacctgacgacatacgaattcgcggcgcagacggattgcggtgcggcgcggacgatcctgaccagccgatga

SEQ ID NO: 279 - DNA, 1431 bp, Unknown
  Unknown gut bacteria
ttgcaggaggagaccatgtttgattcttccaaacttgacgcatatctgaccgggctttgccaagcccgcgatcttcccggcgtgagcgccgcgatcatggggccggacggccttgaatacgcctttaattacggcttccgcgacggggccttcacccgcccggtggacaacgacaccctgttcggcgtcgcctcgatgagcaagtcgatgaccgcgctgtgcgcctgtatcctggcctgtgagggcaggctcgacctgaacgccccggtttcggatttcttcccggaatttgagctggccggtcagccgcgcgaggcggcgacggtgcgcacgctggcgatgcacacggcgggcatccccccgatggagccgctggaatggtcgattgccatgaacagcgaggggcgcagcgaaagcgactggctgcgcgagatgaagcgcaccgcgcccaacaagatggagacgatcgaccagatcatcgcgtatatcgcgcactgcggctacaacacgctcggcgcgccgggcgaggtgatgagctactccaacgagggctacgccatcctctcttacatcgtcgatcaggcggcgggcgttccgctcgagcagttcatgcaggcgcgcatcttcgacccgctgggcatgacccgcaccattctggataacggcgtcgaggccgcgcgcgccctctccggcggcaacatcaccagcctgttcgaggtggaggacggccggcgcacctgcgacgactgctggagcgtcctgccgccgttccgcggctgcgcgatggtcaaatccacctcgcgcgacatggcggcgtattatcgcatgatcgccaacatgggcatgcacgagggcaagcaggcgattccggcgcacgcggtcgatctgctggtcgggcgctatcatccgctttcccatctgatgacgatgtgcatggggctgaacaagcgcgagttcgcggggcacgtcgtctgcgaacacgcgggcgggctgcacggcgtatcgagcaagggcgctcttctgctgggcgagggctacggcttcgcggtgctctgcaatcagggcgacgaggatatggacgcgctgctctacggcatgctctgcgcggtgatggggcttccgctcgccacgaatatggattggttcacccccgcgggccgcgatttcagcgcgccgcatatgatccgcgggcgctatatcggccacgagggcgtgccgagcatcctgtgcatccactgtgaggaggacggcagccatctgcgcggcacgcgcgacggcgaggatctgcgcctcgtttactgcggcggcgcgcgcttcctcgccgtcaagccggatgcgccggacacggtcgtctgccatctggagtttttgattcgcgccggacgtgcgtggggcgttcgcgtcggcacacgggtgttcgagcgcgattga

SEQ ID NO: 280 - DNA, 2151 bp, Unknown
  Unknown gut bacteria
atggagtcgatcacgatgcacacgaaacacataggatctatcataacggcggcgcttctctgcctgctggctcccttctgcatggcgcaggaggcgcgggagctcacatcaagctgcgtcatcacatcgcccaacaaaaagacggattcggtgcacgacggcgaatacaccagcttctggcgcagccgcacgggggaaaacccttatctggaatttcaaacgccggagggcgaagcagcgcagtatctgtacatctgttttgccgagatgcccgaaacgtggtccgttgaaacggagacggacggcgagtggcgcacactgctgaacggctcgagagactacatgcacgtacttctcgaactggacggccaaacgcattttcggatcgtgggagattccggaaaagagagctatctaaaaatcaacgaggtttttgtcttcggcgacggcgatttgccggattgggtgcagcgttgggaacccaccccggaaaaagccgacttgcttttgctggttgcgcacccggacgatgaattgatctttttcggcggcaccattccgacctatgccgtagagcgcggcatgaacgtcgtggtggcgtatatgagctattccaacacgacgcgcaggagcgagcttctgaacggcctatggcacctcggcgttcgccaatatcccgtcatcggctcgtttgccgacgtttacatgaaaacgctggatgaagcctattcccgctggcgaaaaaaggacagccgcgcctacgtcgccgagctgattcgtcaatacaagccggacgtcatgctcacgcacgatatcaacggcgaatacggccacggcgcgcacaagctctgcgccagcgttgcccaatactgcgtggaacgaaccggcgacgaagcctttatgccggaatccgcggaaaaatgggggacatggtgcgtcaaaaagctctatctgcatctaggaagggagaacaccgtcacgatggattggcgcgttccgctctcatccatgggcggcaaaaccggcctcgaactagcgcaggaagcatatgccttccatatcacgcagcacaaaacatcgttcgcggtcaccgacgaagggcgaacgagcaacgccaaattcagtctggtctattcctcggtcggggaagactgcatcggcggcgatttctttgaacacatctcaccggatgatcagaacgcttcggatgcggaaaccgaatcgactccgacgcccgcaccaacatcaacgcccgcgcccgtttacgacaaggtcaaggccgacgtcgcgtggcccatggcacaccctgcgctggatgcatacggctatccgctctccggcgagcacgtttatgaagacgacgacgcgggcgtttggttttacgcatcgccaaccctcgtcgtccgcatcgaccgctttttcgatcaagaggccgttctgacgtggtacgaagtgcaaatctattgcgacctgaacgcagagcgcgtgggcagtattctttacaacccgcaaaaaccgcagagcaagcatgtgcaagctgcgctgattgcaaaacagaatcaaactgtctgggggatgaacacggattactacacctatcgcgtcggccgaaagaccatcacgggcatggtcattcggaacgggcaggttttctatgaccgtgtgcccgaggcaaaccgccatcaatttcccaatctggatacgctggccatgttggaggacggaagctggcatgtgttccattccgacgagcacacggcgcaggaatatctggatatgggcgcggtggacgtgttctccttcggcccgtacctgattcgagacggcgaaatcaatcccttccttgccgaaatgaccaacggccttacgccgcagccgcgctgcgccatcggaatggtggagccggggcattacttcgccgcgttggcggaggggcgcatccgcaatgtcagcgtcggcgtatcggtcgcgcaaatggccgaatggatgcagaagggcggctgcacggaggcgctcaatctggacggcggccaaaccgcagttatgacgttcatggggaagcaaatctctcggatcggcaaatatgacggcggcaaaaccagcgcccgcgcaacaaccgaaatcatcggcgtcggccgatcggacttgatc

SEQ ID NO: 281 - DNA, 1347 bp, Unknown
  Unknown gut bacteria
atgacaaaaacgcctcccggtttcacccgcacgctgctttccatcgccgtgccggtgaccctgcaaaatctgctcgcctcctccttcacgctgatcgataccatgatgatcggccgcttgggcgatacgccgctggccgccgtcggcatggcgggcaaatggacgtggttcttaaccatcgtctttttcggcttttccagcggcgcgtccgtgttcatctcccagttttacggcgcgggcgacgatgcgggcatgcgccgcacctacggcctgatgaccgtcggcacgcaggcggcctccctgctgttcatgctcgcggcgctgctctttccggagagcatcgtccgcctgttctccccggatgagcaggtcgtcgcgctgggctcttcctatctgcgcatcatcgccgtcagttatccgtttctggcgctcacgcgcggcggcggcacgctgctgcaaagcaccggccgcgttatgattccgtttgtcggttcgctgatctccgtcgcggtcaacatcgtgctgaacgcgctgctgattttcggcctgtgcggcttccccgcgctgggcgttcagggcgcggccatcgcgtcgctggtctccgccgtcgtcggcgcgctggtgatttacggcgcgggcatcgcgaaaaaaacgctgctccgcacggggcggagcggccttgtcggcatcacgggcggctttatccgcgatttcgcgcgggtcagcatgcctgccatgctcaacgaaagcgcctgggcgctgggcaatctgctctacagctccgtctatggccacatgggcacgggcgcgtatgcgtcgatcaccgtcgtcaaatccatcgaggatctgacgagcgttgcggtgatggggctttgctcttcctgcgcggtgatgatcggcagcgccatcgggcgcggcgacgtgccgctcagcaagctctgcgccaagcgccatgtgcagctcacgatcggcctctccgtgctcattggcgcggggatgctggcgctcccccagccgctgctttcgctcttcggcgtttcgcaggccgtgcgcgacgacgcgctggccgtgctggcgatctgcgcgctggagatggtgctgcacaacatcccctccatcctggtgatgggcgtgttccgcgcgggcggcgacacgcgctttggcctgatcgtcgattgtatcacgctgtacctgatcggcctgccgctgacaatgctggccgggctatatctgcactggagcgtgccgatgacctatctggtcatgtatctctcggaggatatcatcaagtgcagcgcgtatctcctgcatttccgctcctataaatggatccgccccgtgatataa

SEQ ID NO: 282 - DNA, 1290 bp, Unknown
  Unknown gut bacteria
ggaacgctgccggtggccaacaaaaaggtcgtcgagttcgccgtggcggcggggctggcgacgaactgcgaaatcacgcgatacaacaagttcgaccgcaagaactatttttaccccgatctgcccaaggcgtatcagatcagccagctctatctgccgatctgccgaaacggccatgtcgatatcgagacggcggcgggcaaaaaggccgtcggcatccacgaaatccacatggaggaggacgcgggcaagctggtgcacgacccgtggctggatgaaacgatggtggattacaaccggtgcggcgtgccgctgctggaaatcgtctccgagccggacatgcgctcggcggaggaagtgatcgcctacctgaccaagctgcgccagacgctgcaatacctcggcgtttcggattgcaggatgcaggagggctctctgcgcgcggatgtgaacctctccgtccgcccggtcggccagaaggaattcggcacgcgcaccgagatgaagaacatcaacagcttcaaggcgattgcgcgcgcgattgcgggcgaataccgtcggcaggtggagctgatcgaggacggcgggcaggtgaagcagcagacccgccgctgggacgacaacaaggatgcgtcctttgcgatgcgctccaaggagaacgcgcaggattaccgctacttccccgagccggatctgccgccgatggagatttcgcaggcgtttatcgacgcggtgcgcgcgcgccagccggagctggcggaggcgaagattgcccgctatcagcgggaattcggcctgccggaatacgacgcgcggattttgacggaggaaaagccgatggccgagctgttcgagcgggcggcagcggtctgcggccgggcgaaggaggcctccaactggatcatgggcgagacgatggccatgatgaaggaaaaggccgttctgcccgaaaacctgacgctttccggcgacgcgctgggcgcgatcatccgcgcggcggcggacgggcgcatcagccgccagagcgcgcgggaggtcttcgcctatgcgtttgacggcggcgaggacgtcgagggctatatcaagcggcacggccttgagatggtcagcgacgacgcggcctacgagcgcgtgctcagcgaggttctggcggcatgcgaaaaggacgtcgcggcgtatcgcgcgggcaacgaaaaggtgttcggcttccttgtcgggcaggcgatgaaggcgttgcgcggcaaggccgacccgaagaaaatcagcgaaatgcttgggaaaatgctgtaa

SEQ ID NO: 283 - DNA, 1788 bp, Unknown
  Unknown gut bacteria
tttgtgctcgagggcaagccgcgcggcctcatcaacatcgtggacgcctccaacatcgagcgcaacctgtatctgaccatgcagctcatggagctggatgtgccgatggtgcttgcgctcaacatgatggacgaggtacgcgaaaacggcggctccatccgcgtcaacgagatggaggccatgctcggcgttccggtcgtgccgatttccgccgcgaagggcgagggcatcgacgagctggtttcacacgcgctgcacgtcgcccactatcaggagcgccccggccgtccggatttctgcgacccggaggggccgcaggccgccgtccaccgctgcctgcacggcatcatgcacctgattgaggaccacgccgaaaaggcgggcatcccgccgcgctttgccgccagcaagctggccgagggcgaccggctcgtgctcgagcagctcaacctctccgaaaacgaaaaggagatgctcgaacacatcatcgtgcagatggagcaggagcgcgggctggatcgtgccgccgccatcgcggatatgcgcttctccttcatcgaaaaggtttgcagccagaccgtcgtgcgcccgcacgagagccatgagcacgcccgcagcgtcaaggccgaccgcatcctgaccggcaaatacacggccatccccatgttcgtcctcatcatgctggccgtgttctatctgaccttcaacgtcatcggcagcttcttctccgatctgctggacgccggcatcggcgcgctgacgacgctggtggaaaacgcgctcgtctcggcgggcttctccggcgttctgcgttccctgattatcgacggcgtgttcaagggcgtgggcagcgtgctcagcttcctgccgtttatcgtcacgctgttcttcttcctctccctgctcgaggacagcggctacatggcgcgcatcgccttcgtgatggataagcccctgcgccgcatcggtctttccggtcgaagcatcgtcccgatgctcgtcggcttcggctgcaccgtccccggcgtgatggccacgcgcaccctgccctccgagcgccaccgcaaaatgaccatcctgctcacgccgtttatgagctgctccgccaaactgccgatctatgcgttcttctccgccgtcttcttcccgcgctgcgcgatgtgggtgatggcggggctgtatctgttcggcatcgttctgggcgtccttcacgcgacgctgctgcgcaagacgctcttttccggcgagccggttcccttcgtcatggagctgccgaattaccgcatgccgggcgcgaagaacgtctgccagctcctgtgggaaaaatccaaggatttcctccagcgcgccttcaccgtcatctttgccgcaacgatcgtcatctggttcctgcaaacgttcgatctgcgcctcaacgtcgtcgcggattccaaggacagcctgctggcgctgacggccggctggctctccccgctctttaagcctctgggcttcggcgattggcgcatctgcacggcgctgctgaccggcttcatggccaaggagagcgtcgtttcctccctcgtcctcctctttgggagcaccgcggatctgctggccgtgctcacgccgctctccgccgcgtccctgctcgtgttctccctgctgtatacgccctgcatcgccgccgtcgcgtgcatccgccgcgagctgggcgcgcgctgggcggtcggcgtggtgctctatcagtgcgccgtcgcatgggtcttcgcgctgatcgtccgcctcgtcgggctggcgctgatctga

SEQ ID NO: 284 - DNA, 1167 bp, Unknown
  Unknown gut bacteria
atgagggtgctgctgtataaccattccggctgcgaaaaccgcggctgcgaagcgattgtgcgctcgacctccgcgctgcttgcgcaaaggggagcgagaacgattctcacctccggtcaggccgaatcggatggcgggctgcgcctgccggatgtcgagcgggttgtcgccgagcagatttcgccgtacagcgtcagccgcctcatcaattcgattggctttcggctgggcatgccgcgcgagcacgaggtggcgcgccggtatctgccggtgatccgcgcgggacgggaggcggacgtctgccttgccgtcggcggcgacacctattgctatgggccgcaggagcatatccgggtcatcaacggcaggctgcaccgggcgggtaagccgcttgtgctttggggatgttcggtgaacccggagctgatcgggggcgaatatctggcggatttgaaggcctacgatatgattgtcgcgcgcgaatccatcacggcgcaggcgatgcgcgacgcggggctgagtgtgcggacgtggtgcgatccggcgttcaccctgacggcagaagaactgccccttccggacggctggcgggaaaaacagaccgtcggtctgaacgtgagtccgctgattctggatcacacgaaggataaaaatacggcgctgaacgcattcgtcgcgctggttcgccatattctgcggacgagcgagaacgccgtcgcgctgattccgcatgtcacatgggcgcacgacaacgatgtggatgcgctttccgccatcaaggcgcagtttgcggatgagccgcgcgtgttccttttgccggattgcctcaacgcgatgcagtataagggctatgtgaagcggctcagcgggctggtcgcggcgcggacgcatgtttccatcgcggcctattcgacgtttgtgccgacgctggtgatcggttattcggtcaaggcgcggggcattgcgcgggatttgttcggcgaggaggcggggcatctgctccccgcgcaggagctttccggcgaggcggagctgattgcggcgtatgacgcgctgatgaagcgcggggacgcggagcgcgaacagcttcaaagacggatgccgtcgtatatggcggggcaggaggagacgctggacgctgtgttgaatttggcgaaaggaaaatga

SEQ ID NO: 285 - DNA, 1548 bp, Unknown
  Unknown gut bacteria
atgaaaaatcaggtgggacgcgagatcccggatgagattctggcgcggatggggaaaaccggatatcgggggctgcatgacagggacaacgcttcctatcggaaggcgagccccacggtgagggcactgaatgacccgcagcggggcaagctgtgcgcatccctgcgcgaagcgctggaaaagtgcgagctgcatgacggcatgtatttcggcttccaccaccatttccgcgatggagattatgtgatcaacatggtcatgcaggaggtcgcgcggatgggcatccgggatatcaccatctgcgccacctcgatgggcgcggcgcacgacgcgctggagccgcttatcaagcagggcgtgattgcgggcatccagtcctccggcgttcgcggcaagatcggcgaggccatttccaagggaaaattcaaaaagccggcgatcattcgcccgcacggcggtcgtgtccgcgcgattgaggagggcgacatccatctggacgtggcgttcatcggcgcgccgacggcggacgaatacggaaacgcgcgggcggtcggcggaaagagcgattgcggcgtgctgtcctattcgatggcggacgccaaatacgcggatcgggtcgtggtgattacggattgccttgtgtccttcccgaacacgcccgccagcatctccatgacggatgtggattacgtgtgcgtggttgacgagatcggcgaccccaaaaagatcgtcagcaatgtcgtgcgcgtgacgaaggacgtgcgcgagctgatgatggccgaatactgcacccaaatcatcgcgcagtcgccctattttaaggacggcttttcctttcagacgggcggcggcggcgcggcgctcgcggtcaacggcatgctcaagccctatatgcagcagaaggggattcggatgggctttgccatcggcggcatcatgcaggcgatgtgcgatttgatggatgagggcttcgtccgcaagatcgttgacgcgcaggtgtttgacgcggcggcgattgagcacatcaagaccaaccccaatcacgtggagatttcaacgtcggaatacgcgaacccgatgaacaagggcgcgtatgtcaacaagctggattttgtgattctcggcgcgctcgaggtggacgtcgattttaacgtcaacgtcgtgacggggtcggacggcgtggttcgcggcgcgcccggcggccatccggatacggcggcgggggccaagtgcgccatcgtcgtcgcgccgctgatccgaagccgaatcccgacgattgtggatcgcgtgctgacggtcacgactcccggcgaggcaatcgacgtggtggttaccgattgcggcatcgccatcaacccgagacggcaggatctgatcgcggcctatcaaaattcaggtttgccgatttgcaccatcgaggcgctgcgcgacgaggcttaccgaatcgcgggcaagcccgaccccgtcgagtttgaggacgaggtggttgcggtggtggaaagcagggacggctctattttggacgttatcagaaagatcagggaatga

SEQ ID NO: 286 - DNA, 1341 bp, Unknown
  Unknown gut bacteria
atgagtaaaccgcgcattcagctttccgatcactttacctatccgcgcctgctgcgcttcgtcgcgccctccatcaccatgatgattttcacctccatttacggcgtggtggacgggtttttcgtctcaaattacgtcggcaaaacgccgttcgctgcgctgaatttcatcatgccgttcatcatggtgctcggcggcacgggcttcatgctcggcacgggcggcagcgcgctggttgccaaggagatgggctgcggccacacggagagagccaaccgcattttcaccatgatgatcgcttttgtggtcgtcaccggcctgatcctgaccgcgctgggcgtcgccttcatccgcccaatcgcccggctgatgggcgcaagcgagagcatcatggcggattgcgtgctttacggccgcatcaccattgcgttcacaacggcgttcatgctgcaaagcgtgttccagagcttcctcgtcgtggccgagcggccgcgcgtggggctgctggtcgttgtcgcggcgggcgtggcgaacatggtgctcgacgcgctgttcatcgcggttttccgctgggggctggcgggcgcggcgctggcgacgggcatcggccaatgcatcggcggcgtcgttccggcggtgtatatcctccgccaaaaggatcttccgcttcgcttcactcccttcaaatttgaggcgtctcccatcctccatgcctgcgcaaacggttcttccgagtttatgagcaacatttccacgtcgttcgtctccatgctctataacatgcagcttttgcgcatgctgggcgaggacggcgtttccgcctacggcgtactgatgtatgtgcagctcatcttcatcggtacagccatcggctacagcatcggctgcgcgccgattgtcagctatcactacggcgcgggtcaccacgacgagctgaagaacatgctgaaaaaaagcctgacgctgatgggcataaccggcgtcgcgctgacgatgcttgcgctcggtctggccgcgccgctggcgaaaatctttgtcggctacgacgaagggctgcttaacctgacgcgccatgcgttctcgatcttctccttctccttccttctttccggcctcaatatcttcgcctccggcttcttcaccgcgctgaacaacggcctgatttccgcggtcatctcgttcgcgcgcacgctggtgtttcaggcggcctgcgttctgctcctgcccgcaatattcggcgtagacggcatctggtatgcgacgctggttgccgagggactggcctgcctgttgtcgctgtggctgattgatcgcaagaagcatttctatcattatctataa

SEQ ID NO: 287 - DNA, 2373 bp, Unknown
  Unknown gut bacteria
atgaacgaacgttctttacgtgtgcttgaatttacaaaaatccgtgcgcagctggcgcaatactgtgtttccgacatggggcgagcgctgtgcgacgctttaacgccgtccaaccgattggaggacgttttgcgcatgcagcaggagacggaggaagcgcacagcctgctttcctatttgggcggcacgctgatgctctcgttttcagatgtgcacgcttcgctgcatctggcgcagatcggttcgtctctttcgccgcgcgcattgatggaaatcggcgcaagcctgcgcgctgcccgcgctgcgcgcgaggccatcgtgacggataggcaggatacgccgctgatgagcgcgaatgcctcgcggctttcgacgttcaaggccatcgaacaggccatttccgacgcgatcatcagcgaggacgaaatcgcggatcgcgcgagcaacgagctgttccaaatccgccgcaagatgcgcgcgtgcaatgaacgggttcgcgagcggctgaacggcatgatccacaatccgaatttccagaaatatttgcaggacgccatcatcaccatgcgcgcggatcgttatgttctgccggttcggcaggaataccgctcgatggtgtcgggcattgtacacgatcaatcctcaactggcgcgacggtgttcatcgagccaatgtccgtcgtcgaaatcggcaacgagctgaagcagttgatttcggcagaaaaagtggagatcgagaagattctccggacactttccgcgcaaattgcgccggaagcggacgccatctcggataatctggcgattctcgctcagttggattttgcgtttgccaaagcgtcgctggccaagcagatgaacggatgcatgccaaagatcaactgtgaggggcggctgaacattgtgcgcggccgccatccgctgattgatccgcagaaggtcgtgccgctggatatccggctgggcagcgactttacgacgctgattatcaccggcccgaacacgggcggcaaaacggtgacgctaaagaccacgggtctgtttacgctgatggcgcagtccggcttgcagattccggcggaatacggcacggagctggctggttttgatgacgttttcgcggacatcggcgacgagcagtccatcgaacagtcgctttccaccttttcgggtcacatgacgaacattgtctcgatcctccaaagtgtgaccccggattcgctcgtgctctttgacgagcttggtgcgggcaccgatcccaccgagggcgcggcgctggcgcaggcggtgctttccaccctgctggatatgcatacgcgcacggtggccacgacgcattacagtgaactgaaggaatatgcgctgaccacgccgaacgttgaaaacgcttccgttgaattcgacgtggcgacgctcagaccgacgtatcgcttgtccatcggcatccccggaaaatccaatgcatttgaaatttcgcggaagctcggcctgccggaatttatcatcggcagggcgaaggagctgctttccaaggagcaggttcgctttgaggacgtgattgccaacgccgaataccaccgtcaggtggccaagaaggagcgcgaactggccgagcaggcgcgcaacgagatgatctccatccgcgatcaggcggaagcagagcggaaaaagctcgaagatcagcgtgaaaaatccatccgaaaggcgaaggaagaggccaagcgcatcgtcgagaacgctaagcgggagtcggagaccatgatcgccgagcttcgcgccatgaaaaaagcgggcggcgcgcaggagcacgaaattcaaaaggtcaaaaaacagatggaaaaggcgcaggacgaattggccgacaagaaggaagtgggcggcgaaattccaaagagcgtcaaggcgggcgatatggtgcacatcgcctccatggatgtggatgcgacgatcgttgcgcctgcggacagcaagggctacgtgcagctcaaggtcggcatgatgaaaatgcgcgcgccgctttccgatctgcgaacgctgacggcgacgcagcagctcgtcaaaaaggagcaaaaaaagctggaacgcaagaaatccatgcgggaaacccgggtggatatcaccacgcgagccgttcggcaggagctggatgtgcgcggcatggcgctggatgaagcgattcccgaggtcgaaaaattcatcgacgacgcgatgctctcttcgctcggcgaggtcagcatcattcacggaaacggaaccggcgttctgcgcgccggcatacaggattgcctgcgccgccatccgtgcgtgagcagcttccgcctcggccggtacggcgaaggcgaaaccggcgtaaccattgtctccctgaaataa

SEQ ID NO: 288 - DNA, 1491 bp, Unknown
  Unknown gut bacteria
atgattcgaaagatattttcggtgctttttgggcttttgattctggctgttgtggcgcgcgcggagacgggcgaggagattgcgctggcggcgtaccccggctatgtcgttgcgtccagcgattccggcaacggctttggcgtgtttgcgctggaaaacgggaacgagactgcgctgtgtatcgtggaggacggcaggctgacgattgccaacgagcgggcgtttaaggcagggaagaatgtaaaggtttatgtcgatacggacggcgagtcgctgtttgtcagatccaacacggaatatgaatatgtcacgctgcatgcggagtatcgggctgaagggtggacccgatgcgatgtattgaatcaggaatcatatggcaatgggcgcacgttggagacgatgctgtttgaacggaacggcatgctgacgatgacagtcgaataccgcgacgaaaacgataacccgattggcgagagcgaaacggttcggattcccgtcggcgagaattttgatctgtcgctcggggggatcgacatgctcaaattgccgcttacgccggaaatgtgcgaccgggaagaaagcgacctgccggatggacttgccgagccgcttttggccgacggcgaaacgctgatgcagatgggcgcttatccggaaaggctgattctgctggttcggaaagcggatggcagccgatgcgtgcgcgtgtgcgattgggcggaaggcgtcgggtacagcagacaggatagcgtgcccctcagcggctcggcagggctggacatcattcatgcggatgccgacaaaatttttgtcgatgaaaatggtcagaaatatttcttccgcaaaacaaggcagggaagatggcttcttgcgggctgcatgggcggcggcgtgcttaacgtaggcgtagactgtgcgcgcgtcagcgatgaaggcgggacaggaaaaaatgatggctatatctacggcaaaagcgagccgctcgatttgatgaaagtctccgtcgagcaatggccgacccgtcaggaagaagccgtcgcccggctggatacagacgcttacgccttcgtaaacaacgacaatcccaaagaccgcctgcatctgcgcgagaagccggacagaaaggccaaatcgctcggcaaattctacaaccgaacgccggtgcagattctctcgtgggacggcgactgggcgcatgtgcgcatcggcgcgggcgacgcgaatctggagggctacatgatgacccgctatctggtgcgcggcggcggaaatcaggatgtgagctgtgcgtttgagacgctgatggcggtagacgcgctgggggacggcgcgccgatctaccgcgtaccggatgacactgtggaaacgtttgggcagtttcttggcgattatgtcatcggcgtatatggtgacgactgggtgatcgcgatgacgtgggatggcgacgtcggctatgtccgccgcgcggacttatgggtaggaaacgggtaa

SEQ ID NO: 289 - DNA, 1497 bp, Unknown
  Unknown gut bacteria
ttgggctttttcgctttcgcagcggggatcagcctggtcaacgtgctggttttcccctacgcgcgggaaaactacggctacggcctgatcggcctgtggctggcttatgcggcggcgctggcgctgctgatgctggccgggcgcgccgtcagccggatgcgcgcggacaaggcggaacgcgccgcgcgggcgctcgccccggcgttcaccctgctgctgttcgccgttcacctgctgatgggctatctgctggaatacacgcccagcggcgacaatttcatgctctacaagagctcgcagatgctggccacggacggcaattttgataactacccgtatttttacctctatctgagccgcttttccaatcagtggggcttcacgctgatgctgaccgccttttacaagctgatccttgccctcggcgtgacgcagacgttctacccgctggtgctggtgcaggcggtgctgtatgtcttcagcacgcgcgcgacgctgcgcatcgcccgtcgcctctccggcgcgaagggcgaactgatgacgctgctgatgctggcctcctgcctgccgatgtacgtcgccgccgccgtgctgtatacggatacgttctccgtgccgttcatcatggtggcgctggatctggcgcttcgcatcagggatgcgcaaagccggggggcgcagctcgcgctgtccgccgcctgcggcgcggtggtgctgatcggctgccagatcaaaatgacggtgctcatcgcgctgatggcggccgtgatcgtctggctgctggagatgaggccggggcgcgcgatgctctgcacggcgctctgcgcggcgattgtcgggggcggcacggcggcggttcagcattatatgaaaaacgaggtgctcgacccggagatggtcgcgcagcaccacacacccgcgattcactgggttatgatgtccatcccctccggcaacaacccctacggcgggttttcgggcgattacgccatcacatggggcatgatggaggagggcgcgacgcacgaggaggtcatggcctccatctactcgcgcatgaaggacaagatctataccctgcgctaccccaaccggctgatttccgcggcgctgcgcaaggacagcgcgttcatgggcgacggcacatacggcatgaccgaaatgctggacgacggccccgttcgggaaaacgtcgtctcctccttcgtgctggaagggcggagccgataccgcctgcacatgacgctctgcacgggcgtctggctcgcccagttgacgctggcgctgctcgcctgcgttcgggatatccgccgctccgataccgcctcgggcgcaaaggccggcagcctgcgatacatgacgctgtatgtcgcgttcttcggcgcggcgctgttcctgatgctctgggaggcgcgcggccggtatctcttcggctttgtcacggtgctgctgctgctcgcggcgcacggtgcgctccggacagaggaggggatgtaa

SEQ ID NO: 290 - DNA, 3072 bp, Unknown
  Unknown gut bacteria
ttgaatcgaaaggaaaagaagcatatgaattttgacgtgagcagactcaaagacccccttttctttgccgaaaaccgggtcgcggctcattccgaccatgtggcttacgccagtatggaggagctttcccacggcgaaaccagcctgcgctgttcgctgaacgggctttggaaattccaccacgcgctcaacgccggtcaggtcatccccggctttgaggcggcggattacgacagccgcggctgggcggatatccacgtcccggcgcacatccagatggagggctacggcgcgccgcagtacgccaacgttcagtatccgtgggacggctatcaggcagtggaaatcggcgaaattccgcaggaatacaaccctgtcgccagctatatcaagacgttcttcgtgccggcgcagatggtcggcaagcgggtcttcatctccttccagggcgcggagagctgcatcgccgtctggctcaacgggcactacgtcggtttctcgtcggattccttcacgcccagcgagttcgagctgacggattacctcgtcgagggcgaaaacaagctcgcctgccgcgtggaacgctggagcgcgggaagctggctggaagatcaggatttcatgcgcttctccggcattttccgcgacgtctatctctacgccatccccaaggcgcacatcgcggatatccgcgtgaagacgctgcttgacgacagcttcaccgacgcgacgctcgacctcgcgatgaagatggagctggatgcggccgtcggcgcctgccgcgtgaagatggcgctgctcgacggcggcgaggtcatcgcggcggccgagcgcgtggcggaaggcgaaatcgccgtgcagcttccggtgaaagcgccgcgcctgtggagcagcgaagcgccgaacctctacgacctgctgctgaccgtcgaggacggcagcggcgaggtgctcgaggtcgtccgccagcgcgtcggcttccgtcggttcgagctgaaaaacgccgtcatgtatctcaacggcaagcgcatcgtgttcaagggtgcgaaccggcatgatttctgcgccgagagcggccgcgccatcccggaggagaagatccgccgcgatctgctgaccatgaagcgcaataacatcaatgccgtccgcacctgccattatcccgacagcagcgcgctctacgccatctgcgacgagctgggtctgtacgtcatcgacgaaaacaacatggagacgcacggcatttgggacatggtggcgcgcggcagaaagccggtcgaatacgcgctgccgggcgagcgcatggattggctgccgatcctgctggatcgcgtcaattccacctaccagcgcgacaagaaccacgccagcatcctcatctggagctgcggcaacgaatccttcggcggcgacgtcatcttcgagatgagccagaagttccgccagctggatgacacgcgcctcgttcattacgaaggcgtggcgcacgaccgccgccgcaacgagacgaccgacatggaaagccagatgtatacgccggtcgcgcagatcaggaaatacctcaccgagcaccgcgagcgcccgttcatcctctgcgaatacacgcacgcgatgggcaactcgaacggcgcgatgcactggtacaccgaatacgcctatgaggagccgctctatcagggcgggttcatctgggattacatcgaccagtccatccgcacgaaggatcgctacggcaacacgacctacgcctacggcggcgattttgacgaccgcccctgcgattacaacttctgcggcaacggcatcgcctatggcgacggcgaggaaagcccgaagatgcaggaggtcaaatacaactatcaggatatcttcgccaaggtgacggatacgaaggccgtcgtcaccaaccgcgcgatgttcaccaacacgagcgcgtatgactgcgttgtgattctggcgcgcaacggcgaaaccgtcgcctccgcgccgcttgcaaccgacgttccgccgatggagagccgcgaatatgacctgccgttcgcccatcaggcgcgcgggggcgaatacgccgtgacgctctccttccgcctgaaagcggatacggcgtgggcgccgcgcggatacgaagtcgcgtttgcgcagggcgtctatcgggtcgaggaggaagcgaagttcgagcgctatgcgccgctgcgcgtcgtccgcggcgattacaacacgggcgtgcacggcgagcatttcagcgtgctcttcggcgacctcaagggcggcctgaccagctaccgctggggcggcaaggagatgctcaagtccatcccgaagccgaacttctggcgcgcgccgaacgacaacgactgtggcagcagcatgccgctccgttacgcccagtggaagatcgcgtccctgtacgcggcgacgaacgccaccgccgagctggcgaagaagaacggccacccctccgcgacggaaaacccggacggctccgtgaccatcggctacacctacggcttgggcacgaggccggacgcgcagtgcgagctgacctataccgtgcatccctgcggacaggtggatgtgaagctggattacgatccggtcgccgagctgggcgatatgccggaattcggcgtgatgctcaagatggacgcggactacgatcaggttcgcttctacggctacggcccgaatgaaaactacgtggatcgccgcgagggcgcgcgtctgggcattttcaagacgacgacccgcgaaaacgtatccaagtatctcgtcccgcaggagtgcggcaaccgcacgggcgtgcgctgggcggaggtcacggattaccgcggccgcggcctgcgcttcacgggcgacggcatggagttctccgcgctgccgtacacgccgcacgagctggaaaacgccatgcacgactacgagctcccgccgatccattacacggtcatccgcgcaaacctgcagcagatgggcgtggcgggcgacgatagctggggcgcgcagacgcacgaggaatacctgctcgacacgagcaagcacatgagcttcacgttcagcttcaagggcatctga

SEQ ID NO: 291 - DNA, 1293 bp, Unknown
  Unknown gut bacteria
atgccctgcgggcctgaagatacgcctgagcgtcagagcgaacacagggcggagacggagaaacagccgccccgacagccgcgcaaaaggctggtgcagaagccgacccccaagccgcggcaaaacccgcctgagcaatgggcgaaatggcgcggacaggcgctggattcggcgaagcaatgcgcgaaacgcggcgcaaagcgagccgagcgcggtctgcttcaggcgcagcttgcggtgacgcgcgccaaacgcagagcggagcggcggaaacagaaaaagcaggcggagcaggacagctatctcggctcgttttccgtcggcgggcggaaggggcggaaaacgcgccgcctgaacctgcgctacgcggtgatggccggccttttctgcgtggcgatctggagcgcggcgcagttggtcggctttggggcgcgctatgtgcagacgaggcggcttgaaaagcagctttccgcgatgcacagcgaggcctttgcggtatacgggcaggagacgcaggcggagggcatgctggaggaaacgcccgcggaaacggcgacgcccatgccgaccgaagcgcccgcgccgacgctaacccccgcgcaggaggcgcggcagacggtcacgcccgtgccggaaaccgtcaaaaccacgcaatatcagcgcatgggcggcacgccgcttgcgcagatggaggcgctgcacgcgcagaacacggatctggtcgcgtggctcacgattgacaacgtgctcgacctgcccgtggtctatcgcgacaacagctattacctcacccacgatttcgcgaagaacaaatcgacggcgggcacgatcttccttgacgaaaaccacccgatgacggaaaagacgcagaacctgctgctgcacggccacaacatgaaggacggcacgatgttcggcaggctgacgcagtacgaaaagagcatcgactacctgaaggcgcatccgttcgtcgatttcagcacgctctggcatcaggagcgatacgtcatctttgcggtggtggacgtttcgctggatacgagcagcgagaattttctggattacttcgcgcatccccggttttccagcgacgcggaatttgccagctacatccgccgcgcggagctggcctcgatgtacgccataccgatggaggtgaagccgtccgacgcgctgctgacgctctccacctgtctggaggaaaaccggctggtcgtcatcgcccggcggcagcgcgacggggagagcaaggccagcctgcgggagaccgtcaacatggcggtgcgccagtga

SEQ ID NO: 292 - DNA, 1317 bp, Unknown
  Unknown gut bacteria
atgaagaagacgctttggactttgacctccgcggcggcgctgctttgcgtggccgccatggcgacggcggaagcgcccgttgcgacgggcgagaccgcgtggctgcgcggcaagccggtggcgacctacacctgcgcgggcaagacggtgattccggtcagcgcgctgggcgaatacggctttgacgtggaaagcggcgacgcgctgaagatcacggtcaacgacgcggagatcaccgccgagggcgcgcccgcgacggccggcgacacgctcgccgaggtcaaggcggaaacgaccgcgacgctggacggccagccggtcgtggcgtacacgctggaggacggcgacgcggtgatcgcgctggacgactgctttgcctacaacgccgagaagctctccggcattgatctgatcgtcatcggcacgagcgatctggaaaagagcaaggatttcttcgtcacccacatggagctgaacgtcgttgcggaaggcacgatggacgcggcctccgtcaaggcgctctacggtcaggagggcgaggcgaagtacgcgatggttatgaacaacgtgaactccaccaagctcatgctcatcgagttcagcgagaagaccggcaagaccacccgcgaaggcttccatgcgtgggattacggctacttcgacgtggcctggcgctgcaacgatatcgacgcgatgtatgaggagctgaccggcgcgggctacagcttcgagtgcgagccgttcagctacacgacctcctggagcggcaacgccgttgctgagtgcgtcgcctacggcccggacggcgtgccgacgacgatgatcctcaagaccacacaggagtttgataccaagttctacaacatggtggacgcggtgctggtcgtggacgacatggcctccgctgtggattggtacaccaacgtgatgggcatggatctggtctatgacgcgccggtggagaaggggcttgtcgatcgcgtgctgggcatcgagggcaccgacatcaccgttcgcatgggctacttctacggctcttacgccaacggccagagcacgctgatcgagattctggattactccgagccgggcgtctccatgaccgagcagggcggctccgttccgggcaacggcggcatcttcacgcaggcgttcgagaccaaggatctggacaagctgctggcgcgctgcgaggccttcggctacaagaccgccagcgagcgcacgaccgtgaccctcgaatctgtcggcgaaatcgacacggttctggtcagcggcgtgaacggcacgctctatcagttctatcaggtgaaataa

SEQ ID NO: 293 - DNA, 1458 bp, Unknown
  Unknown gut bacteria
atgatgaacaacacacgcgccaatcaatccctttccgcctttgaagaaaaggccgcgcccaagcgcggcgcgctccgcgagtttgccgcgttctacaagccgcatctgggcatgttcctgctggatatgttctgcgcgctggtgatcgcgctggtggatattctgttcccggtggtcacgcgcaaggtgctttacgactacattcccaatcaggcgatgcgcaccttcctgattgtgatgggcgcgatgctcgccgcgttcctcatccgcacggcggcgcagtggatcgtcacctatctggggcacctgatgggcgttcacatcgaggcggatatgcgcacggccatcttcgcacacatgcagaagctcggcttcagcttttacgacaaaaaccgcaccggcctgctgatgtcccgcgtgacgacggatctgttcgatatcacggagctggcgcaccacggcccggaggatctgttcatctccatcgtgacgctgaccggctcgttcctcgtcctctggaacatccagaagaagctggcactcgtgctgatgatcgccgtaccgatgatcgtcctgttcgtcgcgatgcgccgacgcaacatgatgaaggtctcccgcgacgtcaagcgccgcacggcgggcatcaacgcggaaatcgaaagctccatttccggcgtgcgcgtcgccaaggcgttcggcaacgaggatgaggagatcgacaaattcacccgctgcacggatcaatacgtttccgccaagcagggctattacaaggtgatggcgggcttcttctccggcacggagctgatgatgaacctgatgagcctgtccgtcatcttcgtgggcagctatctgattatgaaaaaccagatggatatcgccacactcgtcaccttcaacatgtacgttgccagcgtgcagagcccgattcgcaagctgacccagttcaccgagcaattcacgcagggcatggcgggcttccagcgcttccgcgccatcatgcacgaagacccggatatcgtcgatgcgcccgatgcggtcgcgctgacccatgtggacggcgacatccgcttcaacgacgtctccttctcctatgacgagggcaagggcgacgttctctcccacatcaatctgcacatcaagcccggcgaaatgctggcgctggtcggccagagcggcggcggcaaatcgacgctctgccagttgatcccgcgcttttacgagatttcctccggctcgatcacgctcgacgggcaggatatccgccatatcaagctggccgatctgcgcggcagcatcggcatcgtccagcaggatgtcttcctcttcgcgggcacgattctggataatatccgctacggccgcccgaacgcgacgatggacgaggtgatcgaggccgccaagctggctgaaattcacgaggacgtgatggccatgccggacggatacaacaccatc

SEQ ID NO: 294 - DNA, 1167 bp, Unknown
  Unknown gut bacteria
atgaaaatcggcctgtttaccgatacgttttacccggaaatcaacggcgtggcgacgagctgcctgaatttgcagcgggaactgacccggcgcggccacgaggttcacgtttacgccccgaaatgcaagggctgggaggagaaccagcgggaaaatgtgcactatctggcgagcgcgccgctgctggtgctcaaggatcgcaacttcgccttccccacgccgctcacatcgtgggaggcggagaagatcgactttgacgtggtgcacaccaacagcgaatttgtgatggggatgttcggccaccacgtcgcgggcagcctcggctgcgcgcaggtgcacacctatcacaccgtctgggaggattacacctactacatcacgcacggcgtggcggacgaggccgcgcggcggatcgctcggaaatattcccaatggtggtgcaaccgcttcgaccgtgtgattaccccgacgggcaagacgctcgacctgctgcgcaaatacggcgtggcagcgccgattgacatcatccccagcggcatggacatcgcccgcttcgacccggcgcggcacggcgagcaggagcggctggaaacccgccgggaatgcggcctgccggagcacgcgccgctgctgctgaacatcggccgcatcgccaaggaaaagaacctcgaacaggtgatgcgtgtgttcccgcggctgctgaacgcctgcccggatgtgcatttcgccgtcgtcggcgaagggccgatgcgcgaggagctggggcgcatggcggaggagttgggcgtttcccgcgcggtgacgctgaccgggccgaagccgtgggagaaaatcgaccgctattacgcgatgggcgacgtgttttgcagcgcgtctcattcggagacgcaggggctgacctatgtggaggcgatggcctccggcctgtgcgtctgcgcggtgaacgacccctgcctggacggcgtgatcgaggacggcgtgagcggtattctctccggggacagcgacgacgagctgctcgcggcgctgattcgcgcgttcggcgaggagggcaggcgcatcgcgaagacggcggcgcagtatgccgcgccgttcagtacgcagggctttgccgagaaggtggaggcctgctacatgaaggcgattgaggcgcataagcggggatga

SEQ ID NO: 295 - DNA, 1158 bp, Unknown
  Unknown gut bacteria
atggataacctcttttccgtcgcagagcgcttcggcacgccgtgcttcgtctttgacgaggtgcagctcacgcgccgcatgaaagccgtgcgcgccatcgtgcccgaagatatccgcctctgctattccatcaaggcgaacccgtttctcattccggcgatgcgccgtctggtcggcacgctcgaggtatgcagccccggcgagctggaaatctgccgtcagcaaggcgtttcccccgacatggtgctcttttccggcgtgaacaagacgaaggcggacgtggagcgcgccatggatttgggcgtgacgcgcttcacctgcgaatccccgctgcacgttcgcctgatcgacgaggccgcgcgctcgcgcggcagggtttaccccgtgctgctgcggctgacggcgggttctcagttcggcatggacgagcgggatttcttcgccgcgctcgaccgtcgcgccgccacccccggtattcgcatcgagggcgttcactatttttccggcacccagcgcaagaagctggatgggcagcgcaaggagcttgccatgctctgcgcgctggccgaccggctgaaagtggaatacggcatggaaaccgtccgcgtggaatacggccccggcctgtatttcccgtatttcagccacgaggatcacagcgacacgctcgcgccgattcgcgaattggcgcccgatctggccgcgctggccgcgcattgcgaactgacgattgaaatggggcgcttcttcgcctccgaatgcggcgcgtacctgacccgcgtggtcgataccaaggtgaacggcggcacggcctacgccattgtggacggcggtattcaccacgtcaactatctcggcggcaacatgggcatgcgcgtgccgatcatcgagcagtcgcccgcgcgcgagggcgatatgcagccgtgggcgctgtgcggcagcctgtgcacgacggcggatgtgctcgtccgcaaggcggagctgcatcccctcgaacagggcgatgtgctggcgtttatgaacatcggcgcgtattcggtgacggaggggccggcgctcttcctgagccgcgacatgccgcgcatcgttctgcgcggcgaaaccggcgaccggctggcgcgcgacgtcgtgcatagctggacgctgaaccacgagtga

SEQ ID NO: 296 - DNA, 1755 bp, Unknown
  Unknown gut bacteria
atgcgtatggagcaaaggaaggaacagaagaaggaacaaagggtttatgccgcctttggccgcggcgcgcgccgggattggaagcgcgcggcgcgcaagaccgtgttcagccattactggatggcgattatggtctgtctggtcgcggcgtttttgggcacggaattcaccggctcgctggaaagcctgcatttcacccggcagaaatgggacgtgatttcgaatttcctcgcgtccttcgggcggccgggcgcggcggcgaacagccggggcgtgtttgcgatagccgtcaacaagattgcggacggttcccttcaaaacattgtgaacaacaccatcatgtcgctggccggatcgagcgagttctggcagtccttcggcattgtggtgagcagcctggtttcgatgacatattgggtgctggttacccacacgttcgtcgtgatcctgcgccgcctgtttatggagatgcgcgtctacgaggaagtgccgccgtatcgcgcgctctatctgcacagcgcgcgctgctgggggcgcacgtcgctggcgctgctgcgcgtggccgtccagcgggggctttggtggctgacgatcatcggcggcgcaatcaagacgttttcgtattatctctgcggcttcattctggcggagaacccgaccatgaagggcggggacgcgatcgcgctgtcccgaaagatgatgaacggccacaagtgggagtgcttcctgatggagctttccttcgtgccgtggcaccttctgagccttgcgacgttcggcctgagcagcctgttttattccagcgcatacctgagcgccgcgcggtgcgagttttacgccgccgtgcgcgcgcaggtcaaggcggagggcgaggcgcaggcgctgcgcgacacctatctgtttgaaaaggccggcgcaaagacgctgcgccgcgcctacaacgatttgggcagaccggcggaaaagctgcccgcgcgcgtatacggcaacagggtgacccgctttttcggcgaatgtcttggtgtgacgctgttcgtcaacccgcaggacgtcgcgcgcgaaaagattcaggatcgtgaataccgcctgcgctacatgcgccgctgcgagcaggggctctcctatccgattcggctcagcccgctgctgcaatatgagcacaaggatcacgaaccggcgctgtttacccgcaaatacccggtgacgacgctggtgctgctgttcttcctgttttcgatcatcggctggtgctgggagggcgtgctgcatctgctttcggagggcacattcgtcaaccgcggcgtgctccacgggccgtggctgccgatttacggcacgggcggcgtgctggtgctgctgacgctctacaagctgcgcgacaagccgtggcttgaattttgggcgacggtggttgtctgcggcgtggtcgaatacttcaccgcgtattatctggaaaccgtgtacgaccgccgctggtgggattacgcgggctatttcctcaacctgcacgggcgcatctgcgcggaggggctgctggtcttcggcctgggcggcatggcggttgtctacggcgttgcgccgctgtttgacaacctgctgcacaaagtcaggcacagcgtactgatcgggctgtgcgccgcgctgatcgcgctgttctgcgtcgatcaggcgtattctcattttcatcccaacgagggcgagggcatcacggacgaggtggtttacaagacggacgacgctcggattcgccttgac

SEQ ID NO: 297 - DNA, 1278 bp, Unknown
  Unknown gut bacteria
atgagcgaaaccatccggattcagatgatggatgaatttgtcatctacctcaacgagcggcaggccgatcacatggtcaacaaatccaaaaaagggctggcgctgatcgaatacctgattgcgaaccggggggagccggtatccaaccgccgcctgctctccaccttctggaacgatgaaaacgtgaccaaccccgaaaatgcgctcaaaacgctcatcagccgtgtgcgcacgctgcttagccagatttcgccggagctgggcaactgcatcgtcgccgaccgcggcgcgtatcactgggaatgtccgccggagatgaccgtcgatctctacgagctggaggacatctttgcccgcctgcccaacgtgcgtgacggcgagcgcaagcgcgaggactatcgccggatgatgacgctctaccgcggcgcgctgctgcaaaagagcgagctgaacgagtgggcgtatccccgcgcggtgacgctgcacaaccagtatatcgccggcgtatacgactatatcgacctgctcaagcagagcgggcgggacgaggacgagcgggagatcatcagcgtttgccgaagcgcgctggagagagagccgtttgacgacagcatccacatcgagctgatgcgcacgctgctcaggggcaacaacgcgaccgaggccaaggcgcagtacgaagaggtcatgcacctgcattaccactacctgaacgtgaagccgagccacgagctgatggagttttacaacgagatcgttgaggcgagcaaaaacgtcgagttcaacctcgaatccatctgccgccagctctatcagaacagccgggagcagagcgcgttcgtctgcgatttcgcggtgttcaaggaaattttcaatttgcagatccgcaacatcgagcgtctgggggcgacgatgttcctcgctgtgataacggtatccggcacggacggcgggcagatggagagcatccggcaggaaaacgtgatgcgcggcctgatggagattttgcgcaacaacctgcgcgagggcgacgtcatcacgcatttctccccgacgacggttgcgatgctgctgccgacagtggattacaacacgggcgacggcgtgatggatcgcatcaagcagaaattctatcaggcgtatcccaactccaacgtgctgttcaactaccgcattgcgccgctgagcgccaacgcgatcgtcgaagagccgcagaagccgcggcgcggtcggggcagggcggcgaagggaacggccaaggaaaaagcggctccgtga

SEQ ID NO: 298 - DNA, 1083 bp, Unknown
  Unknown gut bacteria
atgaaaaacaaatggatcgcggcgctcgctctggcgggcctgcttttgaccacgggcgcttatgccgaaagcacgccgtcggagacggccgcgcccgttcaggcggaagcggcggccgagccgcagcatcagctcaaggtcacgaccaaataccgctatttcatcagccagtatcactacatccgcgagcgcaaggtctcctatttcgacaacgtgtacgcctataaccacggcgaatacggcctgaccccgttcgccagcaccgtgccggaggaatacttcgtcgccgacgaaaacggcacgctggccatcgcgccgatcgtgctggatatcaccgacgcgatgcgcgagcgcctctatggcgcggacgtgggcgaaaccgcgctctactacggccaatactgccagcgcgagaaggatcgcaagggcgtatggggctacaccggcatccacgagggcatcgacttcgtgaacgtcaagggcgcgccgctgtacgcgattctgggcggcgaggtgacgcgcggcacggataaaaccggcaccgtcgccatctacaacgccgagtacgacatcacgctgctgtatctgcactgcgagaacagcatcgtccgccgcggcgacacggttgaagcgggcgcgatgattgccaaagagggcaagaagaacatcaagggcggcgacaagacgcattacacccatgtggagctgcgcaagggccgccacacctcctccagcccgtaccgcgacatcgtgctgaccagcgactgcccctacgccgtgatgcagcaggcgctgggcgtggtggaatccggccgtcagccgatcaccgccgccgccgtgacgcaggcgcagcgcatgcgcgaggaagccgaagcgaaggccaaggccgaagcggaagccgcgcagcgagccgccgaggaagaggcgaaggccaaggccgaggcggagctcaattcggatatcacgatcgtggacaacctgccgggcacgaacgcgggctacggcttcagcgacgcaacgaccgcgccgcaggccaccgcgacccccgtgccggaggccacgctgccgccgaccaacccctaa

SEQ ID NO: 299 - DNA, 1707 bp, Unknown
  Unknown gut bacteria
atggaaaaggaactgaccagagagaccgttgacccgcgctatacgtgggatttgacccggatttacgccagcgacgaggcgtgggaggaggcttttgccgccgtcaaggcgcaggccgaggcgtttggcaagcgcgcgggcacgctgagccatgggcgcgaggccgtgctcgacgcgctgaccgcgatgatgcggatggacgagacgtttttcgcgctgcatgcgtatgcgatgatgaaaaacaacgaggacagcacgaacgcgaaatatcaggcgatgagcgaccgcgcgggcacgctggcgggcgttgtggcggcggcctgctcgttcatggagccggagctgctggcgcttgaagagggcgaaatcgagaaaatgatcgcagacccggcgtttgcggaatacgaccgctatctctccggcgtgctgcgcatgaaggcgcgcacgctgacggctagcgaggaaaagctgatggccatggcgagcgacgcctgcaacgcggcggcgaccgcctatgaaatgctctcctacgccgatatgaatctgggcaagacccgcggcgagaacggcgaaaaggtgcagctgacggacgcgcgcctgctctccctgctctccagcaaggatcgcgccgtgcgcaaggcggcttataccaacattatgaacggctacaacaagttcggcaacacgattgccgcgacctacgccggtcaggtcaaggccgatatcttcaacagccgcgcgcatcgctttgacagcagccgtcaggccgccatgtttccggacgagatcgacgaaaaggtgtacgacagcctgatcgaggcggtgcacggcggcatcgggacgctgaacgagtatctttccgtcaagaaggagcagctcggcgtgccggttctgcacatgtacgacctgtacgcggaagcggagaacagctttgaaatcggcatggacatcgaggaagcgttcaaagtgttcctggaagcggtcaagccgctgggcgaggattacgtgaaggacgcgagccgcgcgctcccggagcgctggatcgacgtgtacgagacgaagaacaagcgttccggcgcgtatagctgcggcagcgcgtaccgcaccacgccctatgtgctgctcaaccacaagaacacgtatgacggcctgtccaccctctgccacgagatgggtcacgcgatgcacagcttctattccaacaagaatcagccgttcgccaaggcggattacacgatcttcgtcgccgaggtggcttccacctgcaacgagatcctgctctccgaatacctgcgcgagcagtacgcgggcaataagcaggcgcagatcgcgctgatcggttcgctgctccagcatttccgcacgacggtgttccgccagacgatgttcgcggagttcgagtacaaggcgcactgcatggcggaaagcggcgagagcctgacccgcgacagcctgagcgcgatgtattacgacctcaacaagctctattacggcggcgcgtgcaaggtcgatcgggaagtggcctacgagtggatgcgcatcccgcacttctataattcgttctatgtctataaatatgcgacgagcttctgcgcggcagtgacgctctcccgcgggattctcgacggcgacaaggagaagctggcggcctatcgccggttcctgacgctgggcggcagcatggccccgattgaggagctgaaggtc

SEQ ID NO: 300 - DNA, 3186 bp, Unknown
  Unknown gut bacteria
atgtttctggtgccgtcgcaatacaccttgcaggcggagctggagatcatggagcggctgcacgtcagcggctcgtttctgatcgacgtgctctcgccgaaacggctccagtcgcgcgtcttcgaactggcgggtatgccgaagcagacccttttcgacgagcgcggcaaatgcatggtgctcagctcgatcatcgagtcgcagaaggacgagctgagcgtgtatcgcggcgcggcgcagaacggatcatccggcttcacgacgcgcatgtccaacatgatcgcgtcgctcaaacgcagcggcctgtcggcggccgacgtggcgaggagcgccgaaagcatggacacggaaagccccgcgagggccaagctcggcgatattgcgcggatctacgcggcctacgagcagcggatggcgggcgaattggccgacgcggaggacatatcgcgggagatgtgcgcgcggttcgaggcctccggcgtgttcaatgggcagaatgtgttcgtatacggttttgacatgattacgccgacgtttgcggcggagctgctgagcatcgcgccgcgctgccgaacgctgacgctggccatcgagacggacgcgaacgccgcgccggacggacggctctttgcgccggtcaatttcagcttgcagcggctggaaaggctggcgaaggaacgcggaatcgccgtggagcgcgagacgctggatgcggagctggacgcgccgcgggatatccggttcatggaaaaacggctgtacgcgctgggcacagcgccctgcatggacgagccgacggcgattgagctgctcgcggcgagcggaaagcggcaggaggtgcatctggcggcggcgagaatacgccgtctggcggcgatgggggaggacgtttcgcagatggcggtcgtctatcccgaacagagcggatacggcgcgctgctgcaaaacattctgccgatgtacggccttgcgacatatgtggcggaaaaacgcaaggcgggcgcgcatccgctgagccgctttatcctcagcgcgctggcggcgatttccgccgggtggcggctgtcggatattctggaatgtgcgcagagcggcttcttgggcttgacgcaggaggcgctggatcgcttctgcgcgtattgcgaaggggcggatgtgcgcggcgaggccatgcgcaagccgtttcgctatcccaagggcgtgacggaggaggcgctcggtgcgctggaagagagccgaaagcaggtgatggagccgcttttggcgctccaacgcggcttgcaggcggcaaagacggcggacgacaccatccaagccatcctgacgctgctggaaagcgtccatgcgtatgaaacgctggaagacatgcgcgacgagctgaacgccgccgatctcgcggcggaggcgcaggactgcgcgcaggtctggaacgcgatgatgacgacgctcgaccagcttcacacactgctcggcgggcaggccgttccggcgaaaatcgtgctggagctgcttcaaaacggtctttccgcgctcgagctggcggcgcttccgcccgcggacggcgcgatcatctgcggcgaaatcggcaatgtgcgcacggcgcaggttcggacgctcttcgccatcgggatgaacgatatgccggggaacagcgataacggcctgctcaccgtcggcgaacagctggcggcgcaggaggccagcggcgcgtatctgggcatgaccccgcaggagagcgccgcgctcggccagctcgacgagctgaaagcgctgtccggggcgaaggagcgggtgatcgtctcttacgccgtggcggatgaaacggggcgcgcgctgcgcgagggcgcggcggtgcaggcgcttcgaaggctgtttcccaacatgccggtttacggcgggctggcgcaggaggagcgcgaggccatgctctgcgcgcgaaccccggcgcttgaggcgctggcggttgagctttcggaggttgcggacgggcggcgcgagctgggcgcggcgtatgcggcggccgcggcggcgctctccgcggatgaaacggggaagcaggcgctgctcggcgtgacgcgcgggctgggcgatcccccggcaaagcggatgacgggcacgctggcgcgcacactgtatgggcggccggtcagcagcgtctcccggctggagacgtttgcccagtgcccgtatcagcatttcgtccgatacggccttgcgccgcagcgggagcagcagccgggcgtggacgcggccgagctgggcacgctgtaccatgaggccgctgagcgcttcaccgaggccgtgacggcgcggccagaatttccagaggtgccgcaggcggtctgcgacaggctgatggatgaagccgtttcgccgctgatcgacgcctggcgggaatccccgatgggggagagcaagcgcggcgaggcggttgcacgacggattcgccgaacggccaaaaggacggcgcgcaacatcctctcgcaatacgcggacggcagcttccgcccgctgcggatggagtttgtcttcgggcagaacggcctgtcgccgattgtgcttgaattgagcgacggcacgtttgtctatttgcaggggcggatcgaccgcgtgcatgtgatgacgggcggcggcctgcgcgtgattgattacaagagtggcgctcggaagtttgatccgacgctggtttactggggcttgcagctccagctcctgctctatctggcggcggcgctgtcgcgcgttcccggctcgcatgcggcggaattcttctattgccgaatcgccgatccgacagtcaagaccgaatcgcgcatccgcgaggaagtggaaaagcagatcgccaagaagctgtcgcttcagggcatttcgctcagcgacgtggccatcctccgcgcgcagggcggcagcgtcgcgtcgatggtcaccaaggacggaaagccgaacggccgttatgccgcgtcgatggtggacgaggcggggatggaaaagctgctggattttgcaaagcgcaaggcaacggagctggcgggggaaatctatcgcggcgaaatggacgattcgcccgttgaacgcggcgcgtttaacgcctgccaaaactgcgagtattcggccatctgcgcctttgacccgatgcgaaagccgcgcagacggttgacggccaagaagctggacgatcttttgtaa

SEQ ID NO: 301 - DNA, 945 bp, Unknown
  Unknown gut bacteria
atgatccgttttcccacttatgaatcctgtaccctctgccccagaatgtgccgcattgaccgcagccgcaaaaccggctactgcggatgtaccgttcagttaaaggctgccagggcagcactccacaaatgggaagaaccctgtctgagcgggccggagtgggccagaggcggaagcggaaccgtctttttttccggatgtacccttaaatgctgcttctgccagaattatcccatcagcagcgaacaattcggaaaggagctgacttctaatgagttggctgatatctttctccgtctggaagatcagggggcctataatatcaatcttgtcacccccactcagtttctcccctcaatccttcctgctctggatcaggttcgctcccgcctttcgatcccgatcgtatataactgcggcggctatgaacgtcctgagatcgtagaatatttaaaggattatgtagatatctggcttcctgatttaaagtaccatgacagcgctctttctgcccgtctgtcaaactgcgggaactactttgaagccgcttcccgtgctatctatcagatgatccttcagacaggcgctccggtatttgaggaacacgcccctgaggagccctcccagccttccttcctgcttatgaaaaaaggcgtaatcctgcgccatatggttctccccggacacagggatgattccatcgccctgatggaatgggtcagcagagagcttccaaaaggccagtacctgttaagccttttaagccagtacacccccttctaccatagctgcgaccatccggatatcaatcgtcggatcacctcctatgaataccagaaggtagtggatgcagcgctctctctgggacttactgagggatttatacaggaaaaaagcagcgcaaaagaagaatatacgccgccctttgatctaaaaggtctgtga

SEQ ID NO: 302 - DNA, 891 bp, Unknown
  Unknown gut bacteria
ctggaagctgacaggaatgataaaataaaaatgatccatactagtcataaacaggaggaacccaacatgaaattcagtgaaatgccctatgaacggattgattttgatgccgccaaagaggagctttcctctattataaaggcttttcaggaagccggtacgcctcaggaacagatggaggtccacagacgctactataagctgatgggccgcatcaaaacccaggctactctggcggaaatccgtcacagtattgataccacagatcccttttatgaggaagagaaaacgtattatgaccaggaaatgcccgcattttccaatcaggaggtgcagtataagaagctcctctttgcttctccataccgcaaggagctggagctggtcatcggcgggcctgcatttaaaaatattgagcttgcggcaaagtctgtaagcgaggcagtgatccctttgatgcaggaagaaaatgcccttgtgacagagtacgaaaaactgcttgccggcgcaaagattgactggaagggaaaactccttaatctttccatgatgacgccatatttaaaccatgaggatcgggaaatccggaaaaaggcggctgcaaaggtgaatgcgttttatgaggggattgcagaccagctggatgaactgtatgataagctggtaaaaaaccgtacggcgcaggcaaagaagctcggctttgagacctatacagatctgggctactgtcgtatgaaccgcaacagctacggaagaaaagaggtagagcagttccgggatcagattaaaaaggactgggtgccctttgcggaaaaaatgtgggaaaaccgcaggaaacgtctgggtcttgacaccttgtaccacatggacgagggcttaagctttccgtag

SEQ ID NO: 303 - DNA, 531 bp, Unknown
  Unknown gut bacteria
gcgttagatttggtagaaaaagggctggttacggatcagatcgtgcttactgtgggctatgacagggaaaatctgaccgatccgttgcgcagaggcgcctatgggggagagatcacctccgaccggtatggccgtcctgttccaaagcatgcacacggtacccggaatctggatcagcccacctcctcagccagaaagctcagggaagcggcggcagctctttttgaccggatcgcggatccggggcttctggttcgcaggctttatgtgacagccggacgggccgtgccggaggaaaatataaaaaaagaagaggtttatgaacagctggatctgtttaccgattatatggcgttagagcagcagagaaagaaggaaaatgaggcgctggaacgggaaaagaaaatgcagcaggctatggtggatattcggaaaaagtttgggaaaaacgctattttaaagggaatgaatctggaggaaggcgctacggccagagaacgaaaccgtcagatcggaggtcataaagcatga

SEQ ID NO: 304 - DNA, 651 bp, Unknown
  Unknown gut bacteria
atgaacggcagtaaggtagatttgattcttaaggagttgatggagcgctatccggtactgatgcctgtaaaagaggacatttttaagacatatgaaattctcagggatgcctttttgcaggatggaacgcttctcatagccggaaacggcggaagctgtgcggacagcgagcatattgtgggggaactgatgaaggggtttgtaaaacggcgtccggtgacttctgcctttgaacagaagcttaaggaggcagagccggagcttggagaggaactggcaaagcggcttcagggggctcttcctgccattgcccttacgggtcatcccgccctttccacagcctttttaaatgatgtggacggaagcatgggctttgcacagcaggtctatggttacggaagaaagggagacgtatttttaggaattaccacctccggaaattcaaagaatatcctgtatgcagcagctgtggcaaaagcagcaggcttaaaggtcattggccttacaggaagggatggcggccgtttaaaggcgatgacggatgcctgtattgtggttccggagcaggaaacctttaagatacaggaatttcatctgccggtttatcatgccctgtgcctgatgttagaggagtatttttatgaggtataa

SEQ ID NO: 305 - DNA, 1929 bp, Unknown
  Unknown gut bacteria
atgaatagtggaaagtggcagataaacagggcaggactggtggatttttggtactatgatgaggaaacgtttgaatgttcggaaggccgtatgcttttaagaggttcaaatggttcgggaaaatcagttaccatgcagagctttattcctcttttactggatggaaatatgcgtccggagaggctggacccatttggttcccgtgcaaggaaaatggagaattatcttttggaggaaaacgatgaccgggatgagagaaccggatatctttatatggaatttaagcgtctgggaagtgaagaatatctgactttgggactgggaatccgtgcaagaaagaataaaaagctggaatcctggtatttttgtattacggataacagacgggtgggatatgatatctttttgtataaagatctggaaaataaaatcacctgttctaaaattgagctaaaaaacaggattggcgatggcgggaaggtgatggagactcaaagcgaatatgcagcctgtgtgaatcgccttctgtttggatttgaaacccaggaagagtataaggaactgctggagcttttgatccagcttcgtacgccaaagctttctaaagattttaagcctaccgttattaatgaaattctgagcagttcgctgcagaccttatcggaagatgacttgcggcccatgtctgaggcgattgaaaatatggataatttgaaaacaaatctggacagcttaaatgagagcatccggggggccagacagattgaaaaaatctacgaccagtataaccggatcgtactttataataaagcccgtatgtttgcagaagctggaaatgcctatgaagactgtgaccgcgcggggaaaaaacagttggaagaattgaatgaaaaaacagtgatgctggaaaaagaaaaacagcggtatcaggagcttgcgcgggaggaagaagttttaaagaaggaaaaagaatccctcacaaaaagcgatgcggcaaagttaaaggaacaggaactgaaattaacgggagaactgcgggaaaaggcagaggaaaagtgtgtaaaagagagacaggagcaggagaaaaaggataagctgcaggaaacggagagacggctgaaacggggagaggaagaaaatgaacgcatctggggagagatagaaacctgcattgaggaaatggaggatgagctggaagacgtaccgtttgatgagttttcctttttgaaaaaagaacttctggaagataaaaatccggattattcgtttgagtcccatgtacagcttttgaaaaggtatacggagcaggcagaacggggaaaagagggattgacggaggaaaaaaactgccaggaaaaatatgatcgttacttaaaggaactggatttgtgtcaggcagaacgaaatggggcagagagggaggtgcagcaatatgaacgtcttttgcaggaaacaaaggcagagctgacagaacaggtatatctctgggaacgcagcaatgaagagctttctcttacgccggatgtgatgcaggagatttccagaaaaattcaggggtatgaacaggggagcgattattctgaaatacgggagctggcgaaacaaacattatatgaaaaggaaagcgaatttaccagagaacgaatgctgctggagaaggagatggaaaatgagagcggtgaattacagcgattagaggaggagctgaccgagtggaagacgcagaaagagccggaaccggagcagccggaatgcgtacagaaaaaccgcagtcttttaaaagaaaaagggattccctatcagcagttttataagaccatagagtttggaacagggatggaatcacagcaggcagaccgcctggaagaggctcttcagcagatgggaatactggatgcattgatcatttcggaagaatacagagacaaa

SEQ ID NO: 306 - DNA, 765 bp, Unknown
  Unknown gut bacteria
ctttatgatggtcttctggacgttgagaacgttgcttggcggaggtttgatgggcgctggctgatggttcttggagttgtctctttcagccttttatttggcgtagtgtatgcgggaatgggatggatgaaaaaaaggggcctgtcagggagaggacatcagatcgcaggaatgatcgccgcatattttatttcgtgttttatgctgggatttcttaccttgggaattttgaaggcgtctgatagaggcatgtttatttcagatgaaaaagaaacctatgagtatgggggaagaacctgggaggtgtctcaggatgagcttcctcttaagctggaagatctgacgggggagagctatgaggaatatatcagagaaaatgataaaaaggaatccctgcttctcaggcaggagagcatttcccagaggcctcgcctggatgcggaaaatttcagggaactgccggaactggagtatagcctgataactgtgaagctgccggtgctttatgaccggtgcaggcaggctctgatccgggaaggagagtgccattatccggagggagacaggatttatcaggaagaggatgcgaggccctggggagccatagaagcataccgtatctatgattccagatatggtttccgaaatcagtatctgatatgctgggaaaatgttcttgcggaaatccatttcccatgggagccggatgaggggcagaaggggatcgtgggaaaaaatttaaataaattagcactcaactcttga

SEQ ID NO: 307 - DNA, 1083 bp, Unknown
  Unknown gut bacteria
atgatattggaacagataaaggggccggaggaattaaagcagctttcatcccgtgaactggccattctggcagaagagatacgcacctttctgatcgaaaagatcagccgtacaggaggccatctggcttctaatttaggcgtggtggagcttacaattgctctgtttaaaacatttgatctgcctcaggataagattatctgggatgtgggccatcagtcttatacccataagatattaagcggacgcatggctgagtttgacgagctgcgccagtatggagggatcagcggctttcctaaacgaaaggaaagcccctatgattcctttgacacgggccacagctccacctctatttctgccggccttggtattgcccagggccgggatctgttgggagaggattaccgggtggtgtccgtgatcggagacggcgcgctcaccggcggcatggcttacgaggctttaaataatgctgcccgtatgaaaaagaatttcattattatcttaaatgataatgaaatgtctatatcagaaaatgtaggcggtatgtccaggtatttaagcggactcagaaccggaaccggctacaatgatttaaaaaagaatatcgtggaggctttagagcgggtaccgttggtgggaaatgcggtgatcgacaagctaaagcgcaccaaggacagcattaagcagctgtttattcctggaatgctttttgaaaatatggggatcacctacctgggtcctgtggacggccacaatatacctgccctgtgcaaggttcttaaagaggctaagaaattagaccacgcagttctgatccatgtgatcacaaaaaagggaaagggatataaacctgcggagaagaatccttccatatttcacggtgtgggtccttttgatattgcaacgggaaaagaaaatgggaaaaagaaggaaacctcctatacagaggtattttccagaaagctgtgccagcttggggaaacccatccaaagctggtagccgtgacagcggctatgcctgacggtacgggacttgcagcttttggaaaaaactttccggaccgcttttttgatgtg

SEQ ID NO: 308 - DNA, 1170 bp, Unknown
  Unknown gut bacteria
tcaggaggacttgaaaagctggcgggaaaagtgggcgggagattttcgcttttatttactttaaccgcgtatctggcgatcggccccttcctggcgattcccagaactgcaagcacttcctttgagatgacgctgcttcctgttctcagcggtgcgggagtccagctgggagattatctgggccatacgggcatgacggttcagttttgggctcagttgggatattcctttgtgttttttgccattgcccttcttttgtccgttcatccggaaaccctttcagaacgtttgggcaaggtgacctgtccggcactgttgatcctgattgcagtattatttacgggaaggctgatctggcccatggagggagtgggcgagacagtggcagaatttgcggcaggagcttcggtgagaggctttatggaagggtatcagaccatggatacgcttgcggctttaaattttggcattatcatttctcttaatataagaaataaggggatttccagagaggattccgtaatccgggaaacgataaaggccggacttatggcggggatccttttatctctggtctatggtgctttggcctatattggaggccctgtaggacagcaggcgggagcaggcaccaacggagccagaatcctgacctttgtggccggagatctttttggcatttcgggaatggtgattttggggattatcttttttatcgcctgcctgaatacctgtgtgggactgatctgctgctgcagccagtttttttctactctggcgccatgcgttggatatcggatatggacggtggtttttgcagttatcagccttttgatttccagcgcgggactggaccgtattttgaaatattccgttcctgttttaaatgccgtttatccgatcgcgattgttctcattgctctagcttttatggagcggtttacagggcgcaggatctgggtgtaccgtctgtcgatcctgtttacggcggcggtaagcgttgtctggaccatggatcaggcagctcttgcgattccgggcataacggaaggtatgaggcatcttccaggctatgctcccggtcttggatggctgctgccggctgtgattggcgggctgcttggaaggatgattcccggaggaaatgaaacgggggatgggcaggggtaa

SEQ ID NO: 309 - DNA, 774 bp, Unknown
  Unknown gut bacteria
atgatttttgatacacacgcccattatgatgatgaggcatttgatgatgacagagaggcacttttaggcagtctggcatctcagggcatacaggcagtgaccaatgtggctgccagcttaaaaagctgtgaaacgactctggctctcacagagcagtatccctttatctatggggccataggagtccatcccagcgaaacagcagagctggatgcctgcggaatggaccggatgaaggcctggtgcgcttcagagaagatccgggcagtaggagaaatcggtctggattactactgggaggaaccggagcatgagattcagaagaaatggtttgcagcccagcttgatctggcaaaggagctgaagcttcctgtgatcatccacagccgggatgcggcaaaagacactctggatattatgaaggccgaacatgcagaggagcttggaggcgtgatccactgcttttcctacacaaaggaaatggccagagaatacctgaatatgggcttttatctgggaatcggcggcgtcctcacctttaaaaatgctaaaaagctggtggaggtggcagaatatgcgcctttaagctccattgtactggaaacggactgcccctatctggctccggtgccatttcgtggaacgcgcaattcttccctgaatctgggaattgtagcggagcgtctggcacagatcaagggaaccgaccgggaaactgtggaacggatcacctgggaaaatgcagaacggttataccggctgaaggagaattga

SEQ ID NO: 310 - DNA, 1131 bp, Unknown
  Unknown gut bacteria
atggcgcttaccctggctgcaggaagcattacaggatgttctgcttcttctgcaaaaacagaaacggctaaagaaagcatgcagagccaagctgaaacgaaaacagctgaacagagcactcaggcagagaaaacatctgaggcagccgatgcggcgggagagcgggagataacggatatggcaggccgcacggttgtggtgccggatgaaattgaaacggtattctcttccagtactgtaacggctatttttatgtatacgctggctccggataagcttcttggctggaattatgagctgaatgagctggaaaagagcattattttggaagaatatcacgatcttcctaattttggaatgggcgattccatcaattatgaggcggttattgcagcagaccccaccattgcagtcaatgtgggaaccatcaatgataagatgatatcagactgcgataagctgtcaaagagtctgggagttcctgttgtggctgtggacggagatctgtcggcttccgcagaagcttaccgctttatgggagaactgctgggggaggaggaacaggccgaaaagctcgcttcctatgcggaaaagacctttgcagatattgaaaaaatggaggttcctgaggacaaaaaggtacgtatttattatggaaacggagaggattccctggagaccgctccggccggctctgctcacggacagatcatcgatatggtaaatgcagtcaatgtggcagatctggaaatgggagaaggctccagagtgcagatttctgccgagcagcttcttgcctgggatccggatgtaattgtggtaaacggagagccaaaggcggatacgagcggcgcttcggctgctgaggcaattctggccaatccggattacgcatctttaaaggcagtgcaggatcagcaggtatacggtacgccaaatacgccctttagctggatggaccgtcctatggggccaaaccgtattgtgggaatccgctggctgtccggcctcatctatccggagtatctgaattacaatgtggatgaagaagtaaaggaattctttgatctgttctaccatgtacagcttacagatgagaaactggaaaatatttacagtggaacggtataa

SEQ ID NO: 311 - DNA, 825 bp, Unknown
  Unknown gut bacteria
acggggcagattatatatgaaaaaggggcggatgataaaagaaatcctgccagcgttacaaaggtcatgacgctgatcctgatttttgatgccctggcagaagggaagatccacctttccgatgaggtcgttaccagcgctcatgcaaagtccatgggcggttcccaggtgtttttggaggaaggggaaacgcagacggtggaaacactgattaaatgcatcgtgatcgcatcgggaaatgatgcttctgtagccatggcggagtatatttccggtacagaggaggcctttgtacagcagatgaatgaacgtgccgaaggtctggggatgacgaaaacccattttgtggactgctgcggtcttacagaggatccctcccatgtgacaactgccagagatattgctcttatgagccgggagctgatcgatcagtatcctcagatccacaattattcaacaatctggatggaaaatattactcatgtgacaaaacaggggacaaaggaatttggtctttccaacacaaataaacttttgcggatggcaacgaattttaaggttaccggcttaaagacaggctccacctctctggcaaaatactgtctgtcagctacggcagagaaggatggggtgcgcctgatcgcttcgatcatggctgctcctgatttcaaggcacgttttgcagacgcacagacgctgttaaactatggctatgcaaactgtaagctttatgaggataaagaggggatcacacttccggaaatttcggtagaaggaggaattaaaagcggggcagagttggttttgaacggtacattcagatat

SEQ ID NO: 312 - DNA, 663 bp, Unknown
  Unknown gut bacteria
cgccaggcgctttccgtttttttcagcatttggcggatcgggctggctccctttggaattaccatgtgcccgatgatttcgctgctccttatgaaccgggcgtcccttcagtacggaggttctgaaggtgtggcctgctatgcctgtattgcctatgtgatcacaattatgtatctgatccttcagggggtgggggatgggagtcagcctctgatgagccgcttttacggcgaggataataaaaaagaggtccgcattacgaggaacatggcgtatgcagccgccgccgtcatgggagtggcgctggcagtgcttttgtattggtgcagaaacggaatcggagttctgtttggagcatccgaaaccgtatctctggcagttggaacggatctgtatatatttctggcggcggtgccgtttctggcctttctgcgagttacaactgctggcttttacgccacagaacagacccgattttcctatatgatcgtttatggagaacccatatttttagcccttctgcttcctgtgctcccggcctggatgggattaaagggcgtctggtggagccagaccggagcccagatccttacggcccttatgggctgggggcttaagctctggtcagaccgggtgcatggatacactgcagatgcggtttaa

SEQ ID NO: 313 - DNA, 903 bp, Unknown
  Unknown gut bacteria
atgaaaaaaacaggagcagtcattgtggcggcaggccataaaaacagaggaacggcctttttgcccatgctcccggtaggggacagcaccgtgatccgtcggatcattattacgatgaggcgggtggggattgatcctattgtggtagtgacgggaaaacagggagatgagctggagaagcatataagcgatctggaggttatttccctgcgcaatcccgattacgaaatggaacagatgttcgacagcatttccatgggtcttcgctacatcagaggactgtgtacacagacactgatccttcctgctaaatttccgcttcttttgcgtgatacgctggaaaaaatgctttcagaagagggcgatattatccggccggtttttgacggaaaaagaggccatccggttcttatatcggagcacgcagccgggaaagtgcttgaatacacgggaaatcggggcttgcggggagcactttttgaagcggagcagtgctttgtgacaaaggaagtacctgtggaagatcagggaattatctttgcagtggaaacggatgaagacagtacggaacgggaaatggaaaaacagaagatccaggtgcatccggaggtgcgtctggtcgttcggagaaatgatcccttctttgggccgctgcttgcccgttttctcaccgtggtttgtcatacaggttccatgcagacggcctgcaggcagctgcacatatcctataccaaaggctggaagcttttaaaggaggcggagcatcagctgggctatggcctccttgtatcccggtcaggaggaacagaggggggattttcctgtcttacagagaagggggaagattttctaagacgatatctgtgcatggaagaagaactgcgcaaagaaagcgaacggctg

SEQ ID NO: 314 - DNA, 885 bp, Unknown
  Unknown gut bacteria
atgggatatgtctatctgctctgcgttgccctgatgttcagcttcggcggtacctgcgtcaaactgatcagcccttattttaatgcttcatggattacctttttccgttttttcattggagtggtgtggctgctcatcttaaagtgtatcctgaggcagccatttcaaaaaaacttaaaacaggccctcttatcctgctggaaatggatcctgttcggagcctttatcaaatggatggcctatctgacagaaaactacgccttaagccacggactttcctatggaaatattgtgacccagcctgcccagaccctgtttctgacgctggtaagcgtactgtgctttaaggagaagctgtcccccagaaagggattctgtatctttctctgcatcggcggcgttctgtgcatctctttaaacggccgtcctctggatgtattttttaaagaaaatctcctttttaccggcctgtttatcctgtccggtatctgtgcaggctgccatgtgctttcccagaaaatggtagctggacggctggatattatcgacagcaatctggctatatttaccctgtccggtcttttttccctgatcccggccgcagagcctgtatttacagggaaaatagcttttatccgtccggatctggcctgcatccttgccatccttgccttcggctttatcacgggaatgggcttttacctcaatgccaaagccatccccctggtgcccttttatatggttcccgtgatccagagcatgatggccgtattcgccattctctggggcgtattcttctttcacgaaacggtcactggctggatcatcggcggaacagccgcttttatgatcggggtcatcgggctgcagatgaagaataattaa

SEQ ID NO: 315 - DNA, 660 bp, Unknown
  Unknown gut bacteria
atggatcttagtaataatttttcagtctggaaccacctgaccccggcacagcaggagcttttatccacccatcttatctgccgggatgtgaaaaaaggcactgttttgtataatggaagctctgactgcctgggactcgtacttataaaaaaaggccagctgcgggtctatatgatttccgaggaaggacgtgaggtcacgctgtaccggcttttggagcgggatatctgtcttttttctgcttcctgcattatgaaaaatatccagtttgacattacgatcgaggcggaaaaggattctaacatctgcatcataccagcagtgatctacaaacgtctcatggaggaatctgctgctgtctccaattatacaaatgagatcatggcagcccgcttttctgaggtgatgtggctcattgaacagatcatgtggaaaacctttgaccggagactggcctcctttcttttagaggaaatggctctggaaggaagttccggattaaaaatcacccatgaaaccattgcaggccatctgggtactgccagagaggtagtaactcggatgctgcgttacttccaggaggaaggcatggtaaaactcagccgggggatgattaacattaccgatgaaaaacgacttagaaaactggccgaatcataa

SEQ ID NO: 316 - DNA, 573 bp, Unknown
  Unknown gut bacteria
atgccgggatttacaacccattatatattaggaatgaaggcatataatgaccttcctgccaactatcttaagtttgtcattacaaagtaccgctggctgtatcagctgggacttcaggggccggatatgtttttttacaatctccctatcctgcgtcacagagaccacagaaatgtaggctcctatatgcacgagcatcgtgtaaatgattttttccgctgcgcctttgaccgcctttccaggattgaatccaagcagcagaaggaagagggaatggcttttctgtgcggttttatctgtcattatattggagattccatctgccatccttatgtctatggacggatcggctatgatgtacagaatccggggggatactaccatggccttcatgccaagctggaaaatgatattgacgcccttcttctgaaaaaatataaaaagaaaaagccctcccagtttaatcaggcagccacgatctgtctcaatgggatggaaacacagtttatttccgtattcctttccgattgtatcaatgatgcgttttaccgtctgagcagcaaaaatcattat

SEQ ID NO: 317 - DNA, 504 bp, Unknown
  Unknown gut bacteria
atgacgtataagatcattggagacagctgtctggatctgacagaggaattaaaaaaggatccgggatttcagatgattcccctgacccttcaggtggggaatgttcaggtgatagatgacgaaacctttgatcagagcgcattcatagagatggtaaaggcctgcccggagtgtcccaagacggcctgcccttcgccggagagctttaaaaaggcatatgaggaggcagatgtggacgcagtatttgtgatcaccctttccaaccatctgagcggcagctataattctgccgtgctggcaaaggagctgtatgaggaggaaaagaaggaagccggtgagccggtgacaaagaagattgctgtgatcgattccctttctgcctcctcaggagaactggatcaggcgctttatatccgggatctgtgtgaacaggggctgaattttgagacagttgcagaaatggcagaggcttacagccacaggatgaagacctacttcgtactg

SEQ ID NO: 318 - DNA, 981 bp, Unknown
  Unknown gut bacteria
atgaaaacagaaattttaaaaatgctgaaggaaacaccagattttctgtcgggccagcagctgtgcgagggcctgggggtttccagaacagctgtatggaaagcgatacgccagctggaggaggagggctatgccattgaggcggtgagaaacagaggataccgtctcgtggcttctctggatgagatcacagccccggaacttaaaaaaggtctttccaccgtgtggctggggtctcaggtgaactgcttttatgagacagattccactaaccgtcaggccagaaaactggcggaggagggtgcaccccatggaactcttgttgcagcagacagccagagcgcaggaaaaggaagaagaggacgggcctgggcctctcctcgcggtgtgggagtctggatgagttttatacttcgccctgagttgtctccgtcaaaagcctctatgctgacgctggtggccgggatggcagtggtggccgggatccggcagatttcgggtctgtcccctcagatcaagtggccaaatgatgctgtggtcgatgggaaaaagatttgcggcatcttaacggagatgagcacagaggaggattccatccgctatgtagtagtggggatcggtatcaatgtaaatacagaaagctttccacctgaaatttcagacactgctacctctttaaagctgtctctgggccatgagcttaaacgggcgcctttgatcggagcggtgcttaagagctttgagcagtattacagccgttttatggaatatggtgatatgacagggcttatggatgagtacaatgaaatgcttgcaaaccggaaacgacaggttcgcgtgttagaccctcacggttcctatgagggtatggctcttggaattgataaagaaggctgtcttttggtgaagagagaggatgattctgtatcagcagttatttcaggagaggtatctgtgcgggggatatacggctatgtgtga

SEQ ID NO: 319 - DNA, 567 bp, Unknown
  Unknown gut bacteria
ccaaacctttctacctgtctcgttactgtggtgatcgtgttggggattgtgttcgccagcggcatcagctaccgctggatcgtggggacactggcagttgtcatccctatgattgcgacaggcgtgtaccttcttcttcatggtatgatcccgtttattaaagaataccaggcgggacgtatcttagcctggttttacccagagcagtatggagaggcacgttatcagcagaataactccattatcgcgatcggttccggtcagctgcatggaaaggggctttacaacactacgattgcatctgtaaaaaacggtaattttctttcggaggagcagactgattttatctttgccgttatcggtgaggagcttggttttatcggctgcgccatcgtgattttgctgtttttactgattgtatatgaatgtcttatgatggcagccagggcaaaagatatggccggcaggctgttatgtaccggtatggctacgctcattgcatttcagagttttgccaatatcgcagttgctacaggtatttttcccaataccggacttccgcttccg

SEQ ID NO: 320 - DNA, 654 bp, Unknown
  Unknown gut bacteria
atgattgtaaatgacagaatcacagactatatccagtccctggaaaccagtcagggaccggttttggatgaaatagaaaaagaggctctggatcagtttgtgcctatcatcagaaaggagacggcagcttttttaagaaccatgacggcagcccttaagccgtcggccatactggagatcggcacggccgtcgggtattctgctttgcagatgtgccgggtgatgccggagcactgccgcattactaccattgaaaagtatgagaaacgccttcccatcgccagagagaattttcatcgggcaggagaaagcggacggatcacacttttagagggcgatgcagacgtgcatctgaaggagctggcaaaaaaaggctgtcagtttgatcttgtgtttatggatgcagccaaggggcagtatctaaactggcttcccatggtgcttgatcttatgcccaaaggcgcggtgctcatttccgacaatgtgcttcaggacggcgatatcatccagtcacggtttgccgtggagcgcagaaaccgcaccatccacagccgcatgagagagtacctgtatgagttaaagcacacagaggaactggaaacctccgtgatccccattggagacggagtgacagtcagtacaaaggttagatag

SEQ ID NO: 321 - DNA, 744 bp, Unknown
  Unknown gut bacteria
atgaaaaaatggatgacagtctgcctggccgcagtgacagcagcagtatttatggccggatgcggcagtacaccagatgcaaaggaaacagcaaaggagacagcagcggcttcttcagaggtagaaaccacaaaggcagaaacagcagcagagtctgagaaagagacagcagcggaagacggaacagcccaggcagatgaaaagagtacagcaggtcataaggagagtctggatctgcaggctgcagctggaaagcaccatatagagatcaatgtaaaggattatggcaccattttcgtagagctggacggagacagcgccccgatcacagtggcaaatttcatggatctggcagaacagggattttatgacggacttaccttccatcggatcatcagcggatttatgattcagggaggagatcccatgggaaatggtatgggaggctcagaacgggaaatcaaaggagaattttcctccaatggtgtagagaatgacttatctcacacaagaggcgccatttccatggcacgttcccagatgaaggacagtgcaagctcccagttttttattgtacatgaggacagtacgttcctggacggtgaatacgcctgctttggctatgtaaccgatggtatggaggttgtggacgcaatctgtaaggatactcaggtagaggataataatggtacagttgcaaaggataatcagccggtgatcgacagcattaaggtcattgactga

SEQ ID NO: 322 - DNA, 600 bp, Unknown
  Unknown gut bacteria
atggttacaaaggataaaatcataagaaaaggagagaacgatatgctgtcatttgaaagtgattatacagaaggggcccatgaggccattttaaaacgtctggcggagacaaaccgggagcagactccggggtatggagctgatccctactgtgaagctgcaaaggaaaagattgccggagcctgccgctgcccgcaggcagatatctattttcttacaggggggactcagaccaaccagacggtgatcgattctcttttaaagaactatgagggtgtgatcgctgcccagacgggtcatgtgaatgtccacgaggcaggggcaatcgagtttacaggccataaggttctggctctgcctcagaaaaacggaaagatagagccggagacgttacgggcatatatggaggcgttttataaggatccatcccatgaccatatggtatttccgggcatggtctacatttcccatccgacagagtttggaactctttatacgaaagcagaactgacagctctgtctgaaatctgcggcgagtacgggcttcctctgtttttagacggagcccgcctgggatatggcctgatgagcctggatacg

SEQ ID NO: 323 - DNA, 858 bp, Unknown
  Unknown gut bacteria
atgacagaaaagaaacagcagatccgggattatcttgcaattaccgtaggaacgatccttatcgcgtttgctattaaaaatatttttgatcctgtgagcatggtaaccggaggcgtttcgggcgcggccattattttaaaagaactctggcaggttcctctgtggctgactaatacggttttgaatatcccactgtttttggctgcctttcgtatgatgggctggcagtttatcggacgcactttgtactccacggccatgctgtctgcggctttgtatgtgcttccggagatgggacttgtgaaggaagatatgattttatcggctctttttggcggtgttctcagcggcgtggggacagggcttgtattccttggaggctgtaccacaggcggaacggatatgctggccgtgctgatccggggaaggctgcgccactattcatcggcacagatcatgcaggttttggacggaggtattgtagcagccggcgctcttgtgttcgggatcaggccttctttatatgcgatgatcgccattgtctgcgtatccagagttacggatcgcctgatcgaaggaatgaagttttcaaaagaggcctggatcatttcaaaacaggacaaagagattgcggaagcggtgatggaacgcctgggaagaggagttaccagcataaaagcagtgggtatgtattcaaaagaagagaaaaacctgctgttttgcgtggtttctcccaaggaaattgtaaaaatcaagtcaattgtgcgtgagtttgatccgcatgcgttttttgttgtcagcgacgctcgtgaagttttcggggaagggtttatcgagaaggaagacaggataacataa

SEQ ID NO: 324 - DNA, 519 bp, Unknown
  Unknown gut bacteria
atgaccagaagagaattaagagaacactgttttaaaatgctgttctccgcggatttttataaaaccacagaggaagcaaaggagcagatgtggcagtatttccagtctcctcaggaatatgagacaaatgatgagggaagccttacgatccttcataaagtagagcttacagataaggatatggaatatctgcagacaaaaacaggaaatatagtagataagatccaggaaatcgacagccggatcgatgaggtggctgcaggctggaagacaagacgtatgggaaaggtggagcttactattcttcgtctggccctttacgagatggactatgatgatacggttcctgcaaaggtagcggtgaacgaggcggtggaacttgctaagaagtttggaggaagtgactctccggcttttgtaaatggtgtacttgcaaagtttatccgcaaagaagagacaacgacagagactgaaccggcgaatgagaagactgcgcaggctcaggaaacagaagcgtag

SEQ ID NO: 325 - DNA, 420 bp, Unknown
  Unknown gut bacteria
atgaacaatatctataaaaaacaaaagaatgcacctgctccctcggagaaatttgccgtatgctctctgatctgcggtatcatcggcgttgtcttaagcctgttttatctgcctgtttctcttttaatcggcggtaattattcttcaggcctgatctgcggcgcaggcggcattgtcctggcccttatggcccggaatgcagatcccagccctcgcaaaacccttccgcccaaggccattgccggaatccttttaagcggttttgctattatgctaacctttttctttttctctcagctgatccagttttatgatctgctgcgcgatccggtgaagggtccacagatcaatcagttcctctaccagttccagcagcgccttatggaacagctccaacaggcacagcctccggtacactga

SEQ ID NO: 326 - DNA, 882 bp, Unknown
  Unknown gut bacteria
atgcaggtgtttttaaatgcagtgagaggattttgcatggctctggcagacagcgtacccggagtttccggcgggaccattgcgtttttgcttgggttttatgatgaatttatcaattctttaaatgatttaatggggcgtgacagcaaaaaacgcaaaaaggcgtttctttttctggtaaagctggggattggctggatcattggttttggtctgtccgttttaattcttgccagtctgtttgaagctcacatttatcagatcagctctgtgttctttggccttaccttgtttgctataccgatggttataaaggaagaagcggcggtgataaaaggacaggctggaaatctggtctttacccttttgggcgcagctctggtatttgccatttcctggtttaatccatccggcggagagggcatccgtgtatcagcggatcagctttcattcggattgggcatttatattttctttgctgctatgatcgcaattacagccatggtacttccgggaatttccggctctacccttcttttgatctttggactctatgttcccgttatcggggcgatcaaggagctgctccattttaatttcagttatctgcccgtggtggtcatcttcggcctgggtgttgtcacaggaattattgcgattataaaatttgtaaaaatatgtctggaacgccaccgttcccagacgatctacgccattctgggcctgatgatcggctccctatatgccattcttatggggcccactacgctggatgtgccaaaagctcctgtaagcctttctaccttcagtatcccgttctttattttgggcgggctgattctggctggtctggagcttttaaaggcaaggcttgaatcataa

SEQ ID NO: 327 - DNA, 2079 bp, Unknown
  Unknown gut bacteria
atggcttataaatttgatgcgggatttttaaagaggatcatagaacggatgcagtccagtctgtatattacggaccccgttacccatgagatcctttataccaacggatatatcaaagatgcgtttcattgtgaaaagccggaggggaaatattgctggcagattctacaaaaggatatgaagggtccctgttccttctgtaaaattcctgatctgtataacaaagaattgggagaagctgttgtctggcgggagcataatgaggtttcagggcgcgattatatcaattatgactggctggaggaatggaacgggcgcaggtatcacatacagaattccgtggatattacctcctttcttcagctgtccatcgaggcctctattgacgaactgaccgggctcttaaaccggaatgcgggaaaaaatcatctaagcgaggttctttcctccttaaaggaggacgggctttgtacggtagcgctttgcgatctaaacggattgaaatgggtcaatgacacatatggccatctggaaggcgaccgttttttaaaggttacggcctgtaccatgcaggaagggatggaggcttctgattttgctttccgcctcagcggagatgagttcattctggttttccagaataaggattctgatcaggcagccggtattcttgaggaaatccttgcgcgcttaaaggagcgcagacagtccgttggcatcgattatgaggcaaccttcagctacggtctggtgactgtgaatggaggccacaggctctctgtttccgacgttctttccgtagcggatatgcagatgtatatacgcaagagagattatcacatattatccggaaagcaggcagccagacggctcagcaaagaagcggcgacgagaggaaacgctttttcctatcataaagaccagcttttagacgccctgtcggagagtcttgatgattatatctttgtaggcaatctgaagacaggagagtttcgttatacctggcagatggcggaggactttgggcttcccgggcaggtggtaaaaaatgcagcttccttttggaaacgcaggatccatccggatgacgcaagaatgtttttggacagtaatcaggagattgcagacggaagggcagaccgccatgccattgtataccgggcgaaggcagcagacggcacatggaagcatcttttatgcagagggcggatgtacagagatggaaatggccgcccggagctgtttgcaggggtgatccgcaatctggataaagaacatgaaaagagcctgatggctccaaaaccgggaattgccagaactacggtgggacaaaaggagctggattcctttttgacgacggctattatacgggcttcgaagggaagtgcggataaacctctgggagagaaggaacttcttttttccttccgtttcaatctgaccagagaacggctggaggagctttgggggttggatgagaagcttaacagagagagcagtgacagaagcctttccttccttttaggctacatcaacagccatattgccagcgaggatgacaggaagcggtttggactcagatataacagagaagagatcttgcgggatatcactttaaaacgggcagttccgtcctttgaattcagggaaaaggacagggaaggaaggatctggtgggccagaatggatttccatgcagtgcggcagaatgacggagatcttcttttatatggctatgccagaaacattgatgagcagaaaaagagagagctggcgctggaatacaaagccggaactgatattgtcagcggtttttatgatcagacaaccgtccgccttatgatccagagcatactggaaaataaaaacagcaaaaacggtattcatgctacgctgatcctggatatggatgatttttcaaaaacaggaaaaaattggtccagaggcgaaaaggaagaggttctccgtcaggccagcacgatcctgcgcagcagccttccgcccctttccgtggcaggacggctggagcaggatgtatttctcatcttttactttgatatctcctcagcagatgagatc

SEQ ID NO: 328 - DNA, 1098 bp, Unknown
  Unknown gut bacteria
atgaaaaaatacgattatattctggtaggaagcggtctttatgcaggcgtatttgcctggtatgcaaaaaaacaggggaaaacctgtctggttctggaaaaacgggatcacatagggggaaatatttactgcgaggatgtggaggatatccatgtacataagtatggagcccacattttccatacaagcaataaaaaggtgtgggagtttgtcaattccctggcagagtttaaccggtataccaacagtccggtggcaaattataagggcgagatgtataatatgccctttaatatgaacaccttcagcaagatgtggaacatttccactcctgcccaggcgaaggcgatcattgaggaacagaaaaaagaaatccagggagagccgaagaacctggaggagcaggctatcagtctggtaggccgggaaatttatgaaaaactggtaaagggctatacggagaagcagtggggcagagactgcaaggagcttccttcctttatcatccgccgtctgccggtgcgttatacttatgacaataattatttcaacgatctctatcagggaatccccatcggcggatacaatgtgatgatccataagctgttcgagggatgcgagattgaaactggagtggactatctggaaaacagggagtattacaacagcctgggcggcacggtggtttatacgggaaccattgacggcttttatgattactgcttcggacggctggaatacaggagcctgcggtttgaaacagaggtgctggaggaagaaaatcatcagggagtggctgtggtaaattacacagatagggaaactccttataccaggatcattgagcacaagcactttgagttcggcactcagccaaagactgtgattaccagagagtaccccgtatcctggcaggagggaatggaaccctactatccggtgaatgatgagaaaaaccaggcattataccagaagtatgcaaagctggcagagaaagaggagaatgtaatctttggaggccgtctgggcgagtataagtattacgatatggataaggtgatcgaatctgccatgaagaaggcggaagagatattttaa

SEQ ID NO: 329 - DNA, 741 bp, Unknown
  Unknown gut bacteria
atgagtgaagtcattgtgattacttctggaaaaggcggggtaggcaagacgactacttctgccaatgtgggaacaggactggccgttctgggaaagagagtggtattggttgataccgatatcggtctgcgcaacctggacgtggtgatgggtcttgaaaaccgcattgtctacaatcttgtagacgtggtagaaggaaactgccgtatgaagcaggccctgataagagacaaaagatatccaagcctttaccttctgcccgcggcccagacaagggacaaatcctcggtaaatccggagcagatggttaagctgacagaagacctgaaggaggagtttgattatatccttctggactgtcccgcaggaattgagcagggcttttacaatgccattgcaggagcgggacgggctctggtggtgaccactcccgaagtttcagccattcgcgatgcagaccggatcatcggcctgctggaacacgcgggcattactgaaatcgggctggtagtcaaccggatccgggcggatatggtacgccggggagacatgatgtctttagaagatgtacgggatattttagccgtggatatccttggcgcttttccggatgatggaaacatcgtagtctccaccaatcagggagaacccttggtaggaatagggtccgccgccggacaggcttacctgaatgtatgccgcaggctcttagggcagaatatccccatcgaatcccccggc

SEQ ID NO: 330 - DNA, 780 bp, Unknown
  Unknown gut bacteria
atgaccgcctacgcagataattctgaggatgcaaaagctctttatcaccaggtatccgaaactcagaaatccattacagacatgaacgcctttgctgattttaagatttccatcggaggcagtatcctggaggatacaggcgtagatgccatgaatctgcgtatggaaatgaatatgaagatgaatcatatgacagagcctcagcagatgcgctacatgatgtattcccgtacgactatggacggcatggaagagccgatgatcatttccgcatattatcaggacggctgctactatcaggattccatgggacagaaggtaaagatgcctatggatataggaactatgatggagcagagcatggcatccgctatggcctttgaggatgagtttgagaattatttatccaatttccgtttatgggatgagggagaaaataaggtgatcggctttgtggctgaagccgaccagatgaatgaatatttccagatggtgatgagttctaccggcatgagcggactgttagatacggtaggcattaccatgggcgatgtgatctatgaatatgtgattgatccggcaggaaactgcattaagatgcgcatgaagatggatatggcaatggaagcagatggtgaaagcatcaccatgaagctggacggcgatatcggcatcgcagacccgggccagcccgtagaggttcccacagttcctgatccggaggcatatctggattttgaaactctgatcgcagaggctgtacaggcagagcaacagtaa

SEQ ID NO: 331 - DNA, 1227 bp, Unknown
  Unknown gut bacteria
gacggattatcaaaactggaatacagaggctatgattcggcaggtctggctgtccgggatggagacgccccggttcagatcgtaaaagcaaaagggcgcctgaaggcgctgacagagaagacgaatgacggagaggccttaaagggcacctgcggtatcggacacaccagatgggcgactcatggagagccttcggaaaccaacgctcatcctcactgctcggatgatggaaatgtagtaggcgtccacaacggaattattgagaattatcaggagctgcgtgataagctggtaaaaaaaggatataccttttattcttcaaccgatacagaggtcgctgtaaagctgattgactattactataaaaagtatgagggaactcccgttgatgcgatcaatcattctatggtgcggattcggggatcctatgctctggcagtgatgtttaaggagtatccgggagaaatttatgtggccagaaaggacagccccatgatcctgggagtcacggacggtgagtgctatgtggcttctgatgtgcctgcgattttaaaatatacgagaaatgtatattatatcggaaatatggagatggcccgcctgaaggaagggcagattaccttttacaacctggatggggatgagataaccagggagatgacgcagatcgaatggaatgcggaagcggctgaaaaaggcggttttgagcatttcatgatgaaggagatccatgagcagccgaaagcagttacagataccctgaattctgttttgaaaaacggccgtctggatctgacggagatggggctgacagaggaagagatctgcgccatatcccagatttatattgtggcctgcggctctgcgtatcatgtaggggcggtggctcagtatgtgatggaggatctggcagagattccggtccgtgtggatgtggcttccgaattccgttacagaaaacctcttctggataaaaatgggctggtgatcgtagtgagccagtccggagagacggcggacagtctggccgctctcagggaagcgaaggaatatggggtaaagacccttgcgattgtaaatgtgatcggttcttccattgccagagaggcagaccatgtgttttacaccatggcggggccggagattgccgttgcaacgacaaaggcctacagcacccagctgatcgccgtctactgtctggctctccagtttgccctggtgaggaaa

SEQ ID NO: 332 - DNA, 750 bp, Unknown
  Unknown gut bacteria
atgaaaatccgtattaagttcagaaaaacaggtattatgaaattcatcggccacctggatgtgatgcgctatttccagaaggccattcgaagagccgatgtggagatctgctacagcgggggcttcagccctcatcagatcatgtcctttgcagcgcctttaggcgtgggaatcaccagcaacggcgaatatgtggatattgaagtacactccaccggcaccacggctgagatgttagagcgtttaaatgccgttatggccgagggctttgagatcgcagagtacaagcttcttcctgataccgctgccaacgccatgtcaagtgtggctgccgcagattacaccttaaccttccgtcccggctatgagccggaggaggaaagcgcagaagagtggtttaaaaagcttactgccttttttgaccagcctcaggttatggtccttaaaaagacgaaaaagggcgaaaaggaaatggaccttaagcctcttatctatgaccttggcgtgattgccggaaatgatgcagcacagtcacagctctttatgaagatttccaccggaagcgcatccaatattaagccggagcttctgttggatgcttattatgaagcactgggcaaggaacgttctccctttgcctttatggttcagagagaggaagtatacgcagatcaggcatcagagcatgagagagagcagggaattcattcttttattcctcttggagctttgggacaggacattgagtga

SEQ ID NO: 333 - DNA, 1017 bp, Unknown
  Unknown gut bacteria
atgactatgacccgaatcaaacaggcagccgctttttttatgaccgcagcccttctctcttctgcctttgctcccgcagccctggctgacaacaaaacaaaggtaggaaagatctgcctgaccgtcgacagcgatatccgagccggcagcagtggcggtgaagtagatgtaacacccacaggagacaacacggatctgtactatgtagatgccgttgaagttgtcaatgatgaaggggacgactggtccaaatccaatcctcctgaggtagatattacccttggtctggaggacgaggaagaatacgccttttccggaacctcctccagcagcttcaagctcactctggacagctccatcaaatcccgctttgacaagatcaaattcgtagacgcccgaaaaacagacggcggagctactgtcatcctaactgtaaagctggtttttgacgaagacgccgatatgagcgacgcgcctgcccccggaaacctgtcctgggattctgacaatccaaaggtcgctgtatgggatgacgttgaatctgccaaatatttccaggtccagttatatcggaatggctccctcgtaacgcctcctgacggcggaaactctactttgtccgtatataataccttctatgactttacggactggatgacggaaaatggaacctacacatttaaagtgcgttctgtaaaagccagcaacaatgccaagagcaactggaaaacttcccctgaacagacagccggaaattctgtctccgaaggctggaaacaggcagccgaccatgtgcgctggtggtggcagaacgcagacggaacctatcctgcatcccagtggaaggatgtaaacggccagtggtattattttgacgcagacggctacatggcaaccggctggatacaggtaaacggcctgtactactatctggatccctcctccggcgcaatgtatgcaaactgctatacaccggataactgctgggtggatgcaaatggagtttggattccatag

SEQ ID NO: 334 - DNA, 591 bp, Unknown
  Unknown gut bacteria
ggtcaggccagggcagtttccagaatactgaacagcctgggctccagagaaaaaaatattggattggaggaagcagccagagcgctgcttgagggcgaggatgagatccttgctgcaaatgaggcagattatgagatggcacggcaaaagggcatgagccagggacttttagaccgtctgcgtttgactccggccagagttcaatccatggcagacggacttttaaaggtcgcttctctggaggatcctgtgggagaagtcatctccatgaagcttcgtcccaatggtttaaaaattggccagaaacgggtgcctttaggcgtgatcggcatgatctacgaggcgcgtcccaatgtgacagccgacgccttcggcctgtgctttaagtccggaaatgctgtgatcttaaagggtggaagcgatgccggagagtccaataaggctattgtaagatggatccgcaccggtcttgtccgtgcgggactgccggaggatgctgtgcagctcattgaagatgccagccgggaaactacgagagaactgatgcgcttgaatcagtatgtggatgtgctgatccccagaggcggagcc

SEQ ID NO: 335 - DNA, 756 bp, Unknown
  Unknown gut bacteria
atgtaccaagtaatcattgcagacgacgaagcgaaaatacgaagcggactggccaatctcttcccatggaatcagctgggatttgaaatcgctgcagtttgttctaatggaaaagaggccttggatttcgccatggaaaatccagtagatctggttctctccgatatacggatgcccattatggatggtctggagctgtcccggttgcttctgccaaaaaagcccgtaaaaatggtatttttcagcggttatcaggattttaactatgcccgtcaagccatgaaaaacggggtttccgattatcttttaaagcctgtgaaatatgaggatctctctgactgcctcaccagaattcgggaaactctggacatggaaaaaggactggcacaacctgaagaggaaaatttaagttactacgaaaaaattatcaacactgttaccagctatctggatcaggaataccaaactgccagcttagagcaggcggcccgtctggtatctctaagccccaattatctttctcggctgatgaaagatcactcggctcttagcttctccgattatcttctcaaaagccgtatggaacatgctgccaatatgttaaaggacatccatttcaagcagtatgaaattgcttacagagtaggatatgataatccaaagaatttctccagagccttccaccagtatttcaaaatgactcctacacaatatcgtaactgcagcggagttacagaaaaacgcaacgaaaaataa

SEQ ID NO: 336 - DNA, 897 bp, Unknown
  Unknown gut bacteria
gcgtttcccgaaattcgtgatctggcgcaggcagaggatgaccgcctgatgaaactgtgggaagggctgggctattacagccgggccagaaatctaaaagcagctgccattcaggtgatggagcgctttaacggagcgcttcctgcttcctatgaagcgcttttgagccttcccggaatcggcagttatacggcgggagccattgcttcgattgcctacggtatccccgttccggctgtggatggaaatgtgcttcgggtcgtttcccgtattctggcagattcctcggacatccgaaaagcctctgtaaaaacatccatggaggctcttttaaaggaagtgatgccgaaggactgcgcgggaagctataatcaggcattgattgagaccggagcgctggtgtgcatccccggcggagaacccaaatgcagggaatgcccaatggaatccgtatgccttacggcccaaaatggcctttggaagaaaatcccgtggaagtccccgcccaaggagcggaaggtggaagaaaggacggtatttattattgaatatcaggagaaggccgccatccgcaaaaggcctccaaaggggcttttggcctccctttctgagattcccaatgcagagggaaagctgtcgccaaaagaggcggaggcgtatctggcagtgtctgaggatgatctggtatgtttgaaacctcttccagatgcccgtcatgtgttttctcatattgagtggcgtatgagcggataccatgctgtccttaaagaaccctggagggaactgccggacggtgtttttatggcatccagagaggagatagaaaaacagtatccccttcccaatgcattttccgcttacagagagatcctgtttaaaaaggaggatggacagtga

SEQ ID NO: 337 - DNA, 762 bp, Unknown
  Unknown gut bacteria
atgtacaaaattgcaggttttttccacccggaaggggtgtacttaaacaacagagcttattttcaggagcgcctgaacgctatgggagattccctgaagaaaaacggaaagggccagacaaggctgtggctctcttcctgcatttgcctttcagaaaccgggccgtcggagccagaaaccgcaagcagccttatctcaaaagcctttggttcaggcattgtggccgtggctttctgcggagaactttacaattccaacgagcttcggacagaactgaaacatctggtgcactcctttcaatcctcctcagataaagaaatccttctggaaagttatctggaatggggaatggattttgtaaaacggcttaacggtatttttgcctttgccatctgtgatacagcctgtcagacgcttcttctctttcgagacaggatcggttcaaaaccgctgttttacaccgttcttaaagacggtgagctggccttttcctcccgtatccgctccctcctttctctgcccgaaatcaaaccggaactggatcttacaggcgcaaacgaaattttctcccttgggcctgccagatcctcaggctgcggtattttctgcggcatccgtgaggtgcttcccggccatgtcctgatccttacgccggaaagaaaaacggaaaaaccctactggacgctggaaagccatccccacggtgactcctgggaaaagaccgtagaaaaaacctccttcttagtcaccgatgctatcagc

SEQ ID NO: 338 - DNA, 951 bp, Unknown
  Unknown gut bacteria
atggacttattatacagaaaaacaccggaaggaatctgtttggagcgctgttataccctggacggcgctcccgttcttccggagcgtatggatggaatgccggtgacagaactggatcggtattttttttcgcagactgtaagaggacgggaggttcctccggaagagcttaatggagagcctgagctttgcggatcagggcttgatgagctgactcttccggagtatcttagaaaaataggcccttatgccttttacaactgctttcatttgaaaaccctgtccttctggagtacggtggaggactggggagccggtgtatttaccggttgcacagggataaagcatctgaagatccgggtggtaccgggcagaaagtcctgttttaaggaggttctttccgagctgcgccaggaacttatggctgattatctgaacccggagggaaggcttcttgccagactggtatttcctgagttttttgaggaatcggtggaaaataccccggctcggatcattatgagagaaatgcacggctgcggccatatgtaccggtactgctttgaggatacgcagtttcagttccgggagtatgaccatctgtttcctaataccgtgatccaggaacggcccggtctggcagctcagatggcagtgtaccgtctgtactggccctggggtctgaccgatgaatttaaagaccagtactgggaatttttaaagcagcatccaagagaaacggcatcagggctgacggacaggcgggaaacagcgattttgaaatggctgtcctggcagacagaggcagatcaggcctttctggaggggctgttaaatgggattgaagatcagagagatccccaggctgcgtctgttttgctggatgcggtacacagccggtttggcgggcaggtaaaagaaaaaaagaccacccgcacctttaaattgtag

SEQ ID NO: 339 - DNA, 1422 bp, Unknown
  Unknown gut bacteria
atgcgtaaaaataaaactgctctttttctggcagccgtttctttgtctgctttttttgccgtttcttccccgggagctcaggaagacgcttcgcggtttgtggacggtaccaggatcaacagcgtaggtgtgggaggactcacaccggaggaggccagagaacggatccagggattttatgccggcgaatacgagctttctgtcataaaaaaggacgggagcagggaggtgatccggggagaagcaattgattatcaggttgcgttgacagatgatctggatgctatcctgaaggctcagaacgaaggggggaggcaatccggcccctcggtagacaattcacatcaggcagcgcttgctccctcctacagccaggaaaagctggatcaggccattgaagcactttccgtattaaacagcagcgctgttacagttacaaaggatgcttcgatttcaccctatgaggaaggaaagccattttccattgttcccgcagtacagggaaatgatgtggatcgggaaaaaacgattttggcagtaaatgaggctgtaaaggcaggaagaaatgaattggatctggaggcagaaggctgctaccgaaccgtcagcctgtgggaaagtgatgaacatttgaagaatctctgtgatgccatgaacagccggagagaaaaaaagctccgttatgtattcggagaggcagaggagtttttgacaggagaaaccatggccagctggatcacgggggtatcagagggaaagattacggttgatcaggaaaaggtagcagctttcgtaaaggatctggcttcccgatatgacacagctggaacagccagaaccgtaacaaaggcagcaggaggtcagacagagatcacaggcccctatggctggaagatcgatcaggcagcagagacggcagcccttatggagctggtttcttcgggaagctgctggagcgaaggacaggctcaggccgacagagagcctgtttacagccagaaggctgcgtccagagagggaatggattggggaactacctatgttgaggtcgatctgggaggccagcacgtttatatgttcaaagagggccagatcgtatgggatgctccctgtgtcacaggaaatgtgtcaaaggattataccactccttcaggaatctacagcctgacctataaggaaaaggatcggatactcagaggaaagaaaaagcctgacggaacctatgagtatgagagccatgtagattactggatgccttttaacggcgggatcggccttcatgacgcatcttggagaagcaagtttggcggaacgctttatcagaccggaggcagccacggctgcatcaatcttcctccccaaaaggctccggcgctgtatgatctggtgtataaggggatcccggtactctgtactccataa

SEQ ID NO: 340 - DNA, 657 bp, Unknown
  Unknown gut bacteria
ttccagactcttaaccggcttgtacctctggatgagggagagctttactgtcacggaaggctctgtacaggcagcaggaaggatattttggagctgagaaagtgtgtgggaatcgtatttcaggatccggaccggcagatcatcgcttcgaccgtagagggggaaatttcctttggactctttaatctgggctattcagaggataaaatccgctatctgactgaacagatcatccagcggatggggcttactcaccttgcccatcgtccgcctcattttttaagcggaggggaaaagaaacaggtcagtatttccggtgttgtggtaatgaagccagaaatcctgctgtttgatgaacctactgccagtcttgactggaaaaatacgcagctttttaaggaacagcttaagaaactggagcaggagcagatcacacaggtcatttccacccatgacatggattttgtgtgggaatgggcagaccgtgttctggtgttttcagagggagaacttttggcagatgatcgtccggagcatatatttggggatgaggagctgcttaaaagggcttctctcaggcagcctgttttatatcagctgccggggcatccaaagaccatagaggaatggaaacagttacaggaaaaggaaggataa

SEQ ID NO: 341 - DNA, 1020 bp, Unknown
  Unknown gut bacteria
tctattggctttgtagcccacatggatacttctccggatgcagacggcacagatgtaaagccatgggtttttgaaaagtatccaggtggggatgtgatgttaaataaagaacagaatatccttatgagggaagatgactatcctacacttagaaaatatgtgggagaagatcttgtttttacagacgggaccacgcttttaggaggggatgataaggctgcggtagcgtcaattatgacaatggcagagtttttctgccgccatcctgaaattcctcacggtccgatcaagctgtgctttactccggatgaggagatcgcgcgcagcacggaaaatttcagcgtagagcgttttggggcagatcttgcgtataccatggacggagacgccctgggcggtctggtgtatgaaaccttcaacggtgcggaagctcagttgactatccatggcctgagtgttcatccgggaacagccaagggcattatgaaaaatgcagtggagatcggtggagaatttatggctatgctcccggctctggaacggcctcagtttacagaaggaagggaagggtattttcatccctttgtttttgaaggaactgttgaaaagacctatatccgctgtctggttcgggatcatgagctggatcggtacgaggagagaaaagcctatgttatatcctgcatagaggagctgaaccggcgctatggtgagggaaccgtggagcttaaatgggacagcatttattacagcatgcgggaagtcatcaaaaaggttccgtttatgatcgactactgcaagcaggctatgaaagaaggcggagtggagccctttgagatcgcaatgagaggcggcacagacggttcctggatttcccagatgggtcttccatgccccaacattacagcaggttatgaaaatgctcatggcagatttgagtttgtttccatccaggctatggcgaaaaatgtggagatcctgatccggctgctgaagctttatgcagcccataaggaataa

SEQ ID NO: 342 - DNA, 396 bp, Unknown
  Unknown gut bacteria
atggaaacgaaaatccagagaatgaaggaattgattcccgtccttaaggaagccggaaaggcttactatcaggagagccgggagattatgagcaattttgaatatgacaggctctatgatgagctgacatcactggaagaggaaacaggggtgattttgtcgggaagccctacccagcaggtaggctatgaggttttaagcgagcttcccaaggaaacacatgaggcacctatgctgtcgcttgataagacaaaaagcacagaggatttacaggagtggcttggcagccagaaaggccttctttcctggaaaatggacgggcttaccattgtactgacctatgaaaacggaagtttaatcaaggcagtaaccagaggaaacggagagatcggggag

SEQ ID NO: 343 - DNA, 1137 bp, Unknown
  Unknown gut bacteria
atgaacgtaaaaggcagaagagtgctggtgcgctgcgatttcaacgtgccgttaaagaatggtgagatcaccgacgagacacgtatcgtggctgctctgccaaccatcaacaagctgatcgctgacggtgcaaaggtaatcctctgctcccacttaggcaaggtaaagaatggccctaacgagggtgagtctttagctcctgtcgcaaagagactgagcgagaagttaggcaaagaagttgtattcgtagcggattacaacgtaaccggcgaggcggcaaccaaggctgtagaggccatgaacgaaggcgatgtggttcttcttcagaatacccgtttccgcggcgctgaagagacaaagaacggcgaggcattcagcaaagagttagcagatctggctgacgattatgtatgcgacgcattcggttcctcccacagagcacacgcctccgtagagggcgtaaccaagttcatttctgccaagggcggcacaaatgcagttggctatctgatgcagaaggagatcgatttcctgggaaatgcagttgaaaatcctgtaagacctttcgtagcaattcttggcggtgcaaaggttgctgataaattaaatgttatctctaatctgttagagaagtgcgatactctgatcatcggcggcggtatggcatttactttcttaaaggcagagggcaaggaaatcggaaagtccttagtagatgataccaagttagattactgccgtgaaatgatggcaaaggcagagaagcttggcaagaagctccttcttcctgtagatgcagtagtagcagcttccttcccggatccaattgatgctcctgttgaggcagagaacgtatccgtagatgctatgcctgctgataagatgggtctggatatcggcactgagactgcaaagatctatgctgaggctgtaaagtctgcaaagactgttgtatggaacggaccgatgggcgtatttgagaatccaactctggcaaagggaaccatcgcagttgctgaatctctggctgagacagatgcaactacgattatcggcggcggcgattctgcagcagctgtaaatcagctgggatttgctgataagatgagccacatttccaccggcggcggcgcttct

SEQ ID NO: 344 - DNA, 690 bp, Unknown
  Unknown gut bacteria
aaggttctgatgccggatctgacggcagactgtgccatggcccatatggtacagctggaaaaaatccgcgagatgagagaaacatatgaggatctggcggtggtctgttatatcaattccacggcagaaattaagacatattcggatgtgtgtgtaacctcggccaatgcggtgaaaattgtaaggaatctgccgaatcagaatattttctttattccggatggaaatctgggaaggtatgtggcagaacaggttccggagaagcatatcattttcaatgacggttattgtcccatccatgcggctatgtctgctgaggccgtaaaaagggaaaaggaaaaacatccggaagccaaatttctggttcatcctgagtgtaccggggatttgctgaagctggcagattacataggaagcacatcggggatcattgattttgcagcagaggatgatggaaaggaatacattatcggtacagaatcaggggtattgtatgaactgaaaaaacagaatccggataaaacgttttatacgcttacagaaaatcagatctgcacagatatgaagctgattacgcctgaaaaggttctacaggttttaaaggaagaaatcaatgaggttaaggttccggagaaagtgaggattcaggcaggagcaccgctggaaaaaatgctgatgctggcccgataa

SEQ ID NO: 345 - DNA, 801 bp, Unknown
  Unknown gut bacteria
ctggaagaaaagctgacccagttccgtcgtcagggcgccatcgtccccaccagagccttattaaaaacacccgaacagatccgtggcataaaagagagtgcccggatcaatgtagccgttcttgattatgtagctgcacatatcggccccggcatcactactgcccagatcgatctgtgggtctatgaacagaccacccgtttaggaggcattcccgcgcctctgggctataacggctttcccagaagcgtctgcacctctgtcaatgaccaggtatgccacggcattccatccgaaaatgacattctgaaagaaggcgatattataaacatagacgtctctactatctataatggttatttttctgattcctcccgtatgttctgcatcggagcggtttctccggagaaaaaacgattggtagatacagcaaaacaatgtctggagattggtttgacagaagtacgtccctggggatttttaggtgatatggggcaggcaatccataattttgccaaagaaaacggctgcagcattgtccgtgaaatcggcggtcacggcgtgggactggaattccatgaagaaccctgggtaagctatgtgtccaaaaaaggtacagaaatgctcatggttcccggaatgtgctttaccattgaacccatggtaaatatgggacggccggatgtatttgtggatgcggacaacgactggacggtatatacggatgacggactgccctccgcccaatgggaaatccaggtgctgatcacagaggatggatatgaaatactggcgtggtag

SEQ ID NO: 346 - DNA, 690 bp, Unknown
  Unknown gut bacteria
aatatggagcctatttcccaggagcgcggaatccttctctgtgtccaggcgggatacagggtattcgatttctgcgtccatgacctgattacctttaaaagcccttttttagatgaacgctgggaagcatatacggaaaaaatgtgcgcgctgaaggaggaacatggcctctcttacgaacagggccatgccaatgtatatgattttttgaatcccaaagccgatcatgagtttcaccagaccatcatggagcgctgtgtcctggcctctgagaaaatggggattccctggcttgtggttcatccctctacggccttttcggcagatgcagtttatgcagcctcccggtccggcaatacagagtattttaagcgtctctgcgagtttgccgcaaagcacggcgtgggaatcgcggtggaaaatatgtgggatctgcatattgcgcctaaacgctattatgcggatcatgcagaggagctgtgtgagctcacagacgcggtgggcgcagaaaatatcggcatctgctgggacttggagcatgccagcatcatggggcaggatcagaaaaaatctctgaaaatcatcggaaaccgcctgaaggtcacccatgtgtccgaccagaccggcgtggacaatatccatgtaatgcctttccagggaaaaaccgactggaaggctgccatggaagga

SEQ ID NO: 347 - DNA, 918 bp, Unknown
  Unknown gut bacteria
atggatcagatcgaagagagattattagaggaagtggctgaccttcacggagtgccggagggagcttacaatatccgtgccaacggccagatggcaggaagaaatacaaccgccaatattgacattaccacaaagacggacaagccgggaattgacatccgcattaaggcgggtacaaagcatgagagcgtgcatattccggtggtattaagcgccagcggcttaaaggaagtggtttacaatgacttctatatcggggatgatgctgatgtggtgatcgtggcaggctgcggcatccacaactgcggagtccaggattcggagcatgacggcatccaccgcttctttgtaggtaaaaatgctaaggttaaatacgtagaaaagcactatggcgagggagacggggaaggaaaacgtttgttaaatcccgtttctgaagtatatatggaagaaaatagcctgatggaaatggaaatggttcagatcaagggcgtagattccaccaaccgcactaacaaggccgtactggcagcaggtgcaaagcttctggtccgcgagcgccttttaacccatggagatcaggtggcagaaagtacctatgatgtggaattaaacggagacggctccagcgcagacgtggtttcacgttctgttgcaaaggatcactcaaaacagatattcaagtccaatctgatcggaaatgcaaagtgcagcggccatacagagtgtgacgccattatcatggacgatgccaaaatcgtagcagttcccggtctggtggctgataatattgatgcggccctgatccatgaggctgccatcggaaagatcgcaggcgagcagatcgtaaagcttatgactctgggactgacagaggcagaggcagaggcccagatcgtaaatggcttcctgaaataa

SEQ ID NO: 348 - DNA, 432 bp, Unknown
  Unknown gut bacteria
atgctgaatgaagagaagatccgctatatgacagagctggccatatttgaaaagaatgaaggcagaaagatttttcccgtaaaccgtttttttaggagcgattatgtgggcggtcagatgttcaggggctttttcggctataccttcagcttccttttgatcgttctcacctgggcgatgtacagattggatgtgatcttgggcggggccgggcccgacacggttcttggctggattaaaaacgggacgtttgcatatgtgggaggtctggttttatatcttgccgttacctggaagatcagctcccggcgctatgagatagccgcacggagccagacgatgtttacagcccgcttaaaacatctgatcagacgatatggaaaagaccagccggatacaggcagagaaaaacggggaggaagagctatatga

SEQ ID NO: 349 - DNA, 387 bp, Unknown
  Unknown gut bacteria
atgagtattcttaccataggggccgccggtataacggcagtccttcttgccgtatggctgaagggagtccgggcagagtatgccctttatatggtgctgggagcacagatactctttatgatctgcggtaccggacgtctggaggtgattttagatgccatgagacgtctggaaggatatatcaaaattgatccggcctatctgggtgctcttctgaaaatggttgggatcacatatgtggctgagtttgcctccggaatctgtaaggacgcgggctacagcgctttgggaaatcagatcgagattttcggaaagctgtctattcttggggtaagtatgcctgtttttttggctctctttgaaatactggatcagtttatgggatag

SEQ ID NO: 350 - DNA, 801 bp, Unknown
  Unknown gut bacteria
atgctgtcatatccctttctggtacgcgccctggtggggggtatgttggtttctctgtgcgcgtcccttttaggcgtacgccttgtattaaaacgctattccatgatcggggacggactgtcccacgtttcctttggagcattgtccatcgccctggcaatgggctggtcgccccttaaggtgtctatcccggttgtagtgctggcggcctttttccttcttcggatcacggaaaacagccggatcaaaagcgatgctgccatcgccatgatttcagccagcgccctggcaatcggtattatcgttacctcccttactacaggaatgaccacagatgtaagcagctatatgttcggaagcattttagccatgacaaaggaggatatggctctggctgtagtactgagccttgtggtgctgggtctttttgtgatctgctacaatcagatgtttgcagtgacctttgatgaaaattttgcaagggctacaggcgtcaacgtgggattttacaatatggtgatttctgtccttacggcggttactattgtgctgggaatgcggatgatgggagccatgctgatttccagcctggtgattttcccctgtcttacctccatgcgcgtatttaaaagcttcggaggggtgatgatctcttccgggcttttatcccttgtgtgctttctgttgggaatgatggcatcctatcagttttccacacctgccggagccagcgtggtggtggtaaatctggcggcctttgtgatctttggcgcatggcagatgcttgggaggagaaaataa

SEQ ID NO: 351 - DNA, 2283 bp, Unknown
  Unknown gut bacteria
atgctccgccgcgcgctgttccttcttaccgcgtgcggcattgcggcgtttgccgtattgatgctccagcttttccggctgcaaatcctgcgccacgacgagctggagagcgctgccttgcagcagcagctccgccgcacggcgatccccgcctcgcgcgggacgatctatgaccgcgaggggcgcgtgcttgcgatgagcgcgacaacgtataccgtgtacgtgagccccgcggagatatccatgaacggcgaggacgccgagcgcattgcgtccggtctttccgagatcctcggcgtagaccgcgaaaagatcctcacgatgaccgccgaccggcgcagctggtacaaaactgtcaagcgccagatcgaggaagccgaggcggacgcggtgcgcgcctttaaaaacgagtacgacctgcagggcgtgaagctcgagccggataccaagcgctattacccgtatgcttcgctcgcctcgcatgtcatcggcttcgtcggcgcggacaataccggcctttcgggactggagtttacgcagaacgagctcctgaccggaaccgccggaagcatcctccggctgaagaacagcgccggaacggatatgatcctcacaagctatgaggattacgtcgatgcgcaggacggactcaatctccacttgacaatcgataccaccgtccagtactatctggagaagcagctttcccaggcggtgcaggactttgatatacaaaacggcgccgccggcatcatcatggacccgaatacgggcgcaattttggcgatggcgtcgctcggaaactttgatctcaacaactaccagcgcgtctccgccgacatccaatcggagatcgattcgaccgccgatccggacaccgcggcggagatgttgaaagacgcgcagcgtgcccagtggcgcaacaaggcaatttccgatacctacgagccgggctccacatttaagatcatcacgcttgccatcgcgctcgaagagggcgttgccgcgccgtccgacagcttttactgcggcggcagcatgacggtgcagggacgcggcaagccgctcaagtgttggaaaacgatcggtcacggtccccagacacttacgcaggcggcgcagcattcatgcaacgtagcatttgccacgctggggctccgcatcggcgaggaaacgttctaccgctactgcgagagcttcggctttttccgcgcgagcgaaaatccggacgcttctctcacggggaagaccggcatttcgcttccgggcgagagcggcagcatctggtggccgcgcagcgtcttctgcaacagcgaaaacttttcgcagcttgcggcggcgtcgttcggccagacgttcaacatcacgccgctccagctcatcacggctgtgagcgcctgctgcaacggcgggtatcttatgaagccgtacatcgtcgattccgtcacggacggcaccggcgcgcttatatcgaaaaccgagccggaggtgctccggcaggtcatttccgagaagacgagcgcgcaggtgaacgctgttctggagcaggtcgtgtgcgatacgaagcagggcaccggcaaaaacgcctatgttgccgggtatcacatcgccggcaagaccggcacctccgaaaaggtggcgcaggacgccgccggcggaaaaaaggaatacatcgtatccttcatcggctacgcgcccgcggacgatccgcaggtcgtgtgcctcgttttgatggatacgccctcaaacgagagcggtatctatatctccggcgggcagatggccgcgcccgtcgtcgggcgcatcctcggcgaagtgctgccgtatctcggcgtacagccgcaatacagcgaagcggaggaaaaatacatcgaccgcgccgtgccgccgctcaccggcaaaacgccggaggaagcggtaaagctgctccgcgaggcagggctcgccgcccggatcgaagtgaccggcgacattgtcaccggccagctgccggggaagggaacggtcgttgcgagcggcacaacggtgctcatctataccggtgagataccggaggcagaagaggagaccgtgccggagctcacggggctcacctataccgaggcgcgggaagcgctcttttcacgaaggctgttcctccgctcggacagcacgatcctcgccgacagcgatacggtgcgcgttgtgttccagagcaccggcgcgggggagagcgtccccacgggcagcgtaattgaggtcagcatcgtcaacgacgataacgatacatacggccggtattga

SEQ ID NO: 352 - DNA, 1743 bp, Unknown
  Unknown gut bacteria
atgaaacgaaccaataaagcaaacggcatccgctccgcggtgccgcgccttacgggctatatgcgctcaagcatgggcgtcatcatcctggcgctgatcctcgccgcgctcagcgcggtgatgacgatccttgggccgaaccagatcggccggatcgccacgctgatgtcgaacggcctcaccggaaacatcgatctcgcggcgatcgccaaagtcggcattttccttgctgtcatctatgtgctcagtgcagttttcagctttatccagcactacacgatgtctgtcgtcacgctgaaaatgtcctaccgcatgcgcggcgagctttccgccaagatcaaccgcgtgccgcagaagtatttcggcacgacctcgcagggcgacattctcagccgcatcacaaacgacgtttccaccctgcagcagggactcacgaacagcctgcccacgatcatcagcgcggccacgcagtttgtcggctgtctccttatgatgttcgtcaccgagtggcggctcgcgctcgtttccatcggcgtgacgatcctcggcatgctgctgacggtgctgattctgtccagatcgcagcggtatttcgccgcgcggcagaaaagtctcggcgcgctgaacgggtatgtggaggaaatgtactccgggcatgaagtcgtgcggctcagccgcgccgggcggaagatcggcgcgcagttcgatacgctcaacgccgccgtttacgacgcgaactggagatcgcagtttctctccggcatgatgcagccgcttatgaacattgtcggcaacatcgcctatgtcgcggtgtgcgttctcggctcgattctcgcgatgaacggcacgatcgagttcggcgtgatcgtctcgttcattctgtatgtccggcttttcacctcgccgctgacgcagatggtgcagggcatgacgaacatgcagaccgcctccgcctccgcgcaccgcatcttcgattttctcgaaagcgaggagatgcccgacgagagcgaaaagaccgcgaagctcaccgatgtgcgcggcagggtctgctttgaccatgtccggttcagctatccgagtgacccggacaagatcatcatccgggacttttccgctgaggtgctccccggacagaaagtcgccatcgtcggcccgaccggcgcgggcaagacaacgatggtcaatcttctcatgcggttctttgagatcaacagcggcagtataacgatcgacggcgtacccatctccgaaatgcgccgggaggatgtacacggtctcttcagcatggttttgcaggacacctggctctttgagggaacggtgcgggagaatcttgtgtacaacatggagggcatcaccgacgaacagctcgaagcggtctgccgcgcgtgcggactcgacaagctcatccattcgctgccgcaggggtttgatacggtgctctccgagagcgccggcatttccgccgggcagaagcagcttctcaccattgcccgcgctatgctgcaaaatgcgcccatgctgatcctcgacgaggcgacctcctccgtcgatacccgcacggaagttttgatccagcgggccatggacgagctcacgaaggggcgcaccagctttgtgatcgcgcaccgcctgtccacgatcaaaaacgcggacaagatcctcgtcctgcgcgacggcgacgtggtcgaaagcggcacgcacgaagagctcatgcagcgcggcggcttctacgccgagctc

SEQ ID NO: 353 - DNA, 1362 bp, Unknown
  Unknown gut bacteria
atgcaaacttttttgaagaacggctatatcgtctccatggatcaaaacgacaccgtgtttgacggcggcggggtgctcgtggaaaacgaccgcatcacggcggtcggccgggtcgatccggcgaagatctcgcccgacgcggaggtcatcgatctgcgcggaaaatatgttctgcccggatttgtgaatacccacgtccacacctcgcagcagatatcccgtggtgtcggcgacgatgtggattttatctgctggctgcacgagagaatgtggccctttgagagcaatatgacggaggaggattcctacgtttccacactcatgacgagcctggagctgatccgctcgggcgtaacgtcgtttgcagagccgggcggtcagttcgtctccggcatggcgcgggccacggagcagtccggcctgcgcggaaagctcgccaagtcggtgatggactgcggtgaaggcctcccgccgatctggcagcgcacgatggagcaggagcttgagcagcaggtcgcggatatcgaaaaatatcacaataccgctgacgggcgcgtgcaggtatggtttggcctgcggacgatattcaacaacaccgatgagctttgcgtccgcacaaaagagcttgccgacaagtacggcgtcggcattcacatgcacgtggcggaagcaaaggaagaaaaggaatacacctatgcgcgctggggcgaggggacggtaaagcacctcgaacggctcggtgtgctggataaaaatctcctggcagtacacacggtctggctgaccgatgaagagctggagctcttccaaaagcgggaagtgaagatctcgcacaatcccgcgtcggccatgcgggtgctgggttttgcccgcgttccgaaaatgctgcagatgggactgatgccgtccatcggcacagacggcgcttcgtcctccaatcacatggacatggtggatgaaatgtggctcaccagccttattcataaggggtggcggctcgatccgacggtggtcccgtcacaggatatactgcgcatggcgacgaagtggggcgcgcgtgcgcttctcgatgaaaatctgtatggcagtctggaagccggaaaaaaggccgatttgatcgttattgatccgcacggaccatccatgatgccggtcaacgataaaattgccgcgctggtcacggcgatgcattcggccaatatcgaatccacgatgtgcgacggcaagtggctcatgcgtgaaagaaaaatcctgacgcttgatgaggaggcaattttgaaagaggcttgtgaacgggccgcggccatttataagcgtgcgggcatcgttctgccggaccgttttccggtcgtaaaagtctaa

SEQ ID NO: 354 - DNA, 630 bp, Unknown
  Unknown gut bacteria
atcggcagccacgcctgcgtagagcttctgaacgccggacattcggtcgttgtggtggacaatctcgtcaacgccaacgcggagtgcctgcggcgcgtcgagcgcatcaccggaaagacgctcgaataccacgaaatggatcttttgaaccgcgcagctctcaatgagcttttcgatacgcaccggtttgactgcgtgctccactttgccggtctcaaggcggtaggggagtcggtgcagcagccgctgcggtactacaacaacaacctcggcacgaccatccatctctgccagacgatggcggcgcacggcgtgaagaagatcctcttctcctcgtccgcgacggtgtattcgccggacaatacgatgcccgtggacgagagcgcccgcaccggcggctgcacgaatccctacggctggacgaagtacatgagcgagcagatcctctccgatacggcgaaggccgacggcgaatggaccgttatgctgctgcggtacttcaaccccgtcggcgcgcatccgagcggactcatcggcgaggatccgcgcggcatcccgaacaatctgatgccgtacatcgcccagaccgccgccggacggcgcgagtatctgagcgtattcggcaacgac

SEQ ID NO: 355 - DNA, 1644 bp, Unknown
  Unknown gut bacteria
atgagatcttccaaaacccgcatatggtgggtcatcgcggcgctcgtgctcttgctcgcggctgccgccgtatggtttttctgctcgtacagcgtctccgacgggcggctgatcgcccgaaaggcggacgtgatcgatcttcgcggtgaggacatctccgcgcaggaagccgaagcgctcgccgcgaagtaccccgataagaccgttctctgggatgtgccgctctccggcggcagccgtccgagcagcgcggaaagtctgagcctctcttcgctctcggcggacgacatcccgctctttgcctgctttccgaatttgaaaagcatcgatgcgtccggctgcgcggattatgaggcgctgctcgcgctgcgaagcgcctatccggcgcttgatctgaccgcgttcgtgaccgtcggcggcaaggccgtgccgatggacgcgcagcgcgccgtgctgcgcgccgatacgccgcttgcggagattctggaaacactgccctttcttcccgagctttacagggtatcctttacgggcggcgcggtatcctatgaaatgcaggatgcgctcaccgcagcgtttccggcgctttccttccgctgggacgtggaagtgctcggcgtgaccgcttcctccgcggcaaaggagctctcctttgccgggcaggcgctcaccgcgcaggacgtgaacacgctctgcgataaccttttccgtttcccggctctcgagcgcatcgacctcaccggctgcggccttacgccggagcagatcaaagccgtccgctccgcgagcggcgccgttaccgtatacgagctggagcttttcggcaagaccgtttcgacggacgctctcgagctggacttcagcggcatacgcatgggactttccggcgcagccgtcattgaggaagcgctcggcgagtttccgctgcttgaaaaggtcgtgctgtgcgactgcggcatatccaacgaggacatggccgcgctcaacgaccggcatgagaatgtccggttcgtctggcgcgtatacttttccgaattctccctgcgcacggacgatacgaacttcatcgccgcgcgcgtgcgcaacgagtttcccatctacagctacgaactggaagtgctcaaatactgccccgacctgcaggcgcttgatctcggccataaaaacatcacgagcctggactttctccgctacgtcccgcatctcaagtatctcatcatcgtcgaaaacgacgtgaacgacatcacgcccatcggcgagctgcaggagctcacctaccttgaaatgttctggacgaagtgcgaggatatctccccgctgcaaaactgcaaggcgctcaccgacctgaacatttcctatgtctactgccgccccgccaaatgccttgaaacgcttgtcaacatgccgcagctcgaacggctgtggtactgcggcaacaatctcaataccgaacagctcgaagagctgcaaacggcgctgccggacaccgaaatgtatctcgccgcgcgcggcgagccgaccggcagcacctggcgcgagcacccgcattactttgaaatgcgcgactttttcggcatgtactacatggccggcggcacgaacggcgtggacgaaaacggcaaccagatcattatcaccgggtga

SEQ ID NO: 356 - DNA, 1443 bp, Unknown
  Unknown gut bacteria
atgcgcgtgctcggcacgctgcttgagggcagcggaaaatacttcgccgtgtgcatccttctgggactgctgctcacggtggttgaaatgatcgcgccgcaggtcatccgcgtaacggtggactcggtgatcgactcgcagccgatggatctgcccgcgtgggcgctccggtgggtggagtcgctcggcggcgtggcgtttctgcgcgcgaacatgtggttcatcgcgctcattcttgcgcttgcgggtctcgtcgcggcgctgctgcgctatggcgcgaacatgttcaacgccaaagcgggcgaaacgctcgtcaagaccgcgcgcgacaggctcttccaccacattgaatgcctgccgtggaagtggcacgccgagcatccgaccggcgatatcatccagcgctgcacgagcgacgtcgagcgcattaaaaactttttccaggagcagttcatctccgttttccagatcatcgtgcgcattatccttgcgctgacgcttatgacgctgatgaacgcgaagctctccatcgtcgcgtgggtcatcgcgccgatcatcgtgctctactccgtgctcttccataacaagatccgcgcgcgctttaccgagtgcgacgagaacgagggcgttctctccacgatcgcgcaggaaaacctcacaggcgtgcgcgtcgtgcgcgcgttcgggtgcgaaaagtttgagcgcgaccggttcgaggcgcagaacaacaagtataccgagtgctggatcagcctgacccggacgctctccgatttctgggcggtgggcgattttacgagctgcctgcagatcctgctcgtggtcgtgctcggcacggtctcgtgcgtgaacggcaatctgacggcgggcgaatttgtgtcgttctcgctttataacacgatgctcatcggccctgtgcgccgtctcggccgtatcatttccgaaatgagcaaggcgggcgtctccatcgaccgtctcggcgaggttttggaagccgagaccgagcaggacgcgcccaacgccgccgaagcgccgatggacaaggacatcgcctttgaaaacgtcagcttccattacggcgaggacggcccggacgtgctcgaaaacgtcagcttcaccgtacccgccggaaagagcttcggcattctcggcggcaccggctccggcaagagcagcctgctgcttctgctctgccgtctgtacgcgcccacggagggcaagatcaccgtcggcggcgtggacattgccgatatgcctgcgcgttatgtgcgcgagaacgtcggcgtagtgctgcaggagccgttcctcttctcccgctcggtgcaggagaacatcggcatctgcggcgcgagcgacgcggagatccgtgccgccgctgttaccgcctgcgtggacggggatatcacccgtttttcgcagggctacgacaccatggtcggtgag

SEQ ID NO: 357 - DNA, 1344 bp, Unknown
  Unknown gut bacteria
atgctggagcatctgcctcttatcgtgtttctggtcacattcgtgctcatattcgtgctgcgtatgccgatccctgcgggcatgatcgccgcatgtacgctgtacttcctgaccgacggtcttatcaagggcgtaggcttcggcgcgctcatcaccggcgcgggcggcagcctgcatctcgtggcgcagaagaccatcgaagcgatatttaccaacggcaccatcgtcgcggtaccattgtttatctttgccgcgaacgtaatgaacgccggtaagatcaccgagtacgttttcggcacctgcatgggtctcgtcggccgcttccgcggcggtctggcgcacgtcaacgtcctcgcctctctcgttttctccggcatgaccggctccgccatcgccgacgcctccggtctcggcaagctcgagatcgacgccatgcgcaaagagggctacgatgacggcttctcctgcgccatcacggcggccagtgccaccatcggcccgatcttcccgccgtccatccccatggtcgtttacgcgatgctcacgggcgcctccgtcggcgcgctgttcatggcgggcatggtgcccggcgtgctgctcgccgtcgcgctgtgcgtttatgtgtacttcgtcgccaaaaagagaaactacccccgcaccgcgcccccgaagctgcgcgactatctcctgtatctgacgaagtccatctgggcgatgctcaccccggtcatcctgctcgtcggcatctataccggcatcatgaccccgaccgaggccggcgccatcgccggactgtacgcgcttctcgtctccttcctgatctaccggctcatgtcctggaggacgctcaagcaggtcctcgtagacacaatgaagggtaccggctccgtttccatcatgatcggcgccgcctcggccatttccttcatctttgccaaagagcagatcggcacgatcctcggcaactggctgctcagtgtcacggccaacaagtacgtcttcctgtttgccgtcaacatcatcatcctgatccttggctgcctggtcgatacctcggtcatccagcttgtcatgatcccgatcctatggccggtcgcggaggcgatgggcatcaacatcatccatttcggcctcatcatctgcttcaacatgatggtcggtctgtccacgccgccgttcggcatgtgcctgttcatcacctcgggcatatccggcacgccgctcaaggatatcattcgggagatctggtggccgatcatcgtcatgctgatcgtgctcgccgtgatcacctacatccccgacgtggtgctgttcctgccaaagctcaccggtatgatggcctga

SEQ ID NO: 358 - DNA, 1125 bp, Unknown
  Unknown gut bacteria
gtgaaagctatcaatcccggacactttcttctgacctgccggctggacaactgggtgcatctgctggaagagaaccacttccatatcgcccgcgaccggctgccgcaggcgctgtacatttccgcaacggcgctcgcgctcgcgcccgcggcggcggcggaatcgctcatttaccgcaagcgcatccgtgaaacaaagatcgaaaaggacccgatcttcattctcggccactggcgcagcggcacaacgtatctgcagaacgtcctctcgcgcgacgagcagtttggctggttcgatcccgtgaacacgatcggcctgccctactcgctgctgctcggccggctcatccagccgccgatcgaaaagggcatccggaacggccgcccgcaggataacgtgcagtactcgctcgatctcccgatggaggagacattcggcgtgctgacgatctcgccgtattcgatcatccacatgatcgcgttcccggaaaattataaaaagtacatcgaaggcgcgttcgtgagcgaccttcccgtggaggaactgcgcaaatgggagcgcagctacgattacgccgtccgcaagctcacctacatcaaaaagggcaagcagctcattctcaaaagcccggacaacaccgcgcgcatccgcgagctgtggggcatgtatccggacgcgcggttcatcaacatccaccgcgacccctacaagaccgtccgctccacgatccacatgttccgcaccgagatggactcgctccggctgaccgaagagccggataacatcgacgagctcatcgagaacacggtcatcgatattttcgagcgcatgtaccgcgagcttttcgagcttgagggctttttcccgaagaaccggtacgtagacatcgcgtacaccgatttctgccgcgccccggtcgatacgctgcgggatatttaccggcgtctggagctctccggctttgaggcagccgcgccgcgctttcaggcgtatgtcgattcgcagcgcggataccagaagaataaattcgacatttcgccccggcttgtgcgcaagatcaacgcgaagctgggcttctacatggaacactacggctacgaaatgcgggaggttgaggaagaatga

SEQ ID NO: 359 - DNA, 1188 bp, Unknown
  Unknown gut bacteria
atgcagaaaatggtaaaacccatccggctcgttgtgctcgccgtcgtctttgtgctgctgctcggcgtttacttcgtcgcgctttataagctgcagatcatcggcgggcgcgaatactacgccgtaggggaaacggagacgaaagaagacatcaccatcgccgcggcgcgagggaacattctcgaccgctacgggcgtctgctcgtgtccaactcgctctgcaacaacctgtctatcaacgtaacggagctcttcagtcaggacgacccgaacgcggtcattctcgagctgtgcagcgccgtggagcgcttcggtgacacctataccgacacgctgcccatcacgaaggccccgccctttgagttcaccgagatggacacgctgcagaagagcatgctcgacgcctggctcaaggcgaacgacatgccgctcgactccagcgccgtggagatcctcgcggcgatgcgtacgcgctacagcgtcggcagcgagtataacgccgaggacgcccggcgcatcgtcggcgtccggtacgagatcaacgaccgcttcaacatcaacaccacgccctacgttttcgccgaggacgtttcgatgccgctgctcacctatctcatggagcaggacatccccggctttgagctttcctcgtcctatgtgcgcgaatacaaaacgcagtacgccgcccatctgctcggctacaccggcaagctgacggcggaggaatgggcgacctacgccggcaaggactactcgctcgacgcctacgtcggcaaggatggcgtggaatacgcctttgaggattatctccacggcgtggacggcgaggcggaggtctactccaatctcgacggcgtcacgctccgcaccaagtacaccaaggagccgcagcccggcgggcatgtctatctgacgctggatatcggcctgcaggaggtgtgcgaggaggcgctcgccgcgcacatcgagtcgatcaacgaagagcgcgcccgcatcattgcggaagccgaaatgtacggcaccgagagcaccgaaatgatctccggcggcgcgctgtgcgtcgtgaaggtcgataccggcgagccgctcgcgctcgtgagctatccgacctacgacgccgccacgatgctggagaattacgaaacgctcgtcgcggacgagaacgccccgctctataaccgcgcgctc

SEQ ID NO: 360 - DNA, 1383 bp, Unknown
  Unknown gut bacteria
atggaggaaacaaacagcctggcccggtcccggcgcatgggcgaaatgccggagggaaagctgctgctgtcaatggcagtgcccatgatgctctcgatgctggtgcaggctctctataatattgtggacagcgtatatgtggcgaaggtgtcggaggactgcctttcggcgctctcactcgcgttcccggcgcagaacattctcatcggtcttgccaccggcacgggcgtcggcgtttcgacgatgctctcccgcgctctcggcagccgggacaacaagctcgccaaccgcgtggcgggaaacagcctgttcctctgcgtgtgctgctggattgttatggcgatcttcggtattttctttgccgacgccttcatccactcgcagacggatatcgagtccatccgcagctacggagattcgtatctgcgcatcgttacgatcggctcggtattcgtgtattttgagatcaactttgagcgccttctgcagtccacgggccagacgaagctctccatgtgggcgcagataatcggcgcggtggcaaacatccttcttgacccgttctttatctacggctggtgcggcctgcccgcgttgggcactgcgggcgccgccatcgccacggtcatcggccaggcgttcggcgcgctggcgggctttctgtttcaccacaaacataataaagaagtcaatatccgtctttccgactgccgcccggacgggcacatcatcctcgacatctatcgcatcggctttccgtccatcctcatggtcggtatcggttcccttacgaactatctcatgaaccgcatcctcatggcgttcacgtccacggcggtcgcgttgtacggcgcatacttcaagctccagagcttcttcttcatgccggtgttcggactgaataacggcattgtccccatcgtcggctataactacggcgcgcggaaaaaggaacgcatttaccggacgatccgctacggcgtgctgtatgccgtgtgcatccttgctgtcggcctgctgctctttgaagcgatccccggcgtgctgctgcaggcgttctcgccgtcggagcacatgcttgccatcggcattcccgcgctgcgcaaaattgccatccatttcccgatcgcggcgttctgcatcgtgggcgggtcggtctgtcaggcgctcggaaagagcctctattcgttcttcacgtcggtgctgcgtcaggtcgttgcgctcattccggcggcgtatcttctgtcgctgacagggaacgtcggcaatgtatggtggtgcttcccgatcgcggaggtcgtatcggcgtgcgcaacggcgtttttcctgcgccgcgcgctgcgaaatatggaccgggagctgacgctcgcggaggggcaatga

SEQ ID NO: 361 - DNA, 1431 bp, Unknown
  Unknown gut bacteria
atggaaaatcatacttccgattaccgcgtagaaaaagactccatcggcacgaaggacgtgccggcaaacgtatattacggcgtgcagtcgctgcgcgccgcggaaaacttccccatcacggggctgcggatgaacccggagctcatccgcagtcttgcctacatcaaaaaggcggcggcactcacgaaccttgaggccggactgctgaacgagcgtatcgcaaacgccatcgtgcgcgcctgcgacgagatcctcgcgggaaagctgcgtgagcagttcattgtcgatcccgtgcagggcggcgccggcacatccatcaacatgaacgccaacgaggtcattgccaaccgcgccatcgagctgctcggcggcgtcaagggcgactactcgctcgtcaacccgaacgaccacgtcaactgcggccagtccaccaacgatgtcattcccactgccggaaagatgacgacgctgcgccttctgaaaaagctggagaccgagctggaccggctgcgtgccgcgtttgaggacaaatcccgcgaatttaaccacgtcatcaaaatgggccgcacgcagatgcaggacgccgtgccgatccggctggggcaggagtttcgcgcctatgccgacgccgtgcggcgcgataccgtgcgcatgggcaaggccatggacgagatgcgctcgctcaatatgggcggcacggccatcggcaccggcatcaacgcggacgaaacgtacctgcggcgcatcgtccccgtgctgagcgaggtatccggcatggagctcacgcaggcgggcgatctcatcgactccacgcagaacccggacccgtttgtggcggtgtcgggcgctgtcaaaacgtgcgcggtgacgctctcgaaaattgccaatgaccttcggcttatgtcgtccgggccgcgcaccggcttcggcgagatcaatctcccggcgcggcagaacggctcgtccatcatgccgggcaaggtgaacccggtcattccggaggtcatcaaccaggtggcgttcctcatcatcggcaacgacatgaccgtcaccatggccgccgagggcgggcagctcgagctcaacgcctttgagccgatcatcttctactgcctgttccagtcgatcggcacgctgacctacgccgtgcacacgttcgtggacaactgcgtcaccggcatcaccgcgaacgaggagcgctgccgggagcttgtcgagagcagcgtcggcgtcatcacggcgctcacgccgcacatcggctatcagcacgccgcggacatcgccaagcgcgccatcgtcaccgggcagagcgtccggaagctcatactgcaggaaaagcttctcacggaagaggagatcgacacgatcctcgatcccatgaatctaacaaagccgggcatccccggcaaagagcttctcgcgcacaagtaa

SEQ ID NO: 362 - DNA, 1434 bp, Unknown
  Unknown gut bacteria
atgattgtcaagaacagcaagaaagaaaaaaacaccgttacctttgatgtcgagctcgacgccgccgagtttgaaaagtatgtcaacggtgcatatctgaaggctcgcagccgcatcatggtccccggcttccgcaagggcaaggcgccccgcatggtcattgagggcatgtacggcaaggacgtgttctatgatgacgcctttgataacgccgcgaacgacgcttttgcgttcggcgtcgctgagggcaagctcgagaccgtcggccgtccgaccatgaccgattccaaggtcaccgaggagaacggcgcgcttctgagcttcagcaccgacgtttaccccgaggtcaccctcggccagtataagggccttgaggcggagaagccctccgttgaggtcaccgacgaagaggttgacggccacatcgagcgcctgcgcaagcagaacgcccgcctcatcaccgtggagcgtcccgcgcaggacggcgacaccgtgaacatcaactacgccggcatgctcgacggcatcccgttcgacggcggcacggcggagaaccagaatctcgttctcggctccaacaccttcgttcccggctttgagagccagctcgtcggcatttccgccggtgaggagcgcgatcttgacattactttcccggagaactacggccacgatctcggcggcaaggccgtcgtgttccacgtcaagtgcaacgaggtcaagtttgaagagctgcccgagctggacgacgagttcgcgaaggacaacgactttgacacgctcgccgatctcaaggccgacatccgcgccaagtccgttgaggagaaggaaaaggccgcgaagaacgcctttgacgacgccctcgtcgatcaggctgtggagaacatgaccgttgatatgcccgaaggcatgatcgaagagcgcatggacggcattgtccgcgagtacgcgcagtacatggccaaccagggcatccgcatcgacgattatctcaagatgatcggcaccgatatgaagaccttccgcgagagcatgcgcgccaccgccgaaaagcaggcccgcaccgaggtcctcctcgccgccgtcgccgaagccgagaatgtccagatctctgaagaggatctgcaggccgagtatgagaagctcggtgaagcctacggcatgaaggccgaggacgtggcgaaggccatcgatgtcgccggtctgaccgctgatctgcgccgtgagcgcgctatgagcatcatctccgagagcggcgttgccgtggagaagaaggccgaggagcccgccaagacggaggaagcgtccaaggccaagaagaagcccgccgcgaagaaggccgccaagaccgaagagaccgagggcgaggaagcgcccaaggccaagaagaccacccgcaagagcaccaagaccgaggagaagacggaggagtga

SEQ ID NO: 363 - DNA, 1470 bp, Unknown
  Unknown gut bacteria
cgcgatatcccggccggcggcagctacggccgtctaaacggggagaacgggtatttcttttttgcgcagagcagccgcggcgcggacaacggcacggggtaccgcatggtggcggcaaagcccacggtcgatatcgccgcgggcgtgtacgacgacgccgagagccttacgctgacgatcaccggcgagaacgtgcactatacgctcgacggcagcgacccgacggcggacgatccggcctataccgcgcccatcacgatcacggaaacgacgatcgtccgcgccgcgagcttcccggcggacgcgctgccgggcaaagcggcgacatggtcgtatttcctgcgcgagaacagcacgctgcccgtcgtcagtcttgtgaccgacccggacaatctcaccggcgcgcagggcatttactccaaccacgaacgcgcgtggagcgagaagtgggagcgcgaggcgaccgtcgccatgtacgaggacggcggcgagttctccattgactgcggcatccgcatgcacggccgcacgagccgccgtgtgagcgaaaagaagtcgttcacgctcaaattccgcggccggtacggcggggatctcaattatgacgtgttcggcgacggcgtcgtgacggacttttcctcgctgctgctgcgcgcgagcgtggaggatacctacacctcctacatgcgcgacgagttcttcgcccgcatcgccatggactatacggatgtgcccgcgcagaattaccggtatgtttcgctcttcctcaacggcgagtactggggcatttacgccatccgcgagcaccacagcgcggaatacttcgcctcgcacaagggcgtggacgccgacaccgtcgatatgcagacgggcgagtttgaaggccagaccgcgtggagcgagatcttgaactacgcgcgctacaactcgctgagcacgccggagggctgggcgtacatccaggagcatgtggacatcccggagatgattgactggctgattctcgagtgctggtcgggcgatatcgacgtatacgaaaacgtccgcttctacgcgagccccgagtacgaaaacgggaagtacatttacggtctcgcggacatggatctcacgatgatgggcatggactcgatgagcgtcggcttcaacaacttccagctccacggcatcattccctcggcgctgcgttacaacgaagagttccgcgatatgttcctgacgcgtctcggcgaaatgctgcgcggcccgctctcggacgagaacgcgcagaaaacgctcgatgagctgcgcgcgatcgttgagccggagagcgcgcgtgatctcgcccgctggggcaagtcgtccacgttgtttgccacgcagatggcgaatctccgcggcttcgtctccggccgcgccgcgcggatgcagaacgaggccctcgccttcttcggcgtctccgccgaggatgccgccaaatacttcgggtaa

SEQ ID NO: 364 - DNA, 1986 bp, Unknown
  Unknown gut bacteria
gtgcgccgcgtcgtcatcacggcgaaggacggcaagtatcagctgacgctcacgctcaacggcaccagctacgattacctctaccccggcaccggcacgcaggccgacgccgttgaccggagcgagtgggctcccgccaaggtcgtgagcggcacgatcgacggcgagacgcgcgacaactggcacacctacaccatcacggtggataagctgacgaacccgctggccgtcacctctcacagccagaagaacgacaagtggtacgaccgcagcatcacgctggacatcggaaatctcaagcgcaccgccgaggacggcaagtattccgccgcggccgagtgcgacgcggcgatgttcaagatcatcgacacgaagctcaacgttgtgaacggcgcgatcatggccacgctgacgctcagcggcaccggctacgattacctctaccccggcacaggcgacgaggccgagaaggacaaggacaactgggcgcccttcgccgtggacgaaaacggcaagtacacctacaccatccccgtgtctgagctcgacaagcccctcatcatctcctcgcacagcctgaaaaacaacatctggtacgaccgcacggtgacgttccgctccgattcgctcaagaagatcggcgacgcggccgaccctgtcactccgacacccacgccgaccccgacgccgacgcctaccccgaaccccaccaatccggacaacgaatccgatcacgaaaccgacaccagcggctccacctcccgcgtggataacagcacgacgctcaaggacggcgtctacgcgcccgacagcttctccttctccggcggctccggccgcgcgcgcatcgtgtgcgacaaggtcacggtgaagaacggccaggcgtacgctaccatccgcttcgtgagcagcagcggcaacccgccgcagtactcctatgtgaaggcctccggcaacacctattactccaacgacggcagcaccttcacgatccccgtggagctcaacaagaacaaccgcattctcggcatgaccaccaagatgtcctccgcgcacgagatcgagtacatcatcttcgtgcagctcaagacgaacgcgaacaaccagaaggacaacaccgacggcaaaacgctcagcaccgaagcgcccgagatcatgggtctcacgttccaggaggagatcaagctcgagcacgcgcagtatctcaagctcttccgctatgagggcaacatcgtcctcgcggagatcgacgtcataagcgacacggtgctcgacaccgacgaggcgaaggccgagatcgccaaggcggacagcgccgccgcgtccgacggcacggaagaagccgtcgccgaggaagagagcgccgacaacgcgcagatcaaggccgactacgtcgccgggctctataagcagaacgtcctgcgctatctgttcgttccggaaggaacggagctccccgcgggccttgaaaagcagctcatcatcgtgacgctgccggcgaagagcatctatctgatggacgaaacgcccgtcgatacctttgagatctttgaagcgctgaaccttgtcaaggtgttcggcgcggagacgagcgagaacgagatcctcagcaagggtcttgccgacggcagcgtgctgtacggcggcagctgggataagcccgagtacaagaagctcgtgcagaacaagaccgatctcgcgatcacgtccggcaagctcctgccgctgagcggggaaacgctcaccgagcgcaagcagaccgcccccgctgacgcggagagcctgacggcggtggagtatcgcgaccgtctgtacgatctggccgaccgcttcgccgtgctcgatatcccgatgctcatcgaccgctccgccgacgaggccgacgctctcgcgcaggccgactggctgcggctctacggcatcctcttcggcgacgagacgaccgccgagcgcatgatccgcgaaattacctcccgggagggttaa

SEQ ID NO: 365 - DNA, 792 bp, Unknown
  Unknown gut bacteria
atgcaaaattcaaccgacagaaggaaaatcatgagcgaaccgatcgtcagttcccttgccaaagcgctccgcgttctggaatgcttcacggtcagcgagccggagctcggcgtcaccgagatctccaaaaagctcgggatcggcaagtccaacgcgcacaacatcatatcgacatactgccagatgggttatctgcagcagcttcccaaccggaaatacacgctcggctacaagctgctcgagcacgcgttcatcatcaaccagcatctcggctatccgcacgcggtgtacgatctcctgcttgaggccgccgagcgcaccgggcaggtcgtctacttcggcatcccgtacgaaacggacgttctgtatctgtatgtcgcccatccgatcgcgcggatgaaggagctgccgtaccgcgagatctgcggcgagcacgccccgctgtgtaccacgggcatcggcaaggcgatcctcgccaatctccctccggaggaatggctctcccgcctgcccgagatcgttcccgcgcacacaccgcagacgatcaccgataaggacaagatcctgcaggagctgcagagcacccgcgagcgcggcttcgccatcgacaactgcgagcacgagctgaacgtccgctgcgtcggcgtgccggtctataacgcgagaggcgctcttgtcgccggcatcagctcctccggcgcggtgcaggtcatgaccgaccggaaggtcatggaatgcgccgacatcctgatgggtatcacgcagcgcatcaaggaaaggctgtacgcctga

SEQ ID NO: 366 - DNA, 1434 bp, Unknown
  Unknown gut bacteria
atgacactgcggccaaagcccttccagccgatcaaaatgctgcagatcatcggcggcgttttcttcgcgtatctcttcttcgggtttatgctgctgccgtgcctgaacacgctcaccagcattttcaccgtcaagaacgccgccggggaaaccgatcccctcgcggtcatccgtttcttcctcgccgggtccatgtcccagtatgtgtggaactcgctcaagctggcgctgtgccttgtcatcacggtcaacgtcgtcggcatttccatcgtgctgctgaccgagtactttgacatcaagggcgcaaagatcctccgtctcggctatatgacgacgctcatctactccggcgtcgcgctcgtcacgggctacatgttcctgtacgccagcgacggcatcatcaccacgcagctcaaggacgcgttcccgaacatcaatgtcaactggttcaccggcttcaacgcggtgctcttcacgatgacgttcgcctgcacgagcaaccacgcgctcttcctgcgcaacgccatccgcggcatcgactacaacaccgttgaggccgcccgcaacatgggcgcgaagcccttcaaggtgctctggaaggtcgtgttcccgacgcttctgccgacgctcttctcgctcacggtcatgacgtttatcacgggcctgtgcgccatgagcgcgccgacgttgctcggctatgactccatcaaccccgagatcgtccgtctggccggttcgtccgtggcggacgaggcgttcccgcaggcgcgcgcggcgctgctttcgatcatcctcgcgtgcttcacgatcctcctgctcaccgtcctctcgtcctatgagcgcaaggggcattacctctccgtttccaagacaaaggcgaagctccagaagcagaagatcacgaaccccgtggcgaacgtcctcgcgcatatctacgcctacgtcctgttcatcatctacatgacgccggtcgtgatgatcgtcatcttctcgttccagacgttcagcgccgtgcgtatgcgcaagcttgatctttcgcagtggacactcgtgaactacttcggcaagcaggactattcgtatctcacgtcccgcggcacctacaagatccgcgagggctcgatctccggcgtgttctccaacgaggcgacgctcagcggcatccagatgagctttgtcatgtccgtcatcgccgcggcgctcgcgtgcgtgatcgtcgttgtggcctgcaactacatcttcaagcacaagaagaccggcacgatcctggagtacgcgctgctcttcccgtggctgctgccgacgatcctcatctgctattcttaccgcacgttcttcaacagcagcgacgtctggtatgtgttcggccagaacctgtactatgccgaccgcgtgaggatattgatcgttatcgcgtatacggtagtaaagctg

SEQ ID NO: 367 - DNA, 1032 bp, Unknown
  Unknown gut bacteria
atgagccttatcacactcatcctcgtccttgcggcggcggccgtgctcatcgtgctcggcaccacgcgcagaaaggacggcggcgacgggaaaaagaccctgccgcgcacgatcgtgacggccgcggcggtgctcgtgctcgtcggcgcgctgggcttcggctcggtgtaccagctgcaggaggacgaatacgccgttatcaccacgttcggcaagccgtccgtcgtgagcacgtccggcctcaagttcaagatccccatcatccagcagaaaaccatcgtcagcaaggcgacgcaggggtttgctctcggctacgatctgcgcacgaacgtgaacaacgaggacgaatcgctcatgatcagcgtggacttcaacttcgtcaacgtggatttctatgtggaataccgcgtggacgacccggtgaagtacctttataacagcgaagagccggaagccattttgaaaatgctctgccagagctacatccgcgatacgatcggcctttacggcgtggacgatatcatcacgaccggcaaggcggagatccagggcgtcatccgcgacaagatcagcacccgtctcgagcaggaggatatcggtctcgtgctcgtgaacatcgccctgcaggacgccgagccccccacgctcgaggtgcagcaggcgttcaaggcggtggagacctccaagcaggaggcggagaccgccatcaacaatgcgaacaagtacgctaacgagcagctgcccgccgccaaggcgaacgcggacgaaattctgcagcaggccgaggcctacaaggaatcccgcatcgccgaggccgagggtcaggcctcgcgcttcacggagctgtacgccgaatactccaagtatccggagatcacgcgccagcgcctgttctatgaaatgatcgccaaggtgttcccggatatgaagatcgttatcaccggcagggacggcagcacgctgcagaccgttctcccgctcgagagcttcaccggcacgaacacaacgaccacgacaggggaggagccgtaa

SEQ ID NO: 368 - DNA, 1428 bp, Unknown
  Unknown gut bacteria
atgaaagcaaacattcttgtttatgatgtcggcagcacctatacgaagggcgcggcctttgcccttgcggacgggaaactgacgttccttgcccgcggccagcacccgacgacgctggagaacatcagcgacggcgcgcgcggcgccgaggcggagatccgcgccaagggcgtggaattcgcgcccgatatggttcggttcagctcgtgcagcgccgcgggcggactgcgcatggtcgccatggggtacatgccccgcgtgaccgcgaaggccgcgaaggaagttgccatgaccgccggtgcgcgtgtcatggaggtcgtctccgcggacgagccgcccgagttccgcgaggaagtgctgcgcgagatcaagcccgacatcatcctgctctccggcggtacggacggcggcgacatggccaacgtgctcgaaaacgcggacatcatctgcaaggtgcacggcgaaggcacggtcattctcggctgcaacaagttcgcccagcgcgaggcggcggagaaattccgcgccgcgggcattgactgcatccgcgtgccgaatatcctgccgacgatccacgagctgaacgtgaagcccgcgcgcatcgccatccacgagcagttcatcaaccagatcacccatgcgaagggcttgcaggagttccgcgattcgctcgcggatcagaccgtcatcccgacgccgggcgccgtgctccttgcgagcgagctgcttgccaagggcagctacgagcaggagggcgtcggcggcgtgatcctcgtggatatcggcggcgctacgaccgacatccattccgctctgcccgagctcatcgacatgaacatcgaagagcgcggacttgttgtgagcaacgaaaagcagttttcctaccgcaccgtcgagggcaatctcggtctgcgcgtgagcgcgaccggcattcccgaggccgtgggcgacaaggccgttctccgcgccatggaccacgattacggtctgacgccggaggatgtggaaaactatgtcgatctgctcgaagcgcacaacgatcacattcccgccgacgagaaggaggcctgtctcgaccgcgcgcttgccgcgtgcgccgcggacgttgccatccgccgtcacgccggatattacgcgaaggaggccgatcccgtcatgggcatcatggccggcgctccgatggggcgcgatcttcgcaacgtgcgccaggtgctgtgcgtgggcggtattttcctccactgccacggcgaggagcgcgagaacatcgtgcgccgcacgttcgataaccccggcatctccctgctgccgctcaacgacccggacatctggttcgacgaggactacatcctctacgccatgggcgttctggcgcagcacttccccgaagaagttctttcgtacatgaaagagcatgtgataaagaaataa

SEQ ID NO: 369 - DNA, 1296 bp, Unknown
  Unknown gut bacteria
atgaataattcaaacgaaacgaaagaaaggaaaaagctggatctcaaacgaatcacggacagccgtgttttctggatgatcctctcgctgcttgcggcgtcgcttctctggatgtatgtgacgacgaccgagggcgttgaggtggaaaaaacgctcaccggcgtaaagatcgagtttctcggcgcggacgcgatgcgcgcgtcgagcgatctcatcgtcaccgagcaggaccgcaccaccgttaacctgacgctctccggcacgcgccgcgtgctctccaagctcacaaactccaacgtgacggcaacggtgaatctcagcaacgttgtggcggacgggcggtattcggtttccttcgatatcgcctatcccgccggcgtgaacgcgaacgaaataacgctcgtccacacgtcatcggacgtcgtgaatttctatgtggacaagctagcccgcaagaccattgaggtcaagggcgcgttcaccggcaacacggcggacggatatcttgccgacgagagtatggtgttcgatcctctggtcgttgccatcagcgggccgaagacggtcatctccaaagtcgaccatgcgtttgtggccattacgcgtgaggacgtggaccgcacgctgagctattccacgacgtattctctcgtcgattccgacgataacccgatcgaagactcttccatccagcgtgaaacggaagaagtcaccgtgacgctgaacgtgctttccacgaaggaagtgccgcttgacgtaacgatcatcgatggcggcggcgcaacgcgcgacgccaacacccgcattgacattgaaccgaagacgatcatgctcgcgggagatgcctccgccatcgacagcacgacgaagctcattctcggcacgatcaatctttcgagcttcgccacggacttctccgccacctacaccatcatcccgccgaacggcaccgagaatatgaccggcgttaccgaggcaacggtgagagtatccatcacgggcgttgccacgaagtccttctccgtgaatccggaaaatatcgtctgcatcaacgttcccgacggctacaccgcggagaacatcacgcaggcgcttaacgtaacggtccgcgccccgcaggaagtccttgaccagatcagcgaggtaaatctccgcgctgtggccgatctctccaatctcggcacgaacgcctccggcgttttcaccccgacggtcgagatcaagatcgacggcttccccgaagcgggctgcgtcggcgaatataagatctatatcacgctcaaggaaaagcattaa

SEQ ID NO: 370 - DNA, 1659 bp, Unknown
  Unknown gut bacteria
atgaaatacagaaagatctttgctctgctgctcgccgcggcgacgctcttctcgcttgccgcgtgcggcgagaccgccgccgggccggaggcaacgcccgatcccgcgctggacgagagcgccgcgaccgtctccggccagacgctcaccttcgccggcgccgcggacgatgtgttctcgctctcgctcgactacgaggagagcctcaaccccgtcaagacgcagagcacgctcaatcagctcgtggactgcctcgtgtacgaccggcttttcgaggtcgatgagaacttcaacgtgacgtcgcgcatcctttcggactggtattactccaagaacgaagacagtgcgggcgtgtgggtgctcaaggtgagggagggcatccagatgcacgacggctccacgctcaccgcgcaggacgtggcgtattccgtgtcctgcatcttcacgagcgagagacacaagcatctgcagcagcaggtcgggcgcgtctattcgagcgcgtacaacggcgaggtgtatctcgccgtggaaggcgcggacaatgcgcagctcccgcagcgcatgagcatcccgatcatcaagtccggctccgtcggcgacgaaatccccgtcggatcgggcccgtatatgtataatgaagaccgcacggcgctcgtgaagtttgacgggtatgaaaacagcgagagtctcccgctcgacgaggtgcagctgcgcgcctaccgcggcatggaggagctcatcaccgagtttgaaagcggtctcgtcgatctcgtcgtgaacgacccgaccggcatttacaacatgggctacggcggcaaaaacgaaaagcgcaccatcaccaccacgaatctccacttcatcggcttcaacagccagagccgcttcttccagtatgacgcctaccgctacgcgatgaactggatcgtgaaccgcgacaagatcgtatcggacacgctcgacggcaacgccgtggcgacggtgctccccgtccacccgaacagcgcgctgtacgatacctcgatcgcctcgcagttttcctacgatccatcgcgctgcctcaccgagctcgagcgcggcggctgccgcgatctggacgcggacggcatgcttgaatttgcgctctccggcatgaaggtggacattgagctcaacttcgccgtctgcgccgacaacgccgccaaggtgcaggaggcgcgccggatcgccgaggatctggaagccatcggcatcggcgtcaacctgcgcgagcttacatggaaggactatctcgccgcgctgcgctccggatacatcgacttcgatcaggaggagcccgagatcgttatggatatgtatctcgccgaggtcgcgctgaccggcgactggaacatcctcacgctgttctccggcgactgggaggatgacaacaccctcaactacggcggctgggacaacagcgagctggaggagctcaccgaggcctatctcggcgcaaaggacgacgaccgcgcgcaggccgtaaacgactggctgcagctcctcacgacgaccacggtgatcctgccggtgtgctttgagacgcgcgaggttatctcccatctcggcgtgatctccggcatgtcgcccaaccagtacgacgtattcaataatattaccgcctggacagtcaatatcggctga

SEQ ID NO: 371 - DNA, 1602 bp, Unknown
  Unknown gut bacteria
atgacaaacgcaaaagagaaaaagaagatcgtcctctggctgatcgtactggcaatactcgccgcggcggcgttcacggtcacggccattgtgcgccataaccagcgcccggcgtgggacggcggctacagcgtccacatcagcgaggtcatgaccgataataagacctgcccgaacggcgagggtgtcctctgtgattggatcgagatcgaaaacacgtcctcgaaggacttctccatcggcggatactatctctctgacgagacgggcaaaggcaaatactgcttcccggcggggacggtcgtcccggcgcgggggtatctcgtcgtgtggtgctcgccggacgaggagggcgactatgcgccctttgccctgcgcaaggcaggcggggagacggtgtgccttatgaacgaaaaccgcacggtgctcgacagcgccgttaccgctgcgtgccggagcgggcagtcgcttgtccgcggcagcgacggcgcggtcattcctgccgatacgccgacgcccggctacccgaacaacgaagcgggcgcaaaggcgtggcaggaggcgctcgcgcagcgcagcggcggcacgcttgagctcagcgagatccagtcctcaaacacgctctatgccgcgcccgacgggaatttctacgactggatcgaggtacataacccctcggattcgccggtatctctctccggctacaagctctcggaccgcacgaacaaaacgaagtacgccttcccggacgaaatgctcggcgcgggcgaatataagatcatatggtgcgcccccggtgtggagggcgcggaatatgcgtcctttgcgctggcgagcgcgggcggggaaacggtcgtgctcacagcgccctccggcgcggagagcgagagcgtggaactgccgatgctggagaagaacacggcctatgccaaggaaaacggcgaatggacggtgtctcaccgcccgacgccgggatattccaacgacgacgcggggtatgaggcgtggctgcgttccggcggctacgaaaacgacgaaatttacatcaccgaggtcatggcgcaaaaccgcggtacgctcgccgacagcgacggcgacctctccgactggatcgagatcgcaaacctcggcgagacgagcgtcgatcttgcgggctggtatctctcggacgatccggacgtgccggacgaatggaagatcccgtcgctgacgcttgcgccgggcgagtatgcggtgatcttcgcctccggcaagaaccgcaccgagggtgagcttcacacgagcttttcgctcaccgacggcgacacggtcattctctccgccggaaacggcgcggagatccgcagcgtgaagatcgaggccgtgccggaggggtcctcgctcgcgatgcagccggacggcagcttcgccgtgaccgacttcccgacgccggggcttgaaaataccgccgagggctacgccgacttctgcgatgccgacacgcgcacctcgccgcttctgctgtgggagatcgtcgtgtacgaggcgggttcgcccgactgggtggagctcaaaaacgtgtcgggcgagtcgatcgatctttccggatacacgatctcggat

SEQ ID NO: 372 - DNA, 1410 bp, Unknown
  Unknown gut bacteria
atgaagaaatttatcggaaacaaagacttttacaagctggtcgcggcgctcgcgctgccgctgctgctgcagaacgccgtatcgacgtttgtgaacctgctcgataaccttatggtcgggcggatcggcacggaatcgatgtcgggcgtgtccatcgtcaaccagcttctgttcgtatataacctctgtctcttcggcggcacgggcggcgcgggcattttcggcgcgcagtttttcggccgcggagattataacggcgtccggcatacgctgcgcttcaatatcctgctctgcgccgggtttacagtgatcgccacggtgctgctcgcgctcatcccggatacgctcatcggtgcgttcctgcacgaggcaggcaccggcggcgatctcgcgctcacgctctcggaaggcaaggactaccttcgcatcatgctcttcggtctgccggcgttctgccttacgacggcgtatgtgagcatactgcgcgtcaccggcgacaaccgcctgccgatgaaggcgagcatcgcggcgatcttcgtcaatctcgttttcaactatctgctcatctacggcagcctcggcttcccgatgctcggtgtccgcggcgcagccattgccacggtgctctcgcgctatgtggagttcggcctgatcctgctcggcacccacgggaagaaaacgccgccgcgctttatccgcgggctgtaccgcggctttgcgatccccggccatctcgccggacagatcgtccgcaagggcatgccgctgctcgtgaacgagatgttctggtcgctcggcatgacgatgctcacgcagtgctactcctaccgcgggttggacgccattgccacgctgaacatcaactccacggtgctcaatctcttcaataccgttatcttcacgatgggcaataccgtcggcatcatcatcggcaacctgctcggcgcggaggagtatgaccgcgcgcggaactactgcccgaagctcgccgcgctcagctgcgcggccagcgcggcggtcggcgttgtgatgttcctcgtcgcgccgtatgccccgcggctttacaacacctcccacgagatcatgacgctcgccgcgtcgctcatgcgcatctgcgctctcatgctgccggtccacgccgtggtaaacgccgcgtactggaccatccgcgccggaggccggacgtacatcaccatgctttcggacagcgtgttcacctgggtcgtgtcggtatcgatcgcgtgggtgctcatccataaaacgggtctgccgctcgtggaggcgtacctctttgtgaatctcgccgaccttatcaaaatggtcatcggcatcgtgcttctccgccgcggcatctgggtgcgcaacatcgtcaccggcgaggagatcgcggccgggaatgctgcgggctga

SEQ ID NO: 373 - DNA, 909 bp, Unknown
  Unknown gut bacteria
atggaaaatcctgcgcttattatcatggccgccggtatgggcagccgcttcggcgggctcaagcagatcacgcccgtgggcgacaacggcgagatcatcatggacttctcgctgtacgacgcttaccaggcgggcttccgcaaggtcgtgttcgtcatcaaaaaggaacgcgaggcggatttccgcgccatcgtcggcagccatgtggaaagccggatggacgtgcagtatgtgttccagtcgccggacgatgtgccggagtggttcaccgttcccgaagggcgcgaaaagccctggggcacggcgcacgccgtgcgcgcctgccggaacgtgatcgacggcccgttcgccgtcatcaacgccgacgatttttacggcgcaggggcattccgcgcgctctatgattttctcgccgagccgatggcggagagcgagaacgccatggtcgggtatcgcatgcgcaataccgttaccgaaaacgggtatgtcgcgcgcggcgtgtgcgaaacggcaaacggctttctcacctcgatcaccgagcggacgcacattgaaaagcgcggcgaccacgccgcctacacgaccgatggcgagactttcatcgatcttcccggcgatacgctcgtatcgatgaacttctggggcttccgcaagcggatgatgcgcgcgttcgacgagcggtttgaggatttcgtgcgcgagatcctgccgaaaaatccgctcaaggcggagtacttcctgccgtgggtcgcggataaggagatgcacgcaggccttgcgcgcgtgcaggtgctgccatgcgaggagacctggtacggcgtgacgtaccgcgaggatctcccgcgcgtccaggccgccgtagcggacatgaaggcgaagggcgtgtacccgaagaagctctgggaataa

SEQ ID NO: 374 - DNA, 1098 bp, Unknown
  Unknown gut bacteria
atggcacacagaccaaacattcttgcgctcgcatccaagatcagtctcgaaagtctgacgtacaccggcattacctacggcgatcccgagtacagaatccttgatcccatcgtcgatgacgacatgtgttccgttatgatgcgcatgcgtctcgaaaccgacttctccgcggaggatctcgccaaaaagacgagaaagagcctcgatttcgtgcagacgcagtgcgacaagctcgttaaagcgggcgtcatccgcacgcgcgtccgcagcggcgttctctgctactattacccgatctgggtacccggcatcatggagggcattctctccaaccgcgagcagtgcgacgcgcaccccgagctcggcgcgtgttttgaggagtatacccgcatccgcgtcggcatgctcgcccctatgctcggcaacggcgtgaatttcatgcgcgttatgcccgttatgagcgccatcgaaaacgacacgcacaaagcctcctatgacgagatctccacgctgatcgaaaaggcgtgggcaatctccgtcggcccctgctcctgccgaagatcgcgccgtctgatgggcgaaggctgcggccatctggaagaggatatgtgcctctatctcaacgacaacgccatcagcttctccaagaacggcgagcaccgcctcatcaccaaggaagaagcgtacgagatcctccggcgcgccgaggacaacggccttgtccacgaggtgaaccaggccctcggctttgacgacgtcaacgccatctgcaactgctgcggctgctcgtgctacgcgctgcgcatcgccgagctgttccgttcgccgaacggcgtcagctccaacttcattgccagagtggacaaggataagtgcgtcgcctgcggccagtgcgtggaaaactgccagacgaacgccgttcgtctcggccagaagcactgtctcaccgattcgcacatctccgacgcctacgcatccgacaaagagatcccctgggataagaaaagctacaacattgattaccgcaccacccgtaccgacaccatgccctccggcaccgcgccgtgcaaggcggagtgtccggcgcatgttccggtg

SEQ ID NO: 375 - DNA, 2565 bp, Unknown
  Unknown gut bacteria
atgaacgaacgcctgcttttgtcatccgaaggcaggcgttctttacgcaattttaagacggtctttattgaaaaagagcgaaaaaatggtatactgatatataacgcttttttcgggggagggcttggcgctttgaagctgttccgcagaaaaacagaagaggaagccgtccggcaggagatcgccgtgaaggagaccgcgcccttcgagggtctcaccgaggccgaggccgccgcgcgcgccgccgcgggctgggacaatcgcccggttgaaccgcccacgcgcaccacggggcagatcgtgcgggagaatcttctcacgtactttaaccttgtgtttcttgtgctcgcgctgtgccttgtggcggtgaaggcgtcgattttgaacctttcgttcgtcatcgtcgtcattattaacgccgtgatcggcatcgtgcaggagctgcgcagcaaaaaggcgctcgatgcgctgaatatattgaccgcgccgcaatgcgccgttgtgcgcgaggggcgcgaaaagcgcgtggacgtgtcctcgctcgtgcgggacgatatcgtcctcttttcgaccggcgagcaggtctgcgccgatgccgtcgtggtggacgggacgtgccttgtcaatgaggcgctcgtcaccggcgaggcggacgagatccgcaaagcgccgggcgatacgctgctctcgggcagctttcttgtctccggcatgtgccgcgcgcggctcaccgccgtgggcgcggattcgttcgtcagccgtctgacgctcgacgcgaaagcgcagaaaaagcgtcaggccaagggtatgatgaaggcgctgaacgatcttgtcaaatggatcggcatcggcatcatcccgatgggcgtgctgctcgtggtaaaggaagtctgctggctcggccggagcatccccgcaggcgtcacgtccacggtcggcgcgctcgttggcatgatcccggagggcgtgtatctgctcacgagccttgcgcttgtggcgggtgtgctgcgtctggcacagaaaaagacgatgtgccgcgagatggactgcatcgaaacgctcgcgcgcgtcgatacgctctgcgtggacaagaccggcacggtgacggaaaacaaaatgatcgtggacgatatcgtcccgctctgccccgaccggttcatcgccgaggatatccacatgatcatggcggactactgcgcggcgatgcgcggcgataacgacaccatggccgccatgcgcaaattcttcaccggcgaggtgaatcagcgcgcgatcgccgcgctcccgttcacgagcgcgaagaaatacggcggcgtttcgttccatgaggatgagacctatcttctcggcgcgccggaggtcatcctcggcggcgattttgacgcctatcgggaaaagatcgatcactacagcgcgaagggctgccgcgtgctgctcctcgcgctctacgacgggcagctcaccgatgaagcactcaccgccgagcgactgcccatctcgctcatattgctctccaacaagatccgcgccgaggcgccggatacgttcgcgtggtttgcgcgcgagggcgtttccgtgcgcgtgatctccggcgacaacccgctcacggtttccgaggtcgcccgccgcgcggggatcccggacgcggaccgggcggtggacgcccgcacgctcgaaaccgacgagcaggtcgaaaaggcggcgcgcgaatgcgtcgtattcggccgcgtgacgccggagatgaagcggcggctcgtccttgcgctcaaaaaacaggggcacacggtcgccatgaccggcgacggcgtaaacgacgtgctcgcgctcaaggaagccgactgctccatcgccgtggcctcgggaagcgacgttgcctgtcaggtatcgcagatcgtgctcacagactcgaatttcgcctcgctcccggacgtcgtcgccgaggggcggcgcgtcatcaacaacatcgagcgctccgcctcgctttattttgtgaagaacatgttctcgatcgcgatggcgatcatcagtctgatcttcactctgccgtacccgctcagccccgcacagctcggccttgtgaactgcatgacgatcggcgttccggcgttcatcctcgccatggagccgaaccgctcgctcgtgcagggcaaattcctcaaaaacgtggtgcggcgcgcgctcccggcggcgctcacggatatcctgctcgtcggcggcgtgatgctcttctatctggccgccgatctgccggacaccgccatgagcacgatctgtgccggcgtgatgggcgttgtgggactcatgatggtgcaccagacggcgaaaccgtacaacaagctgcgcatcgcgatgatctgcgtactcgcgctcggctttgcggggagctttctgttcctcaaggcgcttttcaaccttgtggcgctcgattttctcagcgcgctcgtgcttgcggtgttcgcgctgcttgcctggccggtgatgaatgtgatgtacaagctgctggataaactcagcgcattcgtgcagcggcggaaaaagacgcgctgcgcggcgaaagaactgtaa

SEQ ID NO: 376 - DNA, 1320 bp, Unknown
  Unknown gut bacteria
atgaacaattcctccacggtggccatgatctctctcggctgcccgaaaaacctcgtaaacagcgaggaaatgctggctctgctgcaggacgccggatatgcttttaccgacgaccttgcgaaagccgacgccgtgatcatcaatacctgcgcctttatcgaatcggccaagaccgaggccattgaaaagatccttgagaccgcctcctaccgcgaggaaaacccggagctcaagatcatcgtctccggctgtcttgcccaacgctatgccgacgatatccgcgccgagctcccggaggttgacggcatcatgggcaccggcagctacagtgaggtcgtatccgttgtggaagccgtgctcgccggggataagccgacgcgccgcggcgcgatcagcgcgccgctctacgatacgccccgcgccgtatccaccgggccgaactgggcctatctccgcattgccgagggctgcgacaaccgctgcgcctactgcgttatcccgtcgctgcgcggcaagttccgcagccgcacgaaggagagcattctggaagaggcccgtcttctcgccgcctccggcgtaaaggagctcatcatcgttgcgcaggatatcacgcgctacggcatcgacctttacggcaaggtttgcctgacggagctgctgaaagaattatgtaaacttgatttccgctgggtgcgtctgcactatctctaccccgagctcatcgacgacgagctcatcgacgagatcgcatccgaggataagatcgtcaagtatcttgatatcccgatccagcacatcaacgatacgatcctccgccgcatgaaccgccgcggcacgggcgaggagattcgcgcgctcttcaaaaagctgcgcgagcggatccccggtctggtgctgcgcacgtcgctcatcacgggtctccccggcgagggcgaagcggaatttgaagagctgtgcgattttctccgcgaggcgaagatcgagcgcgccggcgtgttcccctactcccccgaggagggaacgcccgccgctctcatgcccgaccgatgttcgaccgaggaggcgcagcgccgcgccgagctctgtatggagattcaggcggagatcatggacggctttgccgagacgtttatcggccgggagcttgatgtgctcgttatgggcagagagccggacggcacgccgtggggccgcagcgagtacgattccccggacattgacagccgcgtgattttctccggcgacgctgcgcccggcgacatggtgcgcgtgcgcatcgattccgtcgatgacggagagctcatcggcgaacaaatttga

SEQ ID NO: 377 - DNA, 993 bp, Unknown
  Unknown gut bacteria
ttgggcgtgcacggcaaccccggcaacatgggcttctgcatcgcctgcttcctgcgcgacacgaccggcgctctcggtctgcacggcgcggaggtcgtgcagtacttccgtccggagatcgtcggcatcctgctcggctcgctcatcgcggcggtcgcggcgaaggaattcaagggccgcggcggctcttccccgatgatccgcttccttctcggcatgttcgttatgatcggcgcgctgatgttcctcggctgcccgctgcgtatggtcatccgtatcggcggcggcgactggaacgcccttgtcggtcttgtgggcttcatcgtgggcattctcgtgggcgttgtgttcctcaagaagggcttcacgctcggccgcagctataagcagacgctcgccgaaggcgccgccttcccggtcgtttatgtgctgctgttcgtcctctggctcgcggctccggcgatcttcaagttctccgaaaaaggtcccggcagcatgcatgccgcgtggggtctcgcgctcgtcgcgggtctcgtcgtcggcgcgctctgccagcgcagccgtatgtgcatggtcggcggcatccgcaacgccgtcatgttcaaggacttcggccttgtcgccggcttcgtgacgatcattctcacggtgctcgtcggcaacctcattctcggcaagttcaaccccggcttcaccggccagcccgttgcgcacaacgatggtctctggaacttcctcggcaccgccctcatgggctggggctgcgtcctgctcggcggctgcccgctgcgtcagctcattctcgccggccagggcgagagcgacagcgccgtcaccgttctcggcatgatgtgcggcgcggcgttctgccacaacctgaagctcgcctcctctgccgacggcccgaccggcaacggcaagatcgcggtgatcgtcggcttcgtcgtggtgctcgtggtctccctgctcttcacgaagaaggcggaggaataa

SEQ ID NO: 378 - DNA, 1407 bp, Unknown
  Unknown gut bacteria
atgcacgatgaacacgaaatcatgagccgccgcgcccggcgcgcccatgcggaaaaacagaaatgccgcgcccgtttgccggggctgccgttcttcctcgcgctgggcactctcacggtcattgcgtggatactgccgctgcgcccgacggtgtcggcaaaggaaaagcgcacgctggagacgtttccggagttttctctttccgctgtgacgaacggaagctatttttccgatatcagtctctggttttcggacacgttcccggggcgtgacggctggatcatggccgcgcagcggctcgaatcgctgtacggcgactcctccgtaacggtgtacggcaatgcctctgccggagacaagatccccgttccgtccacgcccacgccggagacgagcgccgacccggcaaagccggcaagcgaaccgacgccgaccccggaaccgacgcttaccccggagccgacgcctacgccggaaccggagtggggcggggaaaacccggacgacgagctcgtaacgctcggcgccgtcatccagatcggcgacagcgcctatacctacacggccttcagccagtattattcggacacctacgccgccaatgtgacgcgcgcggccgatctgctggaggggaaatgccgcgtctttgacgtattcgtcctccacgggacgacgctcatgctcccgcgtgagtaccgcgagtcgatcggcgttgcatgcgaggaggacatcctcgcctatgtaaattcccaaatgggcgacaatgtctactgcgtggacacctacaactcactcctgccgcacaacagcgagtacatctatttccgcaccgaccaccactggacggcgctcggcgcgtggtacgcctatgcggaatgggcaaaaatggcgggctttgagccggtgccgctcagtgagtatgaggagatcgtgcaggagccgttttacggcagtctatactatcaggcccaccagagcggcaagctcacggccgatcaggtctacggctatgtcccgcccggagatgtgcatctctatatcaaccagggaagcaacgactcgctctccaaccgcggttatgagcagacgctcattacccagatccacgggaacgacaaatacatgtgcttcctcacgggcgacttcccgctgtgcacgttcataaataacgacatcaccgacggcagcgcgtgcctgctcgtcaaaaactccaacggcaatccgttcgggtattatctcacgcagcattatcagtatgtctatgtgatggactaccgcaaatacttcagccgcccgctgacgaagtttgtggactactacgatgtggacgacgtgatcttctgcctgagcagcggtcaggcgcagagtgccggcggcaacagtctgctgcggggacttattcaataa

SEQ ID NO: 379 - DNA, 1209 bp, Unknown
  Unknown gut bacteria
atgtctgacgaagaaaagatccggcccgaagaggaaaaccacatcgggcgacacatggcgcccacgccgcctccggcggagaagccggtaaaggctgccggtgtcccggccgcgccggaagcgccggagaccgccgcgccgaaagcgccggagacgccgaagtccccggcggcgaagagcgcgaagccggcgaagaaaaagccggtgcgttccgtccggacggtgcgcccggaaaagaagccggagccggaaccgaaaaagaaaaaagccgcgccgcagccggtcgaggccgagctggacccgcgcgaagcggagcgtgcgtatatgcccatccgctcccggcgcgacgggcgcatcggatgcatgggcggcattatgtacgctgcgttcatcctctgcgcaagcgtgcttctcgcggtgttcggctggatggcggcctcggacgtgctcgcgctcaacaagagcgcggagagcgtggagatcacgctgccggagagcgcctttacgcagaagaccgtggacgtgacggacgacgacggcaacgtcaccggaacgaaaaccgtccgcgtggcggacatgaacaccgtctccggcattttgaaggactacggcctcatcaattacaagtggctcttccagctctattcgcgcttctcgaacgcggaggtgcagctcagccccgggacatacgcgctcacaacgaatctggactaccgcgctcttgtgaaaaagatgcagaccggcgcggattcgcagctccagacgctcgtcatgttccccgagggctacaaccttgaccaggtgttcgccagactcgaggaaaacggcgtgtgcagcagggaggatctctacgctgccgcggcgaacgccgagttctcatatacgttccttgaaggcgtggagacgggcgatccctaccggctcgagggcttcctcttcccggatacgtattacttctatcaggggatgcaggcctcgagcgcgatcaacaaattcctctcgaacctccattaccgcatcacggacgagatgtggcagaaagcgcaggccatgaatctgacgttcaagcaggtgatcacggtcgcctcgctcatcgagcgagaggccgcgaacgacgccgagcgcgcgacgatcgcctcggtcatctataaccgcctgaacatcggtatgccgctgcagctcgactccacggttgtgtacgccattcgc

SEQ ID NO: 380 - DNA, 633 bp, Unknown
  Unknown gut bacteria
atgaaaaagatccttgcactgatccttgccctcgttatgctcttcgctctcgccgcctgcggccagcagcccgctgcgcaggagccgaccgaagtgcctgccgagcagcccgcggaacagcccgccgagcagccggcggaagaggagcccacccccgataccatcaccgtgatggttcccccggtttccggcacctatcaggacgacatcgacacctggatcgccgagttcaaagagctctacccgcacctcgatgtggaagtgatcaagacctcctgggacgatcacaacggcaagctctacaccatggcgaacgccggcgaagctccggacatcgctgaggtctcctactctgccatcggcacctacgtcgagctgggcgtcgccgttgacattgcgcagtacatggaccctgagcgtctggccgactacgatcagaacgcgctcgactacatgagcatcgagaacaccgtttacggcctgcccctgtacatcaccatccaggctctcggcgccaacaaggatatgctcgaggccgccggcgccgacgtggcgaagatccagtccgaaggctggacctacgaggagttcctcgaagtcatcaagaacggcaccaccgatgactgcttcggc

SEQ ID NO: 381 - DNA, 1170 bp, Unknown
  Unknown gut bacteria
atgaaacgcgtaccgaaaatcgtctggtcactgcttgcgtgtgtgatatgcatcgttgtcaccgctgctgcgtgcctgatccttgcggacagcggcgcgtcctccgataaatatatggaggtcatccgcgtgatcgagacaacgttctaccagccgaaggatacgtcctcgctggaggacgcctccgcgagcgccatggtggcctcgctgggcgacccggcaagctactatctgcctgcttccgagtatgaggagtataaactcacgctgacgaaccagtatgtcggcatcggcgtgaccacgcagtacaacgaaaattacggttatctgaccgtcctttccgtaacgcccggctctccggccgatcaggcgcatgtgaaggtcggcaacatgatcgccagcgtggacagcattgacgtatccacctacactcccgaacagtttgacgagctgctgcgcagctacgacgcgaaggagacagaggcggagaagtatttcacgctccaccttctcaacacgcagggaggcaaggcggacgcgaaaatgaagtgcgaactcatctatgccgagccggtcgtctattacattctggacagcgacgccaacaaggcgaacagcagctcctctgtcggctatctccgcatccgtaactttgacgacagcgctgccgccagcgtaaaaacggcggtcgccgcgctgcaggattccggagcaacgagccttatcatcgacgtgcgcgacaatacgagcggcaaacccgcggaaatggcggatgcgctcgattatttcctgccgaagggtgatctgttcctcctgcgtgaccgcgacgggaaggagacgacctattcgtccggcagctcgtatctcaatatgccgatggtcgttcttgtcaacgagaacaccacctgcgcggcggaagtgtttgcctgcatcatgcagcaggcgggcgtgacgatcgtcgggcgccggacgcccggcagcgcgcagagccaggtgatcgtggagctctccgacggcagcgccgtccgtctctccaaattcgagtatctcacgccggataaaaagagcatgaccgaccttggcggcgtcacgccggatatcgcgtcctaccagatcgaggacagcgatctggacgtgcagctcgaggcggcaaaggacgccctgcattaa

SEQ ID NO: 382 - DNA, 828 bp, Unknown
  Unknown gut bacteria
atgaaaaacatcaagaaatctcttcgttctgttttctgcgctcttctcgccgcggcggctcttgccgcatcgctgccggcgtatgccgtttcccaggcggagatcgacgatctccagaaaaagcttgacgctcttgagcagcaggcgcaggaacagcaggacgtcatcaacgatctcaccagccagaaggcccgcttcatcacccgtaagctcgcgctcgataacaaaatcgagatcaaccgccagatgatcgagctgatcggtgaacagatcgagatctacgatgagatcatcgccgaaaaacaggcggagcttgacaaggctctcgaaaaggaaacgacgcagaccgagcttctccgttcccgcatccgcgccatggaggagaacagcacctattcctacgtgagctttatctttgattcctccagcgtgaccgagcttctttcccgcatcggcgatgtcaacgacatcatgcactacgacaaaactctggaagaggagtacatggcggcgcgcgaggatgttgagtccatcaagaagagctacgaggaggcccgtcacgagcaggagctcctccagaaggaactggataccaagcaggccgagctggatgcgcaggtcgaagcggcatacaccatgatcgccgatatcgagaccctttccgacgacgcgcaggcggaatacgacgccatcgccgaagaggaagccaaggcggaggagacgctgcaggaagccatccgcaagcgcgccgcggaacaagcgaagtacaaccagaataataacagcaataatggcggcggcggaaactccggcggcagcggcggcaat

SEQ ID NO: 383 - DNA, 1287 bp, Unknown
  Unknown gut bacteria
atgttcaacacgatctcgtccgtagaccccggctcccggctcgagggcagggtgctccccggcgacgaattgcgttatatcaaccggcacgagatccacgatgtgctcgattataaatactgggcgtatgaccgctcgctcacactggaattccgggacgccggcacgatccgcctccgcaaaaaagagggcgaggatctcggtctgaactttgaaacgtacctgatggacaagccgacgggctgctccaaccggtgcatattctgcttcattgaccaactgccgcgcggactgcgcaaaacgctctattttaaagatgacgacgcgcgtctttcgttcctcacggggaattatatcacgtgtacgaatctctccgagcgtgaattgcagcgcatctgcgatctgaaggtgagcccgctgaacatttccgtgcatgcgaccgatccggagctgcgcgcaaagctcatcggcaacccgcgcggcaaagagatcatggacattctccgccgcttcgccgcggcgggcatattcatggaatgccagatcgtcgccgtgcccggctggaacgacggcgcggcgctgcagcgctcgctggaggatcttgcggggctttacccgcatgtgagcagcgtttccatcgtgccggtaggtctcacctgccaccgcgaaaagctcacgcccctctccccctatacacccgagcaggcgcgcgcgacgatcacgcaggtggagtcgttcgcggcggagtgctttgaaaaatacggcagtcacattttctactgcagcgacgaaatgtatctgcgcgccggtcttcctctgccggaggacgaatattacgaagactatgcccagcttgaaaacggcgtaggtatgctgcgtctgctcgaaacggaatttgaccttgccctctcgctggaggacgaggccgaccggaaggaaacgccgcgcttctccattgcgaccggcaaggccgccgagccgtatctgcgcgcgcttctggaaaaggccggagcaaacggcacggtctacggcattccgaacgacttcttcggccacacgatcgaggtcgccgggctactcaccgggcgggacatcatccgccatctccgggataaggacatcggcgagcgggtatacattcccaaaaccatgctgcgccacggcgagggcgtatttcttgacgatcttacgcccgaggacgtatcgcgcgagctcggcgtgccggtcatcccgctcgaggtggacggtgcggagctgctcgccgcgatgcgctttgaagaactttaa

SEQ ID NO: 384 - DNA, 1233 bp, Unknown
  Unknown gut bacteria
atgactgatgtgataattgccggcgccggagccgccgggcttatgacggcgatcacggcggcacggcgcggactttcggtaacggtcctcgagccgaacggaaaaacggggaagaagctccgcatcaccggaaagggccggtgcaatgttacgaatgacagcgcgccgcaggaatttctgcagaaggtgtgcaccaatgcgcgcttcctcaaaagctcgctgtacgcctttccgccggaggccgtgaaggagttttttgaagaggcgggcgtgccgctcaaaaccgagcgcggcgagcgcgtgtttcccgtttccgataaccccaacgacattgccgatacgctggagcgcatggcaaaaagcgccggcgttcgctttgtccgggaacgtcttgttgacatccggacagagggcggacacgtttccgcagcggtaacagaccgcgatgaatatccctgccgggctgtcgttttatgcaccggcggcttatcgtctcccgcgaccggctccaccggtgacggttaccgcattgcctcgaagctgggccacaccatcgttccgacgcgcgcatcgctcgtgccgttggaggcggagacagactgcgcccggatgcaggggctttctctgcggaacgtcgggctgacgcttttctccggcgataagatcctgtaccgggagcagggggaaatgctgttcacacatttcggcgtatcggggccgctcgtgctttcggcgagcgctcatcttccggaaaaagtctcctcctgccgtctggagatcgatctcaagccggggctcacggcggaaaagctcgatgagcggctgctgcgggacttttccgagaacatcaaccgcgattttacgaacgcgctcgacgctctcctgccgcagaaactcatcccggtcgtgatcgagcgatccggcatcccggcacggctcaaggtgaacagcatccgccgtgagcagcgtctcgcgctgcgcgatacgatcaagcgctttgcgatccggctcatcgcccgccgcccggtggaggaagccatcgtgaccgccggaggcgtggatgtgcgggaggtgaatccccgcactatggaatcgaagatcgtttccggactgtattttgccggggagatccttgatctggacgcctgtaccggcggatacaatctgcagatcacctggagcaccggctatgcggccggacgggcgatatgggaaaaggagattacggaatga

SEQ ID NO: 385 - DNA, 1116 bp, Unknown
  Unknown gut bacteria
atgatcgttaagggccaccgcgtataccgcggccgccgcggcgcggggcgcagcggctctccggtgctgctcacgatcctcgtgatcgtgctccttgggctgctgctcgcgttctcgctgctgccggaatacgttgtctaccaccgcgacggcgtggagatggtcgtgccggtgctgcaggaggatgggaagggttacaccgtggagggcatttccgcccccgtgccctataccggcgacgcttcggccgccattcaggtcgccgagccggattataccaacgtttcgctcgcaagcagcgcggggctgcagtatctgaccggatactatgtcccgttctccaaggtgaatgccaacgggctggaaacggcggtcaaggaagccgaacgcagcggcgtgaagggccttgtgctggaaatgaaggacgaaagcggcaagctcgcatggatgtccggcgtggcgacggcgtcgtccaacgccgcgaacagcacctgggacccgacggcgtatctgagcgagctcaaggcgcaggggtggaccatcacggcggagatctgctgcgccgtggacacgctgctcgcctcggccaacccggacgttgcgctgcgcgaccgcaccggcgcgccctatgtggacgagtccggcggctgggtggatctctggaaccgcgatgtgcgcacgtatatcgaagagctctgcaccgacctcatggcgatgggtgtggatgagatcatcctctcccgtgtggagcatccgttcgccgaggtcatgtacacgcgcgaaattgcctccagtctcaaccgcgaggcgttctgcatgaatttctccatcgccgtgcgcgaagcgatcgacaaaacgatgaaggacaaaaacgtccatctgagcgcgcgtgtgccgcacgacgtgctcacgaccggcaccgacaacggccagtcgatggataatttcctcaaggtctacgaccggctcgtcatcgagaccgagacctacagcgacgacgcgccgctcttcaccgaaaagaagatcgacagtacgctgcgcttcgtgccgcagatgacatggacgttcggcggcggctcgtggatccttgacccgaccgtcggcgtatcgaaataa

SEQ ID NO: 386 - DNA, 1074 bp, Unknown
  Unknown gut bacteria
atggcagataacagaaacatcgttctgtccgcaaaggacattgaagttaaattccgcgtccgtgacaattacctcacggccatccgcggcgtgtccctcgacctttatgagggcgaaacgttcgccatcgtcggcgagtccggctccggcaagagcgttttcaccaagacgttcaccggcatgctcgagtccaacggctccatcaccaacggctcggtcatgttcgagggcaaggacctcaccaagctcaagaccgataaggactgggaaggcatccgcggcgcgaagatctccacgatcttccaggacccgatgacgtcgctgaacccgatccgcacgatcggctcgcagatcaccgaggtcattgaaaagcaccagggcatttcccgcggcgacgcgaagaagcaggccatcgagcttatggagcgcgtcggcatccagaacgccgccgaccgcttcgacgagtatccgttccagtattccggcggcatgcgccagcgcatcgtcattgcgatcgcgctctcctgccacccgaagatcctcatctgcgacgagccgacgaccgctctggacgttacgatccaggcgcagatcattgcgctcatccgcgatctgcagaaggaactcaagttcaccaccatctacatcacgcatgacctcggtgttgtcgcgaacgtcgccgaccgcgtcggcgttatgtacggcggccagatcatcgagtacggcaacgtggaggaagtgttcttcgatccgcgccacccgtacacctgggcgctgctctccagcctgccgcagctcggcatcaaggggcaggagctctactacatcaccggtactccgccgtctctgtacaaccagatcaagggcgacgcctttgccccgcgcaatgagcacgcgctgaagatcgactttgaaatggagccgccgttcttcccggtgagcgaaacgcactatgccaaaacgtggcttctggatccccgcgcgccgaaactcgaaaagccggagatcattcaggatctgcacgagaagatcaagaagatgaccgataagggaggtgccttccatgtcgaataa

SEQ ID NO: 387 - DNA, 1107 bp, Unknown
  Unknown gut bacteria
ctcgccatgagcagccgcgtagggaaggggtacggcgtattctttacctgcgcgctgtatctgacgatcggcccgctttttgcgatcccccgctgcgccgcgacgagctttaccatcggcgtggagccgatgctcaccggcggcgcggtaacggagcttgccatattctccgtgatcttcttcgcgctcgtgctgttcttctcgctgcgcccgagcaagatcctcacatgggtcgggcggatcatcaacccgctgttccttgtgttccttgctgtgctcgttgtcacggcgctcgtaaagcctgtcgctgccgtttcgtcggtcgtgccggagggcgcatacgcctccagcgccttctccgccggttttctggacggctacaatacgatggacgcgcttgcctcgctggcgttcggcgtgatcgttgtgggcgtcatccgcgatctgggcattaagcacgacgccgccgtcgcgggcaacaccgtgcgcgcgggcgtgttctcgtgcgtgtttatggggctcatctatcttgccatgacgatcatcggcgcgcagagccgcggcgcattcgccgtgagcgccaacggcggcatcgcgcttgcggatatcgccggatactatttcggtaccgccggacaggtcatcctcgccgttacggtgacgcttgcctgcctcaagacggccatcggccttgtcacgagctgcgcggagatcttccgcgtgttgttcccgaagtccatgagctataaggcgtgggcgatcgtgttcagcgtcgtgtcgctgctgatcaccaacgtcggcctgacgcagatcatcgaatattccgtgccggtgctcatgttcctctacccgctcaccatcacgctcatgctgctgagcctgttcggacatttctttgactacgacaagcgcgtgttcgtttcggtcacggcgttcacgctggccgcggcggtgctggatctgctcgccgcactgccggacggggctcgtgccttcctgcatgtgaacggctttgtcgccttctgcaaggagagcctgccgcttttcgacatcggtctcttctggctcattcctgccgtcgtcggccttgtcctcggcttcattctc

SEQ ID NO: 388 - DNA, 1608 bp, Unknown
  Unknown gut bacteria
atgaaagcaatggataagctgatcgcgaagatcgacaaaaagctcgagcgctttgaccccatctggcaggccgaacacggcaccggcggccagagaacgcgctattacgataagaccggcgttgcgaagtggcgcgaatggcgcggcgtgaaggacacgctctacgactatacgcagtggctcaataacctctcgagcatggtgcagatggtggcgtccgctcccgtctcctgtctcaagggcttctgggaataccgctggatgggctcgtatctcggcacgttcatgttcatcgaccgcctgtttgagggctaccgcggctatgagctgcgcaccgcgcacacgaacatgcacgccatcgtgcagagccttaccaagcgcatcgcgctcgtcctctccaacgacaagcgcctcggcggcggcccgcgcagcgacgatttcctcccctttgacgaggtgctgcccccgctgtttctgacgggcttcaaggagctgatcccgttcccgctgcagacgctgccggagttcatcatctgcgatgtggaccaacacatcgagccgtactatatcgacgtggccgagtccttcggtctggcggcggacgtgtgctcgcgctgcgccgcggagaccggcgtcgctatcgacgatgctttccccatcatcggcaaggcgttcctcacgacgaacatgccgtgcaacgcctccgagtgtacctccatgatccagcgccgccgcgtggcgctgccggacttccccgtaacgctcgcgatgatccacaacgagccgggcgcacacccctattccacgcagatgctcaaggacgccattgccttcgtcgagaaggaatacggcatcaagtatgactgggacgagctgttcaagtacgcccggcttatgaacgagcagaacaccattgagctcgaaaagtgggactacttcaagaccccgtattccgcgctcgtcggcattgccgaaacgctctaccggctgtattcgtgggcgtccgtcaacggcaccgacccgtatttcaacaaggtcgatcgccgcgttatcgagatcatgcgccgggcatacgaggaaaagtaccagcctttcggcggaaagacgcgccaccgagccttcctttgggggccctctgcggtatactataccgacttcccgacctggacgcagaactgctggggcatcaacattgtgctgaacatggactccaccatgggtcacaacatgatcgacaccgaagaccccgaccaggcgatccaggatctggcgctcttctccgagaaggccaccatgcgccatcacgccgtcggcggctgggaaaatgtcaacgccctctgggagtgggcgaagaactttgactgcgacatggtccttttcaacgacaacatcgcctgcaagggcatgctgggcgtccacgctctcatggaggagcaggcgcgcgagctgggcttccacttcatcttcgtcgagcacgatctggaggactgccgcaccgtatcccggcaggatatgagaaactgcgtcaacaagtatatgtccgtcgttctcaacgagaagccgcttgacccgaccatcgtagagtttgacgactccatggcatactaa

SEQ ID NO: 389 - DNA, 834 bp, Unknown
  Unknown gut bacteria
gtgaaatatacagccggaaaacgcacgacggacatcgtcgtatccgtcgtggccatcgctctgggtctggtgctgatcttcccggtgatctactgtgttctgggcgccttcaaaactccggcggaatttctctcgccgcggctgctgccgagcagctttgcctatacgcagaacttcaaggacgccatgcatcaggcgcctatgctgcgctatatgctcaactctctcatcatggcgacactcggaacggtggtccgtctggtgttttccatctgcgcggcctttgcgctgacacactatgagttccgggggaagaacttctgctttttcctcattctcggcacaatgatgatgcccggcgacacgctcctcatcaccaactatgtgaccgtgtcccggctggggctgctcaacacctatctcggcatgtgcatcaccggctttgtcagcgccagccagatgttcatgctccggcagaaattcctttccgttccgaaggatctgcgctatgctgccatgatcgacggctgcggcgatctgcggtatattcttacgatcctgatgcccatctgcaagccgatcatcacgacgcttttcgtgcagagcttcatcacgatctggaacgcctatctctggccgctgattatcaccgccagcgcgcccgatatgcgcaccatcatggtaggcatcaccaagctgaattcctgggaggacaccaattatcagctcgtgctggccggcgtgacgatctccctgatcccgtccttcatccttttcgtcatcatgcggcggaacatggcaaagggcggcaccgaagggagtctcgtcggctga

SEQ ID NO: 390 - DNA, 1140 bp, Unknown
  Unknown gut bacteria
atgtacatcaagccgtttgccgtagaggaatggatgaacgaatgggaggtcggcgcgcgatacaacatcgcggagacgtgcgtcgattccgtgtcgctcaacgagctgttcgcgctgaccggcgaggacaaggccgcctttctggagaatctcgccgcgcgccggctgacctacggcgacattgaaggcgcgcccgcgttccggcagggcatctgctcgctttataaaacggtcaagcccgaaaacatcgtcacaacgcacggcgcggcgggcgcgaaccaccatgtgttctgctcgctcgtatcgccgggtgacctcgtcatcagcgttctgccgacgtaccagcagctctactccatccccgaatcgctcggcgcaaaggtaaagattctccccctgagccgcgaaaacgggtatctccccgatcttgacgcgctgcgcgcgctcgccgtgccggggataaaaatgatctgcatcaacaaccccaacaatccgaccggcgcgctcatgagccgcgatatgctcgaagagatcgtgcagatcgcgcgcgaggcgggcgcgtacattctctgtgacgaggtataccgccatctctcccagaccgacgagtggagcgagtccatcgcggatctttacgaaaagggtatctccgtgagcagcatgtcgaaggtcttctctcttgccgggctgcggctcggctggatcgccacgcgcgacaaggacgcgctccgcgcgctcgtctctcaccgtgattacgatctcatcagcggcggcatgatcgacgaggccattgccgcgctcgcgctcaagcacagcgataaaatgctcgcgcgcagccgcgccatcgtgcgggaaaatctcgccattctggacaattgggtcgccggagaaaagcacgcgagctacgtcaagcccctcggcggcacgacggcgctcgtctactacgatttcgacattccctcatatgagctgtgcgaggagatgtaccataagaccggtgcgttcgtcacgccgggcgactgctttgaacagccgaagagcatgcgcatcggctacgcctacggcaaggaagcgctcgtgaaagggctgaaggccgtgagcgagtactttgcgtggaaggaaaaggagctggaaaaatga

SEQ ID NO: 391 - DNA, 987 bp, Unknown
  Unknown gut bacteria
gagatcgtgaacgagcttgaggaatactgctgcgccatgtggaaaaaggtgttccataccgactaccatgtgaacgtccagccgcacagcggcgcgaacgcgaatctcgcggcgtatatgagcgtattgcaaccgggcgacacggtcctcgccatgtcgctcaataacggcggccacctgacgcacggctcgtccgtcaatttcagcggcaagctcttcgatatgaaattctacgacgtggacgcgcagggcttcatcgactttgcggacgtggagcaaaaggccgccgaatataagccgaagctcattctcgcgggcgcttcggcgtacagccgcgtcatcgatttcgcgcgcttcgcggacatcgccaaaagcgtgggcgcatactttatggtggatatggcgcacatcgcgggtctcgtcgcggcaggggaccacccgtcgccgttcggactcgccgacatcatcacgaccacgacgcacaaaacgctgcgcgggccgcgcggcggcatgatcttctgtaagccggagcttgcgaagaaggtggacagcgccgtgttccccggcacgcagggtgggccgctcgagcacgtgatcgcgggcaaggccgtcgccgccgaggaagcctgcacggacgaataccgcgaatacatccacgccgttgtgcgaaactgccgcgcgatgtgcgaggagttccggaaaatgggctacgacgttgtgaccggcggcacggacaaccacctgttcctgctcgatctcacgaaaacggggctcaccggcaaggcggtgcaggatgagctcgaccgccatggcatcacgctcaacaaaaactgcgttcccaacgaaacgagaagcccccagcagacctccggcgtgcgcatcggcaccgccgcgatgacgacaaaggggtacaccgaggcggacttcctcgccgccgcgcaccggatcgacgaggtgctgcgcgcgatgcaggcaaaaaccatgtaa

SEQ ID NO: 392 - DNA, 834 bp, Unknown
  Unknown gut bacteria
ttgtcgatccttaacgcgatatttctcggcttcgttcagggcgtggcggaatttctgcccatctccagctccggccatctcgcggtgctccagaatgttttcaacctgcagactgcggaagagggccatatgttcttcgacgtgctgctgcatttcggcacactgatctccattatgatcgcttactggaaggatattgtctacatcgtatccgacaccgtcggccttgtccgctcgtcacacgataccttcccggagcagcgcacggagcgccccggcgcgcggaggctgctgatgctctttttcggtacgctgccgctttttatcattcttccattccacgattctctggagcagctctattataagaccggcttcatcggcgcggcgttcctgctcaacggctgtttgctctatgtctccgaccgcattgttccgggccgcggcaatgagcgctcgatgcgcatccgcgatgcgctgctgatcggctgtgcgcaggctgtcgccaccatccccggcatttcccgctccggcagcaccatcaccgccggcatcgccaccgggcagtcccgtccgttcgcaatgaaatactctctgctcatgagcattcccgccgtgctcggtgcgaatctcctttcgctcatcaaggcgatcaaggcgggcgtggagtggtccaatttccctgcgtatctgatcggcatgatcgtttcgatcgtcgtcggctatttcagcatcatccttctgcagcggctgctcaagaagggcaagttcggcaatttcgcttattacatgtggggcgtcggcgtagtcacgcttattgcctcgcttttctga

SEQ ID NO: 393 - DNA, 1335 bp, Unknown
  Unknown gut bacteria
gagggcaccggaacgccggagcaggtctataacgccgcgctccgccgcagcgaggagctgacggcacaggcggcccaaaagatcgaagagcttgcctcctacgcgccgcaccgcgacgcgctgcagctcggcgcggacacgctctcgacgcgcattgcgcgcgaggagacggccgaaaagctcctgcagtcggacagcaccttctattttgaaggctggctcaccgcgccggaggagaaaaagctcggcgagactctctcgaaatactgctgcgcctgggaaacggaggagcccgatccggagcacccggaggaggtccccatccagctgcgcaataacgcgctgacccgtccgtacaacatcgtcacggagatgtattctctcccggcgtacaacggacttgaccccaacccctttatcatgccgtttttcgcgctgttcttcggcatcatgttcgcggatatggcgtacggcctcatcctgctgatcgcgggactgctctttctctggaaggcaaagccgaagggaagcatgaaaaacgccgcggggctgctgatcgaatgcggcatttccacattcatcataggcttcctgaccggcggcttcttcggcgacgttgtctccgtcatcggcggttggttcggcagggactggtcgatcgtaccgcacctcggcacgatccatatcggcagcatcgcgatcgatctgccgctcaacctgctcgagggcaacaacccgctgtatgtcctcatcgcggcgatctgcctcggcgcgatccatctggcgctcggcacgggcatcggcatctatctcaagctcaaggacggcgagtgggcggacgctctgctcaacgatctgtgctggtgggtgatgatcgcgggcattctcgtcatggtgaccggcggaacgaagatcgttctcttcgtcggcatcggcatgctcgtgctcggacagctcatcaccggcaagggcttcggaaagatcaccggcattttcggcgcggtgtacaacggcgcgaccgggtatctgggcgatctgctctcttactcgcgtctgatggcgctgatgctcgccggcagcgttattgcgagcgtattcaaccagctcggttcgctcggcaacgccaacggcatgaccgtgggcggcacgatcctcttcgtgctcgtgttctgcatcggccatgcgctgaactttgcgctgaacctgatcggctgcttcgtgcacacgctgcgactgcagttcctcgagttcttcggcaagtggtaccgggacggcggcaaggctttccgtcctttgaaaattcaaacgaaatatgtagatatcaaggaggagtaa

SEQ ID NO: 394 - DNA, 915 bp, Unknown
  Unknown gut bacteria
gcgacggaatggatgggtattacggctatgagtcttaacagaatcacatatctcttcaaggaaggattgcgcggcgtattctcgcacggcttccgctcgttcgcttccgtcacggtcattgccgcgtgcctcatcatcatggggagcttcggccttgtggcggtgaacgtggataatctcatcggcaatatggaagaagacagccagatcctcgcctttgtggatgagtctctctccgacagcgacgcgctttctatcgaaggcgcgatccgcagcatccccaacgtccgggacgtgcagttcatctcccgtgaagaagccatggaaaattacaaaaacacctatggcgacagcacggtgtttgaaaatctggacgcgagcgtgttccgcaaccgctatgtgatccggctgaatgatatcacgctcatgcgtgataccgctgcgacggttgacgcggtcaacggtgtggcggaagtcaacgctcctgtctcgatcgcggagggctttatcgcggtgcgaaacgttgtgagcgttattacggcgatcctgatcgtcattctgctcgtggtttccgttttcatgatgtccaacaccatcaagctcgcaacgttcacgcggcgcgatgagatcgccgttatgaaaatggtcggagcaagcaacagcttcatccgcacgccgttcgttgtggaaggcctgatcctcggcctgctcggctcgggcatcgctttcctgctgcagtgggcggtgtacaacttcattgcgcagaagatctcggtatccatcgcggcaagtctcatccaggtcatgccgttctctctgctgatgacgccgctgctgatcgtgtttcttgccatcggcattctcgtcggcgcgttcggcggagccatggcgatccgcaactatctgaaggtttga

SEQ ID NO: 395 - DNA, 1392 bp, Unknown
  Unknown gut bacteria
atgctcttttccggtatcccgttcctcttttactttctcccgtgcgtgctgctcgtctacttcatcgtgccgcaaaaggggagaaacgccgttctgctcgccgccagcctctttttttacggctggggcgagccgaaattcctgctcttcatggtgttttccatcgtgcaggggtatgtctttgcgcgcttgatcgggcgggggagaaggaaaaagctctttctcacgctctcgctcgtgctgagctttgccctgctcggctactgcaagtacgcggatttctttatcgaaaacttcaacgccgtgacggggctatcgctcccgcttttgaagatcgccctgccgatcggcatcagcttttatacgtttcagatcgccagctatgagatcgacgtataccgcggcgatgtggcggcgcagcataattttatcgattttgctgcctatgttgccatgttcccgcagctcatcgcgggcccgatcgtgcgctaccgcgatatcgcgccccagctgaaggagcggacacactcgctcgaagccgcggcctcgggcgcttcgcgcttcgcggtcggtctcgggaagaaggtgctcgttgcgaacgtcctcgcacagctcgtctccgcgtataaggcttctgccgagcagacggcgctctatgcctggctgtacgcgatcgccttcacgctccagatctatttcgatttctccggctacagcgatatggccatcgggctgggccgcatcttcggcttttcgttcccggaaaacttccgctatccgtatatcgcaaagagcatcacggagttctggcggcgctggcacatgtcgctcggcacatgggtccgggacgatctctatatcccgctcggcggcagccgctgctcccgcatccggcacattttcaacatcctcgtcgtctggatggccaccggcttctggcacggcgcggcgtggaatttcgttttctgggggcttttctatgcagtgctgctcatggcggagaagttcttcctccttccggcgctgaaaaaggggagagttcttccgcacgtctatgtgcttctcgccgtaacgctcggctttgtgctctttgacgcggcgtctctgaaggatgcgctgcatcagctcggtacgctcttcggcgcgggaacggcttcggggctggggacagaggctctctatatgctccggagctacggcgtcgtgctcgcgctcgccgcgctcggcgcaacgccgctcccggcgatgctttggaaaaaggtgcaggaggcaaagtctctcgcgccggtgctcacggtagcagagccgctctgcacgttcgcgctgctcgcgctctgcaccgcgtttctggtggacgggtcgtttaacccgttcctctatttccggttttga

SEQ ID NO: 396 - DNA, 738 bp, Unknown
  Unknown gut bacteria
atgctggagctgaagaatatacactattccgtggacgcgccggagggccgcaccgagatactgcgggacatttccctcaccatcccggacaaaaagctcatcgttctcaccgggccgaacggcggcggcaaaacgacgcttgccaaggcgatcatgggccttgtgatgccgacaggcggcagcatcctctggaacggcgaggatgtgaccggcctttccatcaccgagcgcgcgcgccgcggcatcagctacggcttccagcagccgccgcgcttcaagggcatccgcgtgaaggatcttttgacgatcgcgtcgggacagaagttcctgccgcggggcgaggcctgcaagtatctcacgcaggtcggcctgtgcgcggccgattatcttgaccgcgaggtggacgcctccctctccggcggcgaggtcaagcgcatcgagatcgccacgatcctcgcacggcagccgcagctcatgatcctcgacgagcccgaggcaggcatcgatctctggagcttcgcgcgccttacggaaacgtttgaggagatccacacccggcaggactgcacgatggtcatcatctcccatcaggagcgcatcatctcgctggcggacgagatccttgtgatcgacaagggcgtgatcgcgcgccgcggcacacgcgacgaggtctttaccgacatcgtccacagcaccacgggcggctgcccggtcatctacggggaggcgaagaaatga

SEQ ID NO: 397 - DNA, 1425 bp, Unknown
  Unknown gut bacteria
atgccatacgagagaaccgaggtctccgcgcaggagatcgaacggcagaaagagatatgtgcgcgcgtccgctccgccctcggcagcggcgagcgcttcgccatggtagacacctacggctgccagcagaacgagtccgacagcgaggtgctgcgcggttatctccgcagcatgggctatacgatgaccgacgacgaggacaaggcggacgtcatcgccgtgaacacctgcgccgtgcgtgagcacgcgacgatgcgcgtgttcggcaacgtcggcgcgctcacgcatttaaagcgcgtccacccggaacgcatcgtgattctctgcggctgcatggcgcagagcgaggagatccgcgagcaggtgaaaaagtcgtaccgcatggtcgatctctgcttcggcccgcacgagctctggcgtttcccggagctttttgagagaacgctgcaggtccacggtctctccggcgcgaagggccgcgtgttcgatgccgagagcaccgaatccattgccgaaggtctcccccgcgagcgggaaggcagcgtgaaggcctggctctccatcatgaacgggtgcaacaacttctgctcatactgcatcgtcccctacgtccgcgggcgcgagcgctcccgccgcagcgaggacgtcgtgcgcgaggccgaagcgctcgtcgccgccgggtataaggatattacgctccttggccagaacgtgaactcctatggccggggactggacgaggatgtggatttcgcggagctccttcgcaaggtcaacgccattccgggcgatttccgcatccggtttatgacgagccaccccaaggacgcgaccgagcgcctttttgctgccatggccgagtgcgaaaagtgcgccccgcacatccatctgcccgtgcagtccggcagcgaccggatcctgcgcgccatgaaccgcggctatacggcggaaaagtatctcgcgcaggtcgatcttgcgcggaaatacattccagacctcgtcctcacgaccgacgtgatcgtcggcttcccgggcgaaacggaggaggacttcctcgatacgctcgcgcttacggaaaaggtgtgctttgactcgatgttcacgttcatctattcccgccgtccgggcaccccggcggcaaagatcgaggacgatacgccgcgctccgtcattcaaaaccggttcgaccggctcgtggagagcgcggggcgcgtctccgccgagctgcaccgcgcgcaggaggggaagatcttccgcgtgctcatcgacggcacggcgaaaaacggcgactatacgctctcggcgcgcaccgccgggggacggctcgtgcatctgtgcggggacgaatcgctcatcggatcgtgggccaacgcgcgcatcgtttcaagcaatacgttcgcgctcttcggcgagatcacggagtaa

SEQ ID NO: 398 - DNA, 1452 bp, Unknown
  Unknown gut bacteria
aagcgctccaagcggcgctggcggcggttccttgtcctgtacgccgtggtgtggctgctgttcgcctcgctcgggtgcgcggcgttttataaatacctgcgcgtgtacgagcaggcgctgccggagcatgtgatggactctctcatggagaccaccgcgccggaaacgtggctcggctatgtgaaagcctcgatcgagagcgagtccggtgaatttgacgacgccgcggcgctctatgaggagtacgagagcgttctgctcgccgggaagagcttttcctaccgccgcgcgccggagagccgcgcggatgcgcccaaattcattgtccgctgcggcggtgtggacgtttgtaccgtgtcgctcggcgaaaagccggacagcgatctcggcttcggcaggcatctctggcaggtcggcgatatcgcgccgtgcgaagcgctcggcaatctccgcagcaccgccgtagagatcacggcgctcgcgggcgaagcggtatatatcaacggcatcccgctcacggacgcgcagatcgccgagacgggtcttgcgctcccggatatgccggcaatcgagagccgcttcacggctgcccccgctctcacgcgctaccgcgtggagaaaatgtacggttcgatcaccgtcacggacgcctccggcgcggagatcgcgcccgaagcggacgcgggcgacggcgtcacgcgctacgcgcttcccctgccgcgctacagcgtttcgatcaccgccccgtcggacgtcacggtgacgctctgcggcgcggttctcacgctcgacgacgccgaaagctccgaccgcggcatattgcgcgggctcgagaactacaccggcgatcaggcgttcgacaccgtacgctggtcgttcgacggtctctactctctgccggacgtgcaggccaccgccgccgacggcacggcgctctccccgctcgtcgggaaaaacgggcagctcatgttcttccatccgaacaacgcctcgctgcaaagcgccgtggaaaaccgtgtgcggtacttcttcaaccgatacattgattacagctcgcgctcgttccagggcaatctcgccctgacgcgcgaggatgtggaaaacgacgagatcgagatgaaccccgcaacgcgcgcctccatgcggcgctactacagcctgctcgactgcattatgtggacgaccgatctgtaccgctacattcaggaatcgaccgacgcgatgatctgggcctccgcgacgagcgtgagctatgacgagctcaccttcacggacttctcgttcgtcggcgcgaactgctttgtctgcaccgtgcgctacaaggcggacttcaccgcaaactcgtggcaggagcagaagaactacaacatgcagaacgcctacgagctggcgttcgtctgtccgaacggcggcgcgtggtacgccgcggcgatggacgccgtgaccgaataa

SEQ ID NO: 399 - DNA, 1419 bp, Unknown
  Unknown gut bacteria
atgcacagaacgtatttccggaccttcaccacgaccgcggcgatggtccttgtgagctttctgctcatcggcgcagccttcggctttgcgagccgtcaggtgttcgtgtccgaagcgcgcgagagcatgatgacgaactcacgcgaaatatcgcgcatggcggtcgcttatgccgccgagggcgatctgcgctcgctcgagctgcgcatgacgctcagcaccatcggcgcgagcacgaatcagcacattttcatcgtcaatccctccggatatatcatcacctgctcggactccgccgttttctgcgagcacatcggaaagcgtctggatgagagcgtaacggcgatcctgccgcagtccggcacagtcgcatcgctcggcacgctcggcgggttttacgcgagcgagcattataccgtcatttccgcgctcaccgatgacggcacactgctcggccatctgttcgtttccaaggacacggtaaccgcgctctccatctgggagacgatcctgccgctgttcttctttatcagtcttatcgtactctgtctcgcactcattttcagctacgcgagctccaagtacttcgccaagcccctgcgcgacatggcggacgcggcgcggcgcttcggccgcggcgagctgaacgtccgtgtggagccgaccgacagcaccgacgtgatcggcgagctgacagaggcctttaactccatggcggactcgctcgagcagtcggaaacgaagcggcgcgagtttatcgcaaacgtatcacacgagctcaaaacgccgatgacgacgatctccggctttgccgacggcattctcgacgggacgatcccgccggagtcggaaaagaaatatcttcagatcatctcctcggagacgaagcggctggcccgcctcgtgcgcagcatgctggagctttcgcgcctgcaggcaaaggaccgcgcaacgctcctcaagaacagctttgatatttccgagcagctccggctcacgctcatcacatttgccgataagatcgatcagaagcatctggaggtagtgttcaacgttcctgaggaggcgatcaaagttctcggcgatgtggacgccatcacgcaggtcatctacaatctgctcgataacgccatcaaattctcccgcgaaaattcaccgctcaccatttcgctatggaaggacagcaagaaggcctacgtctccatccggaactgcggcagcaccattccggaggcggagatcccgctcctcttcgatcgcttccacaagtccgaccgcagccgcagccaggaccgcgacggcgtcggtctggggctttatatcgtcaaaaccattttgaacaaccacggcgaggacattgccgtgacaagccgccagggtgtgaccgactttgtgttcacgctcgcgctcaaaccgtaa

SEQ ID NO: 400 - DNA, 1098 bp, Unknown
  Unknown gut bacteria
atgaaccgcacgatcggccttatttccaccaactattccgttcccggcttcggctccgttaccgaggcgcgcccggcagcgagcatcccgttcggcgggcgctaccgcctgctcgactttgctttgagcaacatggtgaactcccgcatccagacggtgggactcgtcacgccgtatttctaccgcagcatcatagatcacgtcggtgcgggcaagccgtgggacctctcccgcaaggagggcggtctttacattctgcccggcacggtgttcggcttccacgaagagaacgcccgttttctcttccgcgatctgctgcacaatctggaatatctccgtcagggcgacggcgactatatcctcgtcagctccggcacgctcgtggcgaatatcgactatcagccgatgatcaccaggcacgagctggagggcacgcccgtcacgctgctctataagaaaatgcagccgggcgagaagcgcccggggcgctatctcacgctcgacggcgacaccgtcgccggcatccggcgcgcggacgagggcgaaaacctcctgcttgactgcttcatcgtcgataagtcgttcctgctccgcatggcgcgcgactatgccgcgctcgactatatggattttcttgacatcctcgcccacgtcctgccggaggtcgccgtcggctgctgcgcttttgacggctatgtcgccttcatggacggcatggaggactatttccgcgccagtcttgatctgctcgacagctccgtccgccgcgagctcttccagtccgaccggcccatctgcaccaaggcgcacgacacgccgcccgcgctctatgcccccggctccgcggtgaaaaactccgttatgaccgccggcagcatcattgagggcagcgtggagaacagcgtgtgcttccgcaacgtccgcatcgaaaagggcgcggtcgtaaaaaactgcgtgctgatggaaaagtgcgtcgtcaaggcgggcgcgcggctcgaaaacgtcgtgtgcgataaaaacgtcaccgtttccgaggacaagatcgtctgcggcacggcggagcatccctgcgtgctggcgaaaggcggcgttgtatga

SEQ ID NO: 401 - DNA, 2370 bp, Unknown
  Unknown gut bacteria
atgaaaaagggtgcgaaagacaaaaagtttttcaatctgaagaaagcttcatcagatacgaaattaaatgacacagtaaatgaggttgaagtaatgttaccttctgaagacattctttctgaaaatacaaagaagaaaaagggtctggatttttcaaagatcagaaagaagaaaaaagaaagaaaacagcagatggaagagagccttaccgaagtgaaggacaggggcaggaaggttaagaaagatcttaagaaggctcagaatgaagtccgtgaggatgtgaaggacagtgtcaaacagaagaaggactccaatttgaaatttggtattttcggtcttcgcagtaagatttatctgtgtttccttgttccgattgtgtttatgatcgtggtgggtattgtttcctatcggtatgcagaggatggactgagtgagaaatacatggaatctacccaacagacagcaaacatggcaacagactatatggatgtaagctgctccggtattaagtcggaagccatgcagtatgcttttgatggtgatcttgagaagtatttccttggactaatgggtaagtccgcgattgaaaaggcgaactattacagtgacaccagagtgaaactggcagcatcaaagacggcggattcttttatcaatgacatccatataattaccatgtccggcaataactgcatgacaacgaaaacgtctgataaaattgacggtttttataaggatctcctttcagaaattcaggaaatgtcaccggatgcatccaatataaaaaagtggatcagccatcatgatataattgatgaaacacttggcagcagcagtgatgattattttgtctcctatgcgttgccgtcgagtcagaagatgggatatattgtaattgatgtaaacagcgatgcagttcgtgatctgttaagtggtatggatttgggatccggaagtattatcgggtttgtaacagatgatggaaaagagattgtctgcaccagagatgatgaggacaaggttgttttccttgatgaatctgttttccccggtcaggacttttatgttgaaagctccggcagcgatgaaatggccggaaatatggaagtaagatacaatggaaagcattatctctatatttacagccgcagcgaagctaccggaattaccttctgttccctgattccttccagtgtagtaaccggccaggcagaaaagattaagaatattaccattgcttttgttattattgcatgtatcatttccatgctgattggtaccataattgctcagggaatattaagaaatatgagaagaatttccaagcgtctgaatcaggtggcagaaggtgaccttactgttcaggtggatgccaggggacgtgatgaattccagtctcttgcgaagacggcaaccaacatggttcataataataagaagcttgttatgagattgtccggaacagctgcccagctggaggcctcttccgatgatgtacataatgtatcaagcagcattaacaattattcttctgatattaccaaggcaattgatgaaatcagtattggtatgacgaaacaggcagagcatgccgaagaatgtgtaattaagaccaatgagctgtctgagaagatgaaggccatcagtgacatggtggaaaaggcagagcagctcagtgataaaacggaaaacatgatcaggaagggtaccgaaatcgtggaagtgctttccacgagagcgaaggaaacttcagatattacgaataaggttggtgaaagcatcagcctgttaaagaaggaatccgaaacgattaatggatttgcacagaccattaaccagatttccaagcagacgaatcttctttccttaaatgcttccattgaagcagcaagggcaggggaagccggaagaggatttgctgttgttgcacaggaaatccgtaatctggcagatgattccagtgtggcagcaggcgagattaagaataaggtcgagattatttccgcacagacgatgtctaccgtagagagtgcgaagaatgcggaagagatggttgcgttccagcaggaagcagtaggacaggttatcgaggtctttaaggaaatgaacgatcagatgcaggagcttttcgtgaacttaaaggagatcggcgattgtaccgcttctgcggatgtggagagaaacgaaacacttgatgccgtagagaatatttccgcgattattcaacagactgcaagcagctcttcactcgttcatgatatggctttagagcttctgaacaatgttgagaagctgacacagactgctggagttctggatgataatatgaacggtctgaaaactgaaattaatgcctttacgattgagtaa

SEQ ID NO: 402 - DNA, 6120 bp, Unknown
  Unknown gut bacteria
caggtaagagagtacaataacgaatatgttcttactgcagaattccgcagtgacaggtacagtgatgcattcgtggcaggaatgcttgaagcgtacgaagcagccatggattccatgctgaaaaacaagtacgtatcagaggtttccattctctctgagaatgcggttaagaaaattgcagaattcaatgatacggcctgcaaatatgacagaacgaaaacaatttctgaccggtttactgaaatggtacagaccataccggatcatacggctgtggtatttaaggataagaagtacacctacaaggaattggatgagatcagtgaccggctcggaaaatacattgcctcccgtggtattggcacggaagatgtcgtgtccattctgattccacgttgtgagtatatggcgattgcaccgatgggcgtgattaaagcaggagccgcatatcagccgctcgatccgtcgtatccgaaggatcgtctgatgtatatgctggaggactccgcagcaaagcttctgattgcagacagagagcttctgcatctggtggacggctatcagggacctgttttatataccgatgaaatcatgcagcttgaggatgtggatgtggaattgaaaaagccgcagcttcatgacctgtttatcttactgtatacctcaggttctaccggggtaccgaagggatgtatgctggaatatggaaatattaccgcattctgtcactggtacagaaagtattacagcattgatccggattgtaaggtagctgcctatgcatcgtttggttttgatgcttccatgatggatacttacggtgcaatcaccaatggtgcagaattacatattattccggaagaaatccgtctggatttcattggcttgcagaaatactttgaagaaaatggcattacccactccttcatgaccacacaggtcggaagacagtttgcactggaaatggaatgcaggagtctccgttatctttccgtaggcggggagaagctcgttccctgtgaaccgccgaagggatatcggtttttcaatgtttacggtcctacggaaacgaccattcttgtaacggcttttgaggttgacaagtattatccgaatattccgatcggaaaagcactggataatgtgaagctttatattacggataaatccggtcatatgctgccgtatggtgcctgcggagaactgatgatctcaggcttccaggtttcgagggggtatcttaataagccggagaaaacggcagaggtatatacgaagaacatttatgatgatacggaaggctatgaagtgctgtatcattccggtgatattgccagatatcttccggacggaaatgtccagatcatcggcagaaaggattgccaggttaagatcacgggcttccggatcgagctttccgaagtggaagaggtcatccggagataccagggaatcaaggatgcaaccgttgttgcttttgatgatccgaacggtggaaaatacattgtagcttatgtggtatcggacagtgaagtggatatcaatggcttgaatgatttcattaaggaaaccaagcctgcttatatggtacctgcagttaccatgcagatcgacaagattccgcttaatcagaaccagaaggtcaataaaaaggcacttccggtaccggagagaaaaatcgaagaaatcatcgagccgaagaatgaaacacagcagaaattatttgactgtattgcagacgttcttggctataaagaattcggcattaccacggatatttatgaggcaggactgacttccatcagtgcaatcaagctgaatatcctgatttccaaggcatttgacatagtcattaagacctcggatattaagagccatccgacaattgaactgttagagggctttgtaaagactgccggtaaggaaacaaagagagaagtacaggagaactatccgcttactaatacgcaggaaggaatctttattgagtgtacggccaatatgggctctaccatatacaatattccttatcttttgaagcttaataagaaggtagatcttgacaggcttgcagcagctattgacagcacaatcgaggctcatccttatctgaagacacgcctcttcatggatgaaaacggagatgtccttcagaaacgtgatgacggcttaacctgtaaaacacagattatcaatggaatgaacagggaaacgctggttcgtccctatatgctgtttaatgagcagcttttccggtttgaaatttacagaacctgtgatggaaattacctgttccttgacattcatcatatcattgcggatggaacctctcttggtattatactgaacgacattaacagggcgtacagtggagaaaagctggaagcagaaacctatacctcctatgacctggctctggataaccgtgatgcattgaagagtgatgtttataagaatgcagagaactattataaatccgtatttgaaaataagggtggaagcatcaacttctatccggataaaaacggtccggttccgaccgcagagacttaccacagagaggttacggaggtttccgtacaggaggtaaaggacttctgtaagaagcacggaattaccgaaaatgttttctttatttcggtgtttggcctcactcttggtaaatacaatttcagaaaggatgcagtatttactaccatttatcatggaagaaatgattccagactttcagaaaccgttggtatgctggtaaagacacttcctgtttacacggattttgcaggaagcttaaaggatggcctgcttgcggtacagcagcagctgatcaactccatgaacaacgatatttatccattttcacagatcagccatgagttcagcatcaaggcagatgccatggtgatctatcagggagacaattttgcgtttgatacgattggtggtgaatatgcacaggaagaaccgatcagcctaaatgcagcgaaagcaccggtttctatcagtatttccattgaccggaacaaatttgtcttcgaaattgagtaccgtggggatatgtactatgaggatacgatgaaataccttgcggacaatctggaaattgcggcaggtggaatcttaagagaacaggaaccggatgacattaagctgctgtttgaagaaaagacaacgatggaggatgatccggagcatgcaggaaagaccttcgtggatctgttccgggaagctgtagaaaaatatccggacagaccggcagtaagagatggaaagggcgaaattacttaccgtgaattggacagaatgtctgattacgttgcacagaagcttaccgaaaatggctttggcagagagcaggccgcaggtattctgtgcggaagaaccagggaatttgcggttgcttatgtgggcgttatgaaggccggcggagcttatgttccattggatccggagtatccgcagagcagaattgagtatatgttaaaggactccggggcggacaatctgcttgtgattaaccagtaccgtgaactggtcagcttctatgacggaaatattttaagtctggatgaggttgcagaggcatcgaaagactttacactttccgtagagcttacgtcgccgaagccggaaaaccttgcgtacatgatttatacctccggttccacaggaaagccgaagggtgttatgcttgaacagcggaatctgctcaatctgattgaatacatccggctgaccagaaaaacttcaccggatgatatcgtggcagaatttgcaagcttctgctttgatgcatcggtcattgacctgtttgctccgcttaccgcaggtgcattgctgtatattttcccggaggatatccggaaggatgctgttgctgttgcaaaatgcatccaggatcagaagattaccagtgctacattcccgacacagatgggtgaactggtaacagagctgcttgaagatgctccgtgtcttaaattcgttacccttggcggtgagaaattcaagcattacaggaaccgtacctatcagatgatcaatggctacggcccgacagaaaatacggtatcttccacagagttctgggtagataaacaatatgacaacataccgatcggcaagtcccagcggaatgtccgcagctatgttgtcagcgaagatctgaaacggcttccggttggtgcatccggcgagttatgccatgcaggacgacagattgccagagggtaccataaccttccggaaaagaccgcatcggtatttgtggaaaatccgtattccgtatgtgaagatgacaagcgtctttaccgtaccggtgatatggtacgaatgaagggtgacggaaatattgagtatatcggcagaattgattcgcaggtcaagatccgtggataccgtgtggagcttggtgaaatcgagggtgccgttctgaagcatgaactggtaaagaattcggcagttactgttgtagaaaagggcggaaacaagtatattaccgcatattatacgggagagagcattccggatgaggagcttaagaccttcttagagccgttgattcctgattacatgatgccgtccttctttgttcatattgatgaaatgcccgtaaccccgggaggaaagattgataaaaaggcacttcctgtaccggaagtagctgtaaacaacacaagctatgtagagccggttaccatggttcagaagaccctttgcgagatctttgaaaaggcactgggaacagagaaggtgggaatcgaggataacttctttgatctgggaggctcttcacttaccgcatcgaaggttgccgtgatgtgtctttccaggaatatttcgattgtatatgccgatgtgtttaaacatcctaccgttcgcgaactggcagaaatcgtggatgatcaggcatccgcagaaagcccgcaaagcaataatgagttttctgattacaactataacaggatccagagcgtcatcagcggaaatgtggaagagaatgcagaccggatcaccaaggaagaacttggagatatcatgattacgggtgcgaccggtttccttggaatccatattctgaaagcatacctcgacaattacgatggaaaggtttattgtctggtgcgtaagggctcttatgaatccatggaaaaacgaatgatgcatatgctgatgtattattttgataatccgtgtgaggaactgttcaaggaccgcatcgtctgtgtggacggtgacattacctcaaaagagcaggtggaaagctttggcgcttataaattccggacgctgattaactgtgcggcctgtgtaaagcattttgcagccggtgatgtccttcaaaagatcaacgtccatggtgttgagaacctgattgagttctgtaagaacaatgggcgcaggctgatccagatttcaaccgtttccgttgcaggagagggatcaaatggtgttccaccgatggacagagtctttagtgaaaatgatctgtatatcggacagagtattaccaatgaatatatccgcacgaagttccttgcagagcgtgcggtactggaagcggtttccggtggacttgatgcaaagatcatccgtgtaggtaatctgatgagcagaaactccgacggggaattccagattaactttattaccaacggattcctgcgaagcctcagaggatataaggcaattggcaagttcccgatgggcggcatgcatgaggttgcggagctttcaccgattgactcaacggcacttgcagtattgaagctggtacagactgaccggagatttaccgtattccatgcctgcaacagtcaccatatttatatggcggatctgatttatgcaatgcgcaattacggatttaaactggacatcgtaaaggacgaagagtttgaggaggcagtaaaggaatttgcaaagaacggtaatgattccgatgccgtttccggactgattgcctatacctcacataatgaaaatgagatctatacgatggaatacagcaaccggttcacggcacaggttctttaccggctggattataagtggccggttaccgatgaccgctaccttgaaagtgcaatcgaagcacttgacagacttgcattttttgactga

SEQ ID NO: 403 - DNA, 3207 bp, Unknown
  Unknown gut bacteria
atgcttgaccagccaattacggcggtgaatgggattgatgctgcgattacaatgcttgatcaattgggggatggaacaacatttggaaatctgtctgctgatcaacaggagaatatcagacagctgtgtacttcaatgggaatttcaactccaactgatggtacaaccatgggagatattaaggcctctttaaggcaggtcaaagcaggaatccttagtcacgcgggtgtaaatgatgtaagtgaactacaaacgaaaaagtccgatctggaaagtaccattgctgatcttgagtcccagaaggccatggctgcagcaccaattgaccagtataagtccgcactttctgaaattgaaggaaatatcagtaagctggacagcgcgttaacagaattgtatcagggaaacctgcaggcagccattgagtttgccaatgcacagaccacaatcagcttaggagaaatgcagatagcttctgcggagtccgggctggactctgcacagaagcagcttgaagctggggaagaacagataaaatccgggcaggagcagttagatgccggagcggatcagattaaggagggatatgaccagattaatgacaatgcagaacagcttgcggatgcattgcagcagattctggacggcgaagagcagatcgaggaagcgagggaggatgcgtacgaccaggcagatatgaatggcattcttacggtagataccgtggaacagcttctggctgcgcagaatttctcaatgcctgccggatacgttaccgaggatggtatttcttacctgatccgcgtgggcgataaaccggatacggttgaagagctaaaggcgatgccgattttaaatgtggatatggatggcgttgatgtgattaccttaggggatgttgccgatgttttcatgacagacaactctgcagatatttatacgaatgtaaacggagaaccagggattcttttaaccatgcagaagcagaccggttattcgaccggagaagtatcggacaagatccttgcaaggtttgatgagctgttagagcagaacgaaaatctgatgctgattacccttatggatcagggaatctacattgatatggtcacggattccatctttaacaatattattttcggagcaggacttgcgatccttatcctgctgctgttccttagagacatccggccgaccgcagtgattgcctgctccattccgatcagtatagtggcagcggtagtctgcatgtatttcagcggagtaacccttaatgtgatttctctttccggactggcgcttgggattggtatgcttgtggataactctatcgtagtaattgagaatatttaccggcttcgcagcgagggggcttcagtaacggaagcagcgattgaaggaaccagggaagtggcgggagcgattgcagcatcgaccctgacgacagtctgcgttttccttccgattgtctttacagaaggaattacacgtcagttgttcgtggatatgggactgacgatcggatattcccttggcgcaagcctcatcgtggcccttacggtagttccggcaatgtcctcaaagattctggtgaaaacaaaggaacagaaggagagccggttctttaatggactgatgaatggctatggaaaggttcttgactggtctttaaagcataaagcagtgatctttatcggagttctggtgctgctcgtaggaagtgccctggcttcgctttcccaaggaaccgcgtttatgccaaccatggaaagcacacagatgaccattaccttagagcttccggataccacgccgttaagcgaaaccgcagaggtaacggatcgtgtagtggagatcttaagaaatatggaggatgttgaggatgtgggagccatggcaagcacctcttccatgggttcgttgatgggaggatccgcagacagttcaacgcatgagacgagcatctatctgaccacagtagaaaagcccaaattaaacaacaaagagctttccaatgcaattgaggaacagactgcacagctctgtgaagagacaggagcagaattgagtattgaaacctccatgatggatatgagtgcgctgggcggagatggtatttcgattcaggtgcgggggcgcgatctggatactcttcagcagattgccaaagaagtagctgctattgtggaggctacggaaggaacagcgaaggtttctgatggtctggaggaggcaaccggcgagatgcggatactcatcgaccgcgataaggcaatgaatcatggactcacggtagctgaagtttatcagcagattgcagcaaagctaaaggatgcatccagtgcgacaacctttgaaacaacggtgaaggaatatgaagtctatgtaaagaacgccaatgacatggaacttacccggaagctggtacaggatcttattattgaaaagacagataaagacaataagaaggtggaaattccacttaaggatattgcagcgtttgagaatactatttctccaaaatcagtaagcagaacagaacagaaccgctatattgcagtatctgcttccattgcagacggatataacgtgggtctggtatctcggaagctggaacagaaccttgcagattatgaagtgccggagggctattctcttgtgatggagggggaaaatgagatgattgtggatgccatgcagcagctgatgctgatgctgcttctggcggttattttcatgtatctgattatggttgcccagttccagtccctgaaatctccgtttatcattatgtttacgattcccctggcttttacgggcggcttcctgggactgttccttggaaactgtgaggtcagtgtcgttgcggtcatcggttttgtcatgctggcaggtattatcgtaaataacggtattgtgattgtagattatatgaaccagctgattgcacagggaatggaaaagcatgaggcgattttacaggcaggcaggacaagacttcgtccggtattgatgacggcgttaacgaccattcttggactgctgccgatggtattcggtacagatatgggagcagcgatgggcaagccgatggcgattgttacggtaggcggtctgctttacggaactctgctgaccctgcttgtggttccctgcatttatgatctgatgaactgcaggaaaaccaaaggactgcaaagcagataa

SEQ ID NO: 404 - DNA, 2283 bp, Unknown
  Unknown gut bacteria
atgggaatgcgagaaattttgaagggaacggtaatatacgaaagtggtcagaagctgaacggattaatgatgattatgagaggaacggcagtggttagttttgagggcggttcctatgaacttcatagtggagatgtgattggtctcccggatctgattcacaaggaggcaaatttccgatatgtggcgaaggagaatctggcagttgtggattatccatcaaaggtgtcggagctgaagaagttttttaaggagcatggtgaggtggtgcggtattttcaatcgtctctgttccggcagctcaatgaacttctgctccattataaggaagtgcagacggccagtgatatgatgcaggactatctgaccggcagctatgagaattatatacggatctgcgagaacaaccacatttcgccgggggaactggagcgttatgaagagctttccaatattccgcaggaggaaaagattccggactggatttccggatattacagcactatggagcagatgctttccgtgtgggataagaacaagacagatatgaattttgtagtcggatttatgtcgaaaacctgtgatgatatgaatcagatggcaggactgtacggaagaatgaaggatcatattcaggaggtttgtgagctgctgatgaatgaaagtggtctggatcttctggagctgtatctttccctttatgaaaaaattgtaaagaagaatggtttgaaggatatttctgtgatactggtaaagaaggtgctgacaggaaccttaagccagcttgaaaaacagggttatgcgcagaaggattttttcgcggcaagaaaagcagactgtgagaacaggatggcgcagattggagagctggtgaagcggcaggcagaggaagcagcccggctggatgaggatattgttggaaaacttaagaattcccttgatcagattctgcagtatgcagaatgtgaaccggatctggcagcagaattccggaagcgtgtggagacctacaagcatctggtgaataagaacagtactgaagacgatgcgcgtatgctgcgggcaggaataactaagagctttaatcagatttatattcaggctttccagaagagcgtgaaggatactgccgttccgaaggttgtgaagatgctctttaatttcggttatatggatgaggagctggcaggaatggagaatgcggttgccttgtaccgcatggcagagcagattccgactgatccgaagcgtggcgtttattcctattatgaatggctgatggcgatttaccatggacagaaggaaccgagccgtaatgaatttgacatggattatgcggattatctgcatgagcagcagcgtcttgccaggattacgaaggaagaagaggcgattttattacggacaccggaatccagagtcatgtatgaactggaaaatgtattcccaacggtggataagacaacaagcggacgtatcagtacctattgtccgatcttttccgagcataatctgttaaaaacgctggattcagcagttgtaagtgcagaccgtgtggaacagattatgaatggaatccggggcgtggattacagtgcatattacagggaaacgatttatacgaatccggatgagggaatttccaaggaatatattcatgtcgaggtactgccggactttatcctgatgccgaatatcggtaccagaggtattatgtggcaggaaattgaaggaaagagaagaacgacaccggcaagaatgatgctttccctgttccatctggaggacttgcagatgtcgatcctgcgcctcaccggacagttccgctgggagatgtgcaagagagagcagggagccagatggaatgatgtttcggagcgttcccttaccagtgagtactttgactatgcacagttttataagaagaatagtgagctctcctccgatgttaaggaaaagatcaagaacgatctggtgcgtgcgaagaataacttcaaggaaatgtttgtgaaggattactgtgtatgggtattgtatgaaagcagtggatcaccgagactgaacaaggtagtaagaagtattctgtttacctactgtacttttgcaaaggagatccgtgataaactggaaattaatcccatgtataaagagatgatcgcacgctattacgtgaagcaggggcagaagaagcaccgtatggataacctgattcagaagcagcggaattcggggaaagctgtgccggatgagatcctgcgggaacaggaatttttagaaagataa

SEQ ID NO: 405 - DNA, 2745 bp, Unknown
  Unknown gut bacteria
atgttaaatgagcagacgattgtaaaatgggacaagaacgcggaaacggatctgcgcaatggcctgacgaaagcacaggttaaagagcggcagacaatttacgggccaaaccggctcagggaaggaaagaagaagagcgtactgaagctcttctgggaacagctgaatgatcccctgatttatattctgatggcggccattgccatatcgttattccttggagaagccggggaatccatgattattgcagcggtaattatcctgaatgcagttgtcggggtaatccaggagggaaaggcaataaaggcaattgaagccttgcagcagttatcaagtcccaaggcgcttgtaaagcgggacggcagggaaatggagatcccgggcagtgagctggtaccgggggatctgattttcttagaagcaggaaggcaggttccggcggatggaagactgcttacagcgagcggattgcagatagatgaagcggcgcttacgggagaatctgtagcggtggataaggaggttctgggacagaagaaggaagagaaagtggatgaccgtggaacagggaaagcagaaacggtgagttcagaagaggaaaagcttcatgcggcagaagtactgggcgatcagaagcaccttgtgttcatgaccaccatggtaacggcaggacacggggaggcgattgtgacggaaaccggaatgcagacacagatcggaaagattgccggaatgatttcggagagccgggaagagctgacaccactccagaagcgtctggcagatctgggcaaaatcttaagccttggggcagtcggcatctgtgtattcctgttcgtggtagccgtattgcagaaacgggatatcggagaaatgctgcttacagcaatttccctggctgttgcggcggttccggagggacttgctgcaattgtgacggtggtgcttgcattaagcgtttcaagaatggtgcgtgtcggaacgatcgtgcgcaagctcccatcggtagaaaccttaggggcggtggatgtggtctgctcggacaagacagggacgctgacatgtaaccggatgacggtgaagcagtgttacgtggatggaaggctccttccggtagaagagttccggaaggaggagcatgaagagttcttaaatgcctgtgtgctttgcaacaacgcactgcttggagaagaaaatatcggagatcccacagagcttgcgttgctgatcctggcagaggaatgcggcagggaaaaggaaaatacggagaaagagtatgtacgcatttcggagtgtgcatttgactccgtgagaaagaagatgaccaccatacataaatctgtcaatggagaggttgcctatagcaaaggagctgccgaccggattttaaaggattgcaggaccgtctggaagaatggaaaggaggctgccttttctgaaaaagcaaaaaatgaagcacaaagggcgatggaacagatggcttccggcgcactgcgggttatagcacttgccatgaagaaaaagggagatctgaaggaagaaaaggatctggtattcttaggacttgccggtatgatggatccgccgagggagggcgtggcagaggcggtgcagagctttcgtaatgcacatgtgcagacggtgatgattaccggagatcatgtggataccgcactggccattgcaaaggagcttggcattgcacaaagtcatgagcagtgtatgaggggagaggagctggagttactttcacaggaagagctgattggacgtgtggaaggaatccgggtctttgcgagagtgtcccctgagcataaggtccgcatcgtacatgccctcaaagcaaagggcaaaacggtggccatgaccggagacgggatcaacgatgccccggcgctgcgctcggcagatgtcggtgtggcgatgggaaagggcggaacggatgtagctcggaatgctgcagatctgatattgacggatgataatttttccacaattgagaaggcaatccgagaggggcgtgggatttatgagaatatccgcaaaacgatcctgtttctcctgtcctcgaatttcggggaaattatcacaatgcttgcagcggttctggccggctttccggcgacgctgaaggcgagtcatattttgtgggtaaacctgattacggattccctgccggcacttgccctcggcatggatggaaacgatggcgaagagctgatgaagcagccaccgcgaaaaagcacagataccatgttttcccatggaggactgtcctgtacgctttgttttggtgtggtgatcggagtcatcagtattcttgcttttatggcagttccttatgaggaactgctgcagcggcagcttccggtgaacctttcttctatgaaaaagattctggaaatcgaatggattttaaataaagcgcagacccatgcctttacggtacttggtatgagtcagctggttcatgcggtcggtatgcgggatgtcaaccggtcggtcttccggatgaagcattttgaaaatctgtatatgctggcagctctcggaatcggactgcttttgcaggtattggttacagaggttccttatcttataacgttgtttgaaaccaaccggctgacgcttggcgagtgggggcggcttcagattctttcactgacaccgcttgccgtgcatgagctgttatgcctttttaccgcagctgggcaaaagcaagtgcgagtagaagaagtgcactga

SEQ ID NO: 406 - DNA, 2598 bp, Unknown
  Unknown gut bacteria
atggagacaagcatggaagacaatatttttgataaaattcatgatgtggatttacagaaaaccatggaaacctcttatataaattatgcaatgagcgttattgcatcacgtgcattgccggatgtaagggacggtttgaagccggtacaaagacgagtgctctattccatgattgaattaaacaacggaccggataagccgcatcgtaagagtgcccgtatcgttggtgatactatgggtaaatatcatcctcatggtgacagctctatttatggtgcgctggttaatatggcacagccatggtccttccgttatcctctggtagatggtcatggtaactttggttccgttgatggtgacggcgcggcggccatgcgttatacagaagcaagattaagtaaaatttccatgaagctgcttgccgacattgataaggatacggttgattttgtaccaaactttgatgaaacagaaaaggagccggctgttcttccaagccgttatcctaatcttctggtaaatggtacaaccggtattgcagtaggtatggcaacgaacattcctccacataacttgcgggaagtggttaatgcgattgttaaaattattgataaccggattttagaggaccgccagaccgatattgatgaagtcatttccattatcaaagcaccggattttccgacaggaggtatcattcttggcacgagaggctgtgaagaagcctatcgtaccggacgtggaaaggttcgtgtccgcgcagttacggatatggaaaccatgtcaaacggcaaaacaagaattattgtaacggaactgccttatatggtaaataaggcaaacctgattttaaaaattgcagagcttgtgaagctgaaaaaaattgatggaattactgatcttcgtgatgaatccgatcgtgagggtatgcggattgtaattgaattacgtcgtgatgtaaatgccaatatcattttaaatcagctgtttaagcatacacagatgcaggatacctttggtattattatgctggctctggtgaataatgagccgaaggtattaaatattctggatatgctgaaggaatatattaagcatcaggaagatgttgttaccagaagaacgaagtatgaactgaagaaggccgaagaacgtgaccatattttacagggattactgattgctcttgataatattgacgaagtgatccagattatccgtggaagccagacaacgcagattgcgaaagaaagcttaatggcacggttcggattaaccgaggttcaggcgcaggccattgttgacatgagactgcgtgcactgaccggtctggaaagagaaaagttagagaacgagcatcaggaattactggcaagaattgcaagattaaaagaaattcttgcagatgaaaagatattacttggtgttatccgtactgaaatccaggagatttccgataaattcggagatgacaggaagagtaagatcggttatgatgtctatgatatcagtgtggaagatatgattccaaatgaaaataccatcattgcaatgtctaatttaggatatgtgaagagaatgaccattgataatttcaaatcacagcaccgtggtggtaaaggaattaagggtatgcagaccatcgaagatgactttattgcagatcttctgatgacaacaacccatcactatattatgttctttacaaattttggacgggtttaccggttgaaaacctatgaaattccggaaagcggacgtacttcacgtggagttgccattgtgaatctgctgcagctgaatccgggtgagaaggtaagtgccattattccaattaaggattatgaagaaaataagaatctgttcatggtaaccaggaagggtattgtaaagaaaaccagtgtagttgaatacagtaatgtacgtaagaatggacttaccgcaattaatcttcgggaagatgatgaactgattgaagttaaggtaacagataaggatactgaaattattctggtaaccagatttggtatgtgtatccggttcaaggaaaccgatgtacgttctaccggaagagcatctatgggtgtgattggtatgagccttaatgaccaggatgaaatcgtaggaatgcagctggatcatcagggtgattctcttctgattgtttctgagaaaggaatgggaaaacgtaccttccttgaggagtttacggttcagaaacgtggtggcaagggagtgaagtgttacaaaatcacggataagacaggttatgtagttggtgtaaaggcagtcaatgatgaaaatgaaattatgctgattactaccggaggaattattattcagattccgatgtctgatgtgtccattcttggaagaattacatccggtgtcaagctgattaatctggataacggagtaacggtagcccagattgccaaggtacgtgaaaaggtttccaacggtgatgaggaaatcagtgatgaagagttggaaaatcttgaggatcctcaggatgatggtatgttaataccggagaaaaatgatgaggaagacgaagaagttatttttccaacagaagaaaatgaggatgatgaataa

SEQ ID NO: 407 - DNA, 3789 bp, Unknown
  Unknown gut bacteria
gtgggagtaacctttacgaaggagcagcagcaggtcatagatttaagaaaccggaatcttctggtttcggcagcagccggttctggtaaaacggcggtgcttgtcgagagaatcattcagatgattctgaataaagagcatccggtggatattgaccgcttactggtagttacctttacgaatgcggcagcggcagagatgcgcgagcgtatccggcaggcgattgaccgggagcttgcagtggatccgtttaacgggcatttacagaagcaggcagcgttattacataaggcgcagattaccacaatcgacagcttctgtcttttcgttatccgcaatcatttccatgagatcgggttagatcccggcttccgtgtggcagatgagggagaactgaagctgttgcagcaggataccttaaatgaactgcttgagcaggaatatgatgcggcagatccgaagtttctgcagtgtgtggaatattttacagggggaagcaacgaccggcttctcatgcaatatatcgaaaagctacatgacttcgcagagagctatccctggccggaagactggcttcttggctgcatggaggattataaagctgcggatgtggaggaactgaacgggacgcagtggtgcaggtatcttacctcccatgtgtgctttatgctgcaggagctggccggaaaactccggcaggcgtgcaggctgtcagagcgtccggcaggcccttatatgtatggggagcttcttgaaaaggaagcggagatgttagagcaggcatcgatgaaggagacctatcaggaacagtatgaggtcatggagaagatcaccttcgggcgtctcccttcgaaaaaggatgactctgtggatcctgcattacgtgccatggctcagcagctccgtaatgaggtgaaaaagcagatcgagaagctgaaaggcgatttcatgttacgatctcccgaacaggcgcttgcacagatgcacagagcctgtccgatggtggaggagcttatttctctggtgctcacttatgaacgtatgcttacgcagaaaaagcgcgaggccaatattatcgattttggcgatatggagcatctggcgttacagattctgcttaccagagaggacggggagattgttccgaccagggcggcaaaggagtaccgggagtgctttgacgagattctgattgatgaataccaggacagtaatctggtgcaggaatatcttctgatggcagtttccggagaacaggatggacgaaataaccgcttcatggtaggagatgtcaagcagagcatttataaattccgtctagcaagaccggagcttttcatggaaaagtaccatacctatacgaaggaagaatccggctgccagcggattgacctgcataagaatttccggagccgcagagaggttttggagggagtcaacacgctgtttcagaagattatggggcaggagcttggcgggattgtctatgatgaggatgctgccctttatgagggagcctcttatccggaaaacaccgggaatgacacggaatatctgatttttacgcaggaggaggaaagcggagagtcggtgcgcagctttgaagccagggcaattgctgccaaaatccgtacactgtatcagagctttcaggtgacggacaaggagaccggtgcgctgcggccggtacagtaccgggatatggtgattctgctccggacgaattccggctgggcgcaggagtttaaggagacgctgcaaaaggagggaattcctgcttatgtgagcctccgcaccgggtattttgaagcctcggagatccgggagcttttgcagttcctgcatgtgattgacaatccgaggcaggatattcctctgtatggaacgatgaaatcttactttggaggctttggcgaggaggagattgcaagaatccgggccggtgtgacggacaagaagatcgaagggaaggcttcagaagataaggacaaagcaggagaaaatacttcagaagagaataccgtagtgggggatgattcagcagaagcggtagtggcagccggcaaaccgatggctctgatcgatcagttaagggcttatgatggagatttaaaagagaagatcgcggactttttaaccatattggagcattaccggcagatgtccgtttacacgccgattcataagctgctggaagcattgatttatacaaccgggtattttcagtatgtgacggcaaagcccggcggtgagcagcgaagggcgaatgtggaaatgcttttgtctaaggcggtcgcctttgagcagacgagcttttatggtgtctttcattttctgcgctacatcgagcagctgtcgaagtatgaggtggattacggagaagcggatattctggatgaaaatgctgatgtcgtacggattatgagtatccacaagagtaaaggactggaattcccggtatgcttcgtggcaggcttatccaagaaattcaatatgcaggataccacaggacgtcttgtgaccgatatggatctggggatgggagtggatgagattgacagtgagcttcgcatccagcgccgtatgacgaagaaaaatgtggtttccctgaaaatgcgtctggatacgctggcagaagaaatgcgtgttctttatgttgccatgacgcgtgccagggaaaagctgattcttacagcagttgtcagggatggagaaaagcttagggaacagattgcattatatgaaaatacgaaggccgaggatggccgaatgcgttttacggatcttttgaatgccggatcgttcctgcaatttgttctgccggcattgtctgatgcacagtttatcagcgaaggagagctgaaggaacaggaaatttccggggagtgtggacagcttctgaaaagagaacagtttatgtaccggattacgagggaagaggcgtcagaagaagagcttgcacagaaggaaaagctgcggcagcgcatggaccgcaggtatgcggacgaagggttaaaggagctggtgacaaagaccagtgtttccgagttaaagaaagcacagatggatttggattttgcgggagaattgttcccggaaaaggaaatcgtgccgtatattccagcctttatgcaggaagagcagggaatgtccggggcagaccgcggaagcgcttaccaccgggtgatggagctgcttgattttgagaaggtgctggaagcaaaagcacagatacaggaacaaaatcaagaatggaagcagaatcaggaacaagatcagagtcagaaagagaagcataatgaggaaaataataaagaaatgaaccgggaagaaaaccggagtaagaaatctgagaaatcagaagcagatacttacatgattttagagttggaacggcagattgcactcatggtagagaaagagctgttgcagaagccatggagcgaagccgtttctgtgaaaaagcttgttatattttttcaatcttcactggcacagagaatggccaaggcacagcaccttcagaagcttaaaaaagagcagccctttgtacttggcatcgcagcagaccgcgtaaagccacagtttccgcatgaggagcaggtgctgattcagggaattattgatgccttttttgaagagggtgacgatcttatccttatggattataagaccgatgccgtaaagaccggggaagagctggtgaagcgttatcacacccagatggaatactatacggaagccttagaacgaatcgttggcaagaaggtaaaggaacggattatttat

SEQ ID NO: 408 - DNA, 2760 bp, Unknown
  Unknown gut bacteria
atgagtgggaatgatttaaatctgtcggagggcaatacacaggaaaaggatgatctgaccaagctgtatacgcgatatgcagcaagagaacggattttggaacggcttcttaagaatgcggatgagcagggggtgcttttgctgattgatctggatgatttctgcaggattaatcagcagtatgggcagacctatgccgattctgtgctgaagcaggttggaagccagatacatacaaactttatggtcaaggatattgttgcacggatggcatttgatatttttctggtttattgtccggagttaagtgataccggaaaggttgaaaagcttatccgaaggttgaaggatcgtctggaaaagtatatacagcttcgggatgaaagtgtgatccggttcagtgcaggtgcagcagtgttcccgaaggacggaggagatctggatactctttatgcccatgcggattctgctttgtggactgcgaagaggcatggtaaaaacagactgtacttttacgatggtgaacagatggatgctgattaccggggacagacctaccggaaggtcagtgaacaggataagcttatgataaccggagatcaatctgtcacccggatcaatcgtgaactatttgatttttgttttgatgtcctgtgccgggaaaagaatctgcagcaggctctctatctggtgtttgaggaggtctgccgttactttgggtttgaccggtgtattctgcgtgaatatgacacacttgcactgataatgcgtgttaccaataaatgggtccgggaggacgatggcgatgatgcttctgtcattgaaacctttgggatagccgacctgtcggcagaaagcaaagctcctgattattacctgatacagaacggacattccaggtataaagattataccgaagaattcagtaaattatccagaatcccgttttcctgtattgtgtttcctttgtgggagggtgatgtaatgcggtttgccatcacctatgagatctgggaaaagcgttcctttacagaagcagaaatctttactcttcgcagcattacgaaaatgctgtccagttttattctgcgtttccaggccaagacagagcttgaaaatgagtacaggatcgggcgtatggcaatggaagcacagaaaattgactattttgtatccaatctgcacacccgtgaaatatattatttaagtccgtccatgcgtgagacatataaggatcttccgaaagacatcaagtgttatgaggtgatgttccggagggatacaccgtgtgaaaactgtccgatggaagcctgtgggccggatatggaggaaaacacggttgagtattatgacattgatgaggataacagctatacgattacggcaaccagaattcatgataccggatttgaagatgattttataatctgtaaatctgatgtgacatcttacctgcagagggtgaagggaatagaccggctgaccggtgtgatgagttatgaaaagttccgtatggaggcactgagacttctgaaacgcaagaaaaagggttttgtactggttttccttggaatacaggattttgcaagaatcaatgatgagtacggatatgttaccggagatgaagtgttaaaggctcttgcacaaatgattcagcgggatctgtcagagggagatctgttttgccgggtaaagggagatgattttattattatcatgaattcatgcccggcagagacaatttcacgcagggttcattattatacaggtgaacttactatgcatttcagacgcagctatgcagggataaccatcaattgttttggtggtatttatgcgatctctccggaagaaacggatatcaaccgctcgattgataaagcaatgaaggcacggaatatggcaaaactaaatttttacgagacaagtggaatttacgtgtataccagagaatttgagactcgtgaaaatgaaaaggaagccatgaaccggattatgaaggatgcattggagaatgggggcttttgtgtctattttcagtcaaaggtggatattactaccggaaagatcagtggtgcggaagcattggtccgtctgaaggataaggatggtaagctggttccgccgggaaagtttgttccacttgccgaagagaccggtatgattgtggagattgaccagtttgtatatgaagagaccttccggctgattcacaaatggctgcaggaaggaaagaaggttccggtgatttcagtgaatctgtcccgtctgcatctgatggacgatcagcttccggaacatatggaggctctgtgtgatgtgtacgatttacgtccggagcagattgagctggagattaccgagagtgttttcttccaggatgcggatcgtctgattgatatgattaagcggttaaaggccgtgggatttgtgatttccatggatgattttggtgctggatactcgacacttaactttatgaaatccctgccggttgatattattaagattgatggcggattttttatgaaaaataagatggatgataagaacaaggcagttatctctgcaattatgcagctttccaataatctgcactttaagacggtttccgaaggcgtggagacggacgagcaggtggaatttattaaagaacagggcggaaagtatgtgcagggatattatttctttaagccgatgccgccggaagagtttgagggactgctggaggagaagaggaaaggtggtgcatgcttgtga

SEQ ID NO: 409 - DNA, 2022 bp, Unknown
  Unknown gut bacteria
atgaaacaggaacgactcgattatcttaccggaaaatatgaagcaaagctgaacccttcgaacgaggatgaaatgtccggaaagccaatgggaggaagaaaacacggcggacctggcggaccgggaggtcctggtggacgcggcatgatgggtggtaagccgaagaacaccaaagcaacgatcaagcgtcttttttcttatatcgcaaaggataaatggaagctgctgatcgtactcttatgtattatagcaggtacggcaggaaaccttgcaggctcgtatctgctgcgtccgatcattaacggactgaccgataccggtaaaacaggcactcagctccttgcaggactgattcagggggtatttatcatggcggttgtttatatcgtggcaattaccgcacagtatttacagtccagaattatggttacgatttctcaggatgcgataaagcgactgcgtaacgaattgtttgaaaagctgcagaagcttccggtgcgttattatgacactaataataacggtgatgtcatgagccgcttcaccaatgacgtggatgtcatcggtgaaatgctgaataatactgtagtgcagctgatttccggagcaatcagtattattggaaccttgagcctgatgatttatacgaatatctggctgacactgattacgattgtcatggttccactgatgttaaaggcggtatccggaatcggcaagagaagccggaagtattataaggcacagcaggcggccattggcacgatgaacggatatattgaagagacaattaccggtcagaaggtggttaaggtctttaatcatgaggaaagcgcgagagaagagtttgattatctgaatcaggatcttcgcggcaagcagatccgtgcacagttttttggtggaattatgggacctgtcatgggaaatatgggacaggtcagctattccttaacagcagccattggtggtattctgtgcgtgctgcgtgaatttgatattggcgggcttaccgtatttgtcaattattccagacagttttcccgcccgatcaatgaggttgccatgcaggttaatacgattttttcggcacttgccggtgcagagcgtgtttttgcggtgatggatgaggctcccgaggcagaggatgtagagaatgccattaccatagaagaaactgaggatggtaagcactattatgtgatcccgaaggcgaatgcttttgtgaaagagcatggaaagccggagggaacggcacatgaaaatgagctgaattattatgcagaggtaaagggggctgtaaccctgaaggatgttacctttggttatcttccggataaaacgattttgaagcatatttccctgtatgcaaagccgggtcagaaaattgccttcgtaggctctaccggtgcgggaaaaacgacgatcacgaacctgatcaatcgcttctatgacattgactccgggcagatcctgatggatggcttcccgattacgcagattgcaagggattctttaagaagaaacattgcgatggtattgcaggacacccatcttttcaccggaacggtacgtgaaaatatccgttatggaaggcttgacgcaacggatgaggaggtggagcaggcagcaaaaatggcaagtgcccattcctttatcatccgtctggagcatggatatgataccgttcttgagggtgatggtgcaaacttaagccagggacagcgtcagctcattaatattgcaagagccgccatttccaaggcaccgatcctgattctggatgaagcgacgagctctgttgatacaagaaccgagaagcatatcgaaaagggaatggaccgcctgatggcagagagaaccaccctcgtgattgcacaccgtctgtcaaccgtccgggatgccaatgccatcatggttttagagcagggcgagatcatcgaacgtggtgaccatgacgcactgcttgcacagaatggccggtatcatgagctttataccgggaagacagagttggattaa

SEQ ID NO: 410 - DNA, 1449 bp, Unknown
  Unknown gut bacteria
atgataagcagcgaggcttttatgaaaaaaacactttatctgaaatttattctggcttatatcatcttcggattttttggtttcatggttgttgctacctttgtaagcagtatgaccatggagcatctgaagcgtgaaaaagcagatgccttgtataaggaagcaacactgattgccaacacctacgcttccgacctttacaacaatgaaaccactctggaaagtgtgaaaaaccagctggatgcgctggatacctatctttcagctaccctgtggatcattaacccgtccggacgtctggtgctctgttccaatgaacccatcaacgtggaaaatgaaattgtcatcgacaattttgacccgaccattacggaaggctcctactacaccgttgggaatttctttgatacctttacagaggaacagttgagtgtctttgctccgatcacctccgatttcaaggtacgtggatatgtagtcatccattatccgatgagtaacctcaccacatcctgtaacagtctgctgaacatttcctatattatgctcgtcattctgtttttactgtcattgattatcctgatcttttttactgagctggtttatcttcctttacgcaaaatcacgcaggcaaccgagcagtatgcatccggcaacatgcactatgaatttcagatcgacagtgaagatgaaatcggataccttggtgcaaccatttcttacatggcaggtgaaattgcacgttccgaagacgatcagaagaagttcgtggcaaatgtttcccacgacttccgctcacccttaacctccatcaagggttatctggaagcaatgctcgatggcacaattcctccggagctttacgaaaaatatctgaacattgtattgaacgaaaccgaacggctccgtaagctgacaaacagtctgctgaccttaaataacctgaatacgaagggaatgctcctggatatcagccgctttaacatcaacgccgtcatccgtaacacggctgcctcctttgaaggcacctgcaggcagaagatgattgccattgaactcatcctcaccggtgacgagctttatgtcaaagccgatgtcgggaagatccagcaggtattgtacaaccttctcgacaatgccatcaaattcagccacgaggattccattatcaggattgaaaccacggaaaagcacaataaggtatttgtctctgtaaaggacagtggaatcggtattccgaaggacgaactgaagcagatctgggaacgcttttacaaatctgatctgtcccgtggcagggacaagaagggaaccggcttaggactttccattacccgggaaatcatccgttcccatggtgaaaacattaacgtcatcagtacagaaggcgttggctctgaatttattttttcacttccggttgccgcagacgaagaggatgaatactaa

SEQ ID NO: 411 - DNA, 2013 bp, Unknown
  Unknown gut bacteria
atgagaagtaatgtaccagaaattttcggaagtatggtattcaacgatgccataatgagagataaacttcctaaagacatttacaaatccttaaaaaagaccatcgaggatggcaaagatttagatattactgtagccaatgtggttgccattgccatgaaggactgggcaatcgaaaaaggagctacacattatacacactggttccagccgatgaccgggatcaccgctgaaaagcatgacagcttcatttctccacagaatgacggacgcatcatcatggagttctccggtaaagagctgatcaagggcgaaccggatgcatccagctttccttccggcggcttacgtgccacctttgaagcaagaggctataccgcatgggatcctacctcttacgctttcgtaaaggacggagtgctttgtattcctaccgcattctgctcctacggcggtgaagcactggataagaagacacctcttctccgctccatggaagcccttggcgaacaggccgtccgtgtattacgtctcttcggtaacaccgatgcaaagcgtgtcatcacaacggttggtcccgagcaggaatacttccttgtagataaggacttatacgagcagaggaaagaccttgtttactgcggacgtaccttatttggtgcgatggcaccgaagggtcaggaaatggaggatcactactttggagcgatcaagccaagaatttccgctttcatgaaggaattaaacgaagaattatggaagctgggtattttagcgaaaaccgaacataacgaagtatcgcctgcacagcatgagctggcaccgatcttctctactaccaatattgcaaccgaccacaaccagatcaccatggaaatcatgaagaatgtagcaaagagacataatctggtctgtctgcttcatgaaaagccgttcaagggtgtgaacggaagtggtaagcataacaactggtctttgacaaccgacaccggtgtcaacctgttagagcccggtaaatctccttatgaaaatgcacagttcctcttattcttatccgcagtcatcaaagcggtggatgaatatcaggatctgatgagagtttccgttgcatctgctgaaaatgatcatcgtctgggtgctaacgaagcacctccggctatcatttccatgttccttggagatgatctggaagctatcctggaagccatcgaaagcggtaagccatataacggaagcggtattgaaaagatggaaatcggtgttcatgtacttccttccttcccgaaggatacgacagaccgtaaccgtacttcaccgtttgcctttaccggtaacaagttcgagttccggagccttggttcttcccagtcgatctccggaccgaacatcattctcaataccattgttgcagaggaattaaagcagtttgcggatgagctcgagggtgcggaggacttcaccgaaaagctcaacgaactcattaaaaagaccattaaggaacataagagaattatctttaacggtgacggatattcggatgagtggaaagcagaggccaaaaagagaggtcttctgaacttaaagactaccgtagatgcccttcctgccttccttgcaccgaagaatgtagagctcttcaccaagcataaaatctttaccgaaaaggaaatggaatccagatatgaaatcttactggaaacctacagcaaggttatcaacattgaaggtcttactatggttgacatggcaaagaaacagattctgcctgctgtaaattcctatatcggaaacctcgcttccactgcaaagaagaagctgtcggttaccgaaggtttatcctgcaggatggaaaaagatctgcttgaaaagctttccgtactggaagattctgcttatgacaaagcaaataaactggctgctctccttgaagaaggcggaaagctttccgatggccttgctcaggcaaccttctataaggatcagatccttcctgctatggaagcattaagaagc

SEQ ID NO: 412 - DNA, 1542 bp, Unknown
  Unknown gut bacteria
atggaaaccaaaaccgcagcagtttcaatgcgaaatgttacgaagacctttggatccgtaattgcaaatgataaggtgaatctggatatttataagggtgaaattttatcgctgcttggagaaaatggtagtggtaaaaccacattgatgaatatgctttccggaatttattttccggatgaaggccagatctttatcaatggaaaggaagaggtaatcaggtcacccaaggatgcctttgatctgggtattggtatggtgcaccagcatttcaaactgattgatgtgctatcggcaacggaaaacattattctcggactccccggtaaactgaatttaaaagaagccactaaaagagtggaagaaatttgtcagaaatatggctttgaggtagatccgaagcagaagatttacgatatgtcggtttcgcagaagcagaccgtggaaattgttaaggtattgtatcgtggtgcagacatcctgattctggatgagcctacggcagttttaactccgcaggaaacggaaaagctgttccgtgttcttcggaagatgcgtgatgatggaaaagcgattgtcatcattacccataagatgcatgaagtagaatcgctttcagaccgtgtggctgttcttcgaagcggacagtatatcggctgtatgaaaacaaaggatacgaatgtaacggaaatgacgaacatgatggttggtcatacggtaacgttaaatatagacaggcctgatccggtgaatcctaaaccccgtattgaggtggaaggcctgacagtccgtaatgaagagggcgttgtgaagctgcaggatgtttcctttactgcgaacagtggagaaattcttggtattgccggaatttcaggctgtggacagaaggagcttttagaagcgattgccggacttcaggttacggaagccggaaccattgcttatgtagaggatgatggttccagggaaatgctgatcgggatggatccgaagaagattgcagagctgggagtttccctttctttcgttccggaggatcgtcttggaatgggactggtaggaaatatggatctggcggataatatgatgcttcgttccttccggcagggacattctccgtttacagaccggaagcagcccaggcagctggcgaatgatgttgttgagagtcttgaggtggtaactccggggatttcaacaccggtacggcggttatccggaggtaatgtacaaaaggtgctggttggacgtgaaattgcatctgcccctaccgtattattaacggcatatgcagtgcgcggacttgatattaattcttcctatacgatttatgatctgttaaaccagcagaagaagaaaggtgttgccgtaatcttcgtcggggaggatctggatgtgctgctggaattatctgatagaattctggtgctttgcggcggacaggtcagtggcattgtggatgccagaacaacagataaaaatacggtcggaatgatgatgactaaagtgggaggtgaaaagaaccatgaaggagaagaataa

SEQ ID NO: 413 - DNA, 4182 bp, Unknown
  Unknown gut bacteria
atgtttgacacgaagaaagatcttccacagcctgctttgtaccggtcttcatttgaacatgataactgcggtatcggtgcaattgtagatatgaaaggaagaaaaacgcacaaaacagtatccgatgcgttgagcatcgtagaaaacctggagcaccgtgcaggtaaggatgcggagggtaaaacaggtgacggtgtcggtatcttattgcagatcagccacaagttctttgtaaaggcctgcagggaagccggaattgtacttccgaaggaacgggagtacggtgtgggaatgttcttcttcccgcaggatgaattaaagagaaaccaaagcaagaagatgtttgaaatcatcgtagaaaaggaaggacttgaattcctgggatggcgtgtggttccgaccgtaccggatgtactcggacaaagagcaatcgactgtatgccatatattatgcagggattcgtcaggaaaccggcagagacagaaaagggcattgattttgaccggaagctgtatatcataagaagaatttttgaacaaagtacagagaatacctatgtagtaacgctttcctcccgaacgattgcttataaaggaatgttcctggtaaaacagcttcgtaccttttatccggatctgcagagcgaggattactgttccgcaatcgcgctggtacattcacgattctctaccaacacgaatccgagctgggaaagggctcatccgaaccggttcatcgtgcacaatggtgagatcaataccatccgcggtaatgcggacaagatgctcgcaagagaagaaacgatggaatctgagtacttaaagggagaattatataaggtacttcctgtgattaattcttccggttccgattccgcaatgctggataacacgctggaatttctggtcatgagtggtatgccgctcccgctggccgtgatgattaccattccggagccgtgggtcaataaccgtaccatgtcccagaaaaagaaagatttctataattattatgcaacgatgatggagccgtgggatggtccggcgtccattctgttcagcgatggcgatattatgggagcggtgcttgaccgtaacggacttcggccttcccgttattatattaccgatgatcatcagctcatcctttcctccgaggtcggtgtgcttccggttgctccggagcatatcttaagaaaggatcgtctccgtcccggtaagatgctgcttgtcgataccataaagggtgagatgattgatgatgatgccttaaaggagcagtacgcttccagacagccttacggagaatggcttgacagcaatctggtagagttgaagaatctgcatattccgaacgaaaaggttccggaatatacctatgaagagcgtcagcgtctgcagaaggcgtttggttatacctacgaggattaccgcaacagtattttacagatggcaagaaacggacaggaagccattgcagccatgggtattgatactccgcttgccgtactttccaaacaccatcagccactgttccattattttaagcagctgtttgcccaggtaaccaatccaccgattgacgccatccgtgaggaaattgttacctccaccacggtattcattggtgaggatggtaacctgttagaggaaaaggcaggcaattgtaaggtattacgtgtcaataacccgattttgaccaataccgaccttcttaagattaaaaatatgaaggaggacggcttccatgtggaagtggttccgatcatttactataagagcatgagcctggaaaaagcaatcgaccatctgtttatcgaggtggaccgtgcgtacaaagagggtgccaatatcctgatcctgtcagaccgtggcgtggatgaaaaccacatggcaatcccttccctgcttgcggtttccgcattgcagcaataccttgttgcaacgaagaagagaacgagcgttgccatgatcttagagtccggcgagccaagagaggtacatcactttgcaacgctgttaggctacggtgcgtgtgcaatcaacccgtatctggcactcgataccgtaaaggaactgatcgaaaacaacatgctcaacaaggattactatgcagccgtggatgattataattccgctgtgttacatggtatcgtaaagattgcttccaagatgggtatttccaccatccagtcctatgagggctccaagaactttgaagcaatcggtattgattcctccgtgattgacaagtatttcacgaatacggtctgtcgtgtgggaggccttaccctgaaggatattcagaagcaggtggaagagctgcataccgaagccttcgatccgttaggacttgaaaatgacctgactctggacagcccgggcagacataagatgcgttccggggcagaagaacatctgtacaatccgcagacgattcatcttcttcaggaatccacgaagcgaggggattattccttatttaaacagtacacctcccttgtcaatgaagaggacaaggtacggaacttacgtggactgcttgatttcaattatgcagcagagccggttccgatcgacgaagtcgaggatgtggattctatcgtaacccggtttaaaaccggtgcgatgtcctatggttccatttccaaggaagcacatgagacactggcaattgccatgaatacccttcatggaaaatccaattccggtgaaggcggtgagagcattgaccgtctgacaattggcaaggatggattaaataagtgttctgcaattaaacaggtggcatccggacgattcggagtaaccagtgagtatctggtaagtgcgaaggaaatccagatcaagatggcacagggagcaaagcccggtgaaggtggacatcttccgggtaaaaaggtttatccgtggattgcacagaccagacattccactccgggagtaagcctgatttccccgccgcctcatcacgatatctattcgattgaggacctggcacaattgatttatgacttaaagaatgcgaataagaatgccggaatttcggttaaactggtatcagaagcaggtgttggtacggtcgcagcaggtgttgccaaggccggtgcccaggtcatcctgatttccggttatgacggtggtacgggtgctgctccgaagacctccattcacaatgccggtcttccgtgggagcttggtcttgccgaaacccaccagaccttaattatgaacggccttcgtaacaaggtccggatcgagacagacggaaaattgatgagcggccgtgatgttgccatcgcagccatccttggtgcggaagaattcggttttgcaaccgctccgcttgtaaccatgggatgtgtcatgatgcgtgtctgcaacctggatacctgcccggttggtattgcaacccagaatccggagcttcgtaagcgttttgccggaaagccggaatatgttattaactttatgagatttattgcgcaggagctgcgtgaatatatgagtaagctcggtgtccgcagtgtggatgagcttgtgggacgttccgatctccttaagaaaaaggagcatctggagggactggcagagcatatcgatgtttccaacatccttgacaatccttatgtctcagaccatgcaggagcagtctttgataagaagcagatttattcctttgaccttgataagacgctggatgagaaggtgctgcttaagaagctcggacctgcacttaaggaaggaaagaagaaatccatcgaggttcaggtcagcaacgtcaaccgtacctttggtactctgtttggtgcggaaatcaccagacagtataagaacagccttgctgaagacagctatgtaataaaatgtcagggcgcaggcggtcagagctttggtgcctttatcccgaagggactgacgcttacactttgcggtgacagcaacgattatcttggcaaggggctttccggtggtaaaattattgtttatcctccgaaggatgcacactttgcagcagatgaaaatatcattgtcggaaatgtggcgctctatggtgcaaccagtggtaaggcgttcatcaacggtgtggcaggagagaggttctgtgtccgtaactccggcgcacgcgctgttgtagaaggtgtcggcgatcatggatgcgaatacatgaccggcggacgt

SEQ ID NO: 414 - DNA, 1914 bp, Unknown
  Unknown gut bacteria
atggcagaaaagaaaaagaagccaacagtcttcatttcccaggatgaccagtatctgtttgcacaggggactcattatgatatttatgagaagctgggggcacatccttcctgtgaaaacggagaagagggaatgttctttgcggtttgggctccaaacgcaaagcaggtctatgtgatcggggaatttaacgactggaatgagagtgcaactccaatgacgaagctgggaccgggaggaattcattctgtatttgttaaaggagtcggaacgggggtattgtacaagtatctgattattacgcaggaaggggagaagctgtataaggcagatccatttgcaaacagtgcagaattacgtccgggaacagcatcaagaacaacggatctgacaaagttccgctggacagataccacgtggatgaaggaacgtgatctgaaggattataataaagagccaatggcaatttatgagtgtcatattggttcctggatgcgtcatccacgtccggacgagcagggattctacaattatcgtgagtttgcagaccgcattgtggaatacctgacagaaatgaaatatactcatattgaattgatgggaattgctgagcatccgtttgatggatcctggggttatcaggtgaccggatactatgcaccgacctcccgttacggaacgccggatgatttcatgtatctcatcaatcagctgcataagcatcacatcggtgtaattctggattgggttccggctcactttgcaaccgatgcccatggacttggacggtttgatggagaatgtatttttgaacatccggatccgcgtcttggagaacatccggattggggaaccaagatttttaattacggaaagacggaagtaaagaacttcctgattgccaatgtattattctggatccgtaagttccatgttgatggaatccgtgttgatgcggttgcatccatgctttatctcgattacggaaagaaagagggacagtgggttcccaacaaatatggtgataacaagaatctggaagctattgaattctttaagcatctgaattctgttgtccgtggaacgtatcccggattccttacaattgcggaggaatctaccgcctggcccagggtgaccggtaagatagaagacggtggacttgatttttcctttaagtggaacatgggatggatgcatgatttctgcgaatatatgaagctggatccgtatttccgtaaggataaccactatgccatgacgtttgccatgacctataatgacagtgagaattatattcttcccctgtcacatgatgaggtcgttcatctgaagtgctccatggtcaataagatgcccggatataagacggacaaatatgcgaatctccgtgcgggctatgcatatatgcttggtcattccggtaaaaagcttctgttcatgggacaggactttggacaggaaagagagtggagtgaagcaagagagcttgactggttccttcttcaggaggatctgaacaggggacttcatgattatgtgaagaatttactggagctttataacaaatatccgtgcctgtatgagattgataacagctggaacggatttgaatggctgaattgtgatgataaggacagaagtacatacagctttttccgtaaggcatccaatggtaagaataaccttatgtttatcattaatatgactccgatgaaatgggagaattacaaggtcggtgttccgaagaaaaagaaatataagcttttgttaaacagtgatgatgtccggtttggaggacagggtatggaagtacctgcggaaattacttcagtaaaggaaagctgtgattaccgtaattacagcctgaccctggatcttcctccgtacagtgcgctgatctttgtgttttag

SEQ ID NO: 415 - DNA, 1713 bp, Unknown
  Unknown gut bacteria
atggaatccgaaaagaatacgatgaagacaaaattggaaaatatgcacctgaaggaaagaataagctacggatatagaaaagtgatcattatgatgctggtttccggacttctttccatcgtagttataggggtattgtttgccaatatgatgaattatgtgtatcgtgttaatgcagcagaccaggcagtaaaaatctgcagaatggatgtcaatgcagcagcaagaaacattcgggaaatggcattgaacgaggatgtctctacctatgagagctatgaacagacagtagaaaacctgcttgcagaggttggctcccagctggagattatgaaacagaccggagttgttccggatgaactgtatacggaatattcttctgctcttaacgattggggaaacattggaaattccattatgaaggaaattaaagcaggaaaccgggacgaggcaattgaggatattctgaatgaatgtactcctgcattaaataagagtgttgaaactgtaaaaaaactggatgaattaacggatgaactggacagacgtggtgttgcgagtaccatcatctgtgcgatagtcgggctggccggtattgttatctgtctggtttttgcctggatattgacaaaggaaacaagtaaaagagtacttgaaaccattcttgagccgttacgtgcgattgaagatgttgcaaaggaattaacagaaggaaacctgcatagtaacctggaatatcattccgatgatgaaatcggaagactggcacacaacatacgtaagtccacacgtattctgggaacctatatcgatgatatagaccgtgccatgaagctcttctccgaaggaaactttgatgtccagcctgaggtagagtggagaggtgacttcatcggtattctgaattcctttatggcatttgagaaaagcatggctgataccgtgaagggaatccagcatgtatccgaacaggtttcaagcggtgcagagcaggtagctgcaagctccaatgatcttgcggagggagcaaccaatcaggcttctgttgtagaagagctgacagcaaccgttacaggtgtttcggagcagatcgagcataattcgaatgcagcaaaggaaatcagcggaagagtcgaggatctgggtggtgccattctggaaagcaatggaaaaatgcgtgagatggtggattccatgaatgaaatcaatcaggcatcacaggagattgacaagattattgcaacgattaatgaaattgctactcagaccaatttacttgcattgaatgcatccattgaagcagccagagccggagaagccggaagaggatttgctgtagtagcaaatcaggtgaatgttctggcagatcagagtgcacaggctgcaaaggaatctgcagcattgattgaaagctctgtaagtgctgtggaaaagggcatggtggttgcaaaggaaactgcagcacagcttgaagaggtagcggatacttccaaaattattacacgagaggtaaccggtattgcagagacgctggagacgcagaccgctgaaatgaaacagattaatatcggaattgaacagattaacgatgtggtacagacaaattccgcaacatcgcaggaatgtgcagctgccagtgagcagatgaacaacgaggcaaatggtctgagagaaatgatccgtaagtttaaggttgcaaaattcgaggcttag

SEQ ID NO: 416 - DNA, 2130 bp, Unknown
  Unknown gut bacteria
atggcacatattgagaaatggattaacatcgaagaaaatggaatttatctcgttttcggcgtgaccgaagagaatcagttgaagttccttcatttttcttccaaaccgtttgaagggcttaacgagagcgaattatttatgaaggagggcttccagcttgtccaggtgaacttttccggctataaccggccttatgagaagcacggaaacaagcatatcgtaaccgcacccggttatctgcttacctttgtggagctgaaggacgagcgtaatgagactggccgtaagcttacctttatccagaaggatgagatgaccggagccaaagtgattacctattggcagttttatcagggaacctctgtgatccgcatgtacaatgaagtaattaacgaaggctctgaggagcagacgttagagtatctttcctccttctattatcttggaattgaaaaggaaggaaagctaagctctgacgataagatgagccttacctatgcctgtcacggatggcagaaggaaatgaatttccggacgaataccttcccggagcttggattcggacagacccagccgaccgtatgccagagaacctctgttacatttgagttgaccaataccggaaactggtctacgaagaaatacctgccgatgggatatcttgaaaattccgaagctgatacttctcttttctggcagattgagcataatggctcctggcatgcagaaatcagtgatgtcaacaatcatttttatgtggcactgagcggtccgaccgaagtacagtctcactggttcaagcagttaaagcccggtgaaagctttacctctgttccggttgcagtcggtgtatcggaaggatgctttgatacggccatgggcgagcttaccaagtaccgccgtatgatccgccgtccgaataaggataatgagaatcttccggttatctttaacgattatatgaactgtctgttcggtgatccgacaaccgaaaaggagcttccgctgattgatgcggcagcagctatgggttgtgaatattatgtcattgacgcgggctggtatgcgcccggcgaatggtgggacagtgttggtgaatggcagcagtgctatgagcgttttccgaacggcatcgaggaagtaaccaattatattcgtgaaaagggcatggttcccggtgtatggttagagcttgaggttatgggaattaactgcgagaaggcaaagagcgttccagatgactggttctttatccgccatgggaaaagagtctacgaccgcagcagatatcagcttgacttccgtaatccggcagtcattgatcatgtcaatgaggtcgttgaccgtgtggtgaatcagtatggtgtcggttatatcaagatggattataatattgaacccggaattggtacagagctttatgcagacagtgtcggacaggggatgctggagcatgaaagagcatacctgaagtggcttgacggtgtatttgagaagtatccggagctggtgatcgaaaactgttccagcggtggtctgcgtaccgattatgcaatgcttgcaagatacagtatccagtctacctcggatcaggaggactaccgcaactatgcaaccatcgcagcaaatgccggagcggcacttactccggagcaggcagcaatctggtcctatccgcttaaggatggcgacgaggaagagacgatttacaatatggtcaatgcactcctgcttcgtatccaccagagcggtcatctggcacagctttccaaagagcgtcatgctttggtaaaggagggcatagaatattataaatccattcgtcaggatattaaaaaagcacttcccgtatggccgaatggcttcgcaacgagtctggatcactttttatgtgccggatggaaggtagaaggaaagagctatctggcggtatggagaagatatggagagacctctgagtatgatataccgcttgaaaagcttaccgagggaaaaccggtaaaggaagtaaggcttgcttatccgaaggaaagcttaaaggaacatgtgtcctatgaagtatctgaagatcagcagcttcatgtaagcttcaaagaaccggtaatggcaagaatttttgaaatccgttaa

SEQ ID NO: 417 - DNA, 3498 bp, Unknown
  Unknown gut bacteria
atgaagaataatgatttggaagctcgtattgggattccggatggctttaaggtaaaagggggagatggcagagccatttcttcctggaatgaagtgaaaaatgcagacggttatattctgtcttattacagagccggtgaaccggagctgtgcattaaaaccaggtattcacaaaaaccggagaaaaccattctgggttttcgaaacggggtggaatatcttgcggatgtgtgtgcatatcaattttgtgacggtgtggaaatcagaggggataaatcggataaaattccgtttgtacctgtttcaatgaagttaaaggctcaaaatgtcatttgcttatctgaaaatgaatcgaaaaaaatagaagcagaatataaaaatacgattccttacgttagctttcaatcgctggatgagaatgttgccgttgtagatgaatatggaatggtgaccgccagaaaaaagggcatgacggaagtcatcagccaaatggagaatggagaatgtacaaaaacccggatcgtgtgcgaccgcgacctgtcgagaacacggaaatcagatgccatgatcatgctgatgggagatctgatgtgtgcggtaaatcatcagcgtatagtccaaaataaggaatttgattttacaggttcgtttgacgatatcagcacgattattcaaaagggagatttggcaattggtgtactggaaaccatgtgtgatgaccattctccgtatgaatgcgaagaactgagaacttcatccggaagtcctaattgtaattcaccttcaacctttatcggagctgtaaaggatgcgggctttgatgcattggttacagcaaataaccataactgcgatacgggggctggaggattgaaaaatacagtttcgttgatcagaagtaatggtatgcaaaacataggaacacttaatgataatccggtttatttttccgttaaggggataaaaattgccgtgattgctttgtgtatgattaataatggacacgaagctaaaatgaatttgtggatggaggagcttggccggtacaaaacagaattatttaaacagtatgttgatgaggcaagaaaaaatcacgcggaattcattattgcatatcagcattggggaaagatgaattcctctgagataaaacccgctcaaagaaaaacggcggaagaaatggcagaagcaggagctgatctgattgttgcatcgcatcctcatttgatgcagaattatgaaatacttaccacctccgatgaaagaatggtgccatgcgcttattcattgggaaattttctcacatcaatgaatgaattcagtgaaaacagactcagtgcggttatgtgctgtaaactgcataagagtccgaagggtaaagtgtcgtctgcaatatcgtttattccgacaataagcagagacgatgcttcctgtggtataaagataggaattgccggtggaaaagaaagggaaagaattgcggagctcctgtcagagaatgcccggatgataccctcagtgccggagccggacgtgatgctgcagggctctgttgtgttgaaaaaaatattttcttatttgccggagtgccggataaatcaggatgcgtgtattatttcccagttatccatactgaacggtaaaaaacaggagttgaaggaacggtgtgcagagcgggtaaggatagatatagaaaaagaccttgaacagtgcctttcaaaaaaccgggcagaatatatgatagttgatttttatgctgctgcagcaatttctctttataaaatggatgataattattacacggcctccgatgcttttgttttatctgatttttacaaaacaaataaagacaaatttgagaaacagacacctccgtttagtgaaagcttctggaaagaacagattaggaaatatgccggacttttactgaaatattatcctaaagaaaagattgtattagttcgactgagcttttctgagacactggtagtaaagggagagatgagaaacggtaaaaaccggagcgccttaaataatcgtatcagggagctggagagctattttatttctattgtgaatccggtcgttattgatatagcagggcattatttcggagatgcacagtccacttctccatctgcatttgaggaacatttttatctggatactgcccataagctgagagatatttttgaaagtaagagtcatcaattttattattctgaagagaatcaggaattcagaatggatagaatattaaagtattatgataatttgatggcacgcggttatcaaaacagaatgcttaatcaggagcaattggcagataggatcatcatgtattcgtctaaggaatttatccggtcacattaccatggaataatggagttgatgaaataccatgtggcagaccttgaagaagccgtactttatctggaagaaaatgaattaaataacgaactgctgagtgcagccaaagcaattcagatgatcgtagagaaggatctttccgggtcttatgaatgttatcggatattattcatatggaaaatgcagattctgaaggagatggcattacagttctcggaaatggtcggattcaatgtctgtgaggacgagtgtgaaattttctttctgataaaaaataatgggaaagctctggagcaatatttatccgctaaccacaaaataaaggtggatatctggggaagctgtatttccagggagataatgaatcgaaataagcaggatatagtggtgaataaatatatcttcaagcagccgcatttacttgcctttgaagctccggttccatatgagattccgaaggataacagtttatttgagaacaattcctggcgaagaaggaccattgaagaagcattccggcattcgggaatagatgtcctgaaagcatcatcagctgactggatcgtgatagatttttatgatttgatctgtaatgccgtaatgttcaggggacaattgtgggaaatagatgattttgttcaaagaaccggattttataagcaggtatcaggagaatgcagccggaatacatatttctttgaaaactatgatatggaatatgccggtgaacaaatgacaaggcttgcccggtttttgctcggaaaatatggagaaaacataattcttataaagacagatctgaaggatacctatattgatctggatgacaggctgcaaaagttaaacagcggaagcgaagatctggaaaagagaaagcaggcaattttgcaatatgaaaagatgtttgaggatttgacgaaatgctatgtgatcgatatttcaaagcattattttgcgtcggataaatttccgcttggtggtgctcatattgtccattatgaggatgagttttataatcagtcatgctccatattaatgcagattttttcgggatccgggcgtaaatactatgatgaggcggatgacaggtacctgtttatgagagaccagaggctgaatcgcagttag

SEQ ID NO: 418 - DNA, 1740 bp, Unknown
  Unknown gut bacteria
atgaaactgaaaaaattaacagctttattacttggcgttaccatgacagtaaccatgctggctggctgcggtggcgctacaacaacagatgacagtagtacatcatctacaacagagactacaaccgagtcttctgacacagcaggagattccacaacagaagaggcgaaaacttcttattcagaagacgaaatttcagatttcaccatgttcattaccatgccgggttctgaaattaatgatgataatgaaattgcccagatgattggcgagaagtggggcgttcgtattaaagagacatggttaacaggacagactgcatcagaagcaaccggtatgttaattgcaagtgatgaatatccggattatattgacagcgatgacatgtcactcctggtagatgcaggagcactcatcccgttggatgactatattgatcagtatccggaatttaaagaaaaatggttcacagaagatgaatgggaaaagttccgtcagcctgatggacatatctactggatcaatcctttcggaaatacgaagggtgaacctactgcaacaacacataatgacgaagcattctggattcaggtaagagttcttgagtgggccggatatccggaaatcaagaccatggatcagtatttccaggtaatcgaagattacatggcagcaaatccgaccatggaagatggaacaccgaatatcccttataccattctctgtgaagactggagatacttctgccttgaaaatgcaggacagttcctcggtggatatccgaatgatggatctgttattgttaataaggatacgatgacagttgaggattacaatacttctgacgatactgttaagtacttcaagaagctgaacgaagaatatcagaagggctttgtagatcctgaaagctttacccagacctatgatgaatatattgccaagctttccacaggtcgtgtacttggtatggtagaccagtggtgggatttcgcatacactgtgaatgatgtattcaaacagcagggacttgatgcaaagggctgtaactatgttcctcttggattaaccacagaagagggaatggaaaacagatggcatacatacgatgatacggttaaccaggcttccggtgttgctattaccaaggattgtaaggatccggataaggcattcaaatttatcgttgattgtgcaatggatcaggaactgcatgatttaagattctggggtgttaaggatgtagattataccgttgatgaaaatggtttatatgcaagaacagaggagcagagaatgaacttgtcagataccgcatatcaggcatctcatcgttgccagtattcttatatgcctcagtggggtggtaccagtgatgatggaattaatgcaaacaagccggaagaacagcctgcagaattccaggtagatatggcacagccgttaaaggactgctttgcagcatatggtgcaggaaactatgtagatatgattggttctgtagttgagacaaatggaccgtggttccccatgtacagttattctaataacttcaccacagagactcctggcggtgtggcatggacaaagatgggtgaaattaagcatgagtacttacccaaggttgtaatggccagtgatttcgaaaccggatgggctgagtatatggatgcatataatgcttgcaaacctgaagatttcattagtgagatgcaggcaattctggatacctttaagtag

SEQ ID NO: 419 - DNA, 1752 bp, Unknown
  Unknown gut bacteria
atggacttgtttgatgtactaacgttaattggtggattgtgcctgttcctttttggcatgaatgtcatgggggaggcactggaaagcagagcgggaaataagcttcgcaccttgctttcaaaaatgacgaccggaaaattcgccggattccttacaggacttggagtgacagcaattatccagagctcttcggcaacaacggttatggtagtcgggtttgtaaattccgggctgatgaatttaagacaggcgattcatgtcatcatgggagccaacatcggaacgacggtaacgggatggttgttgtcgcttggtggaatcagtggtgataatttctgggtgcgtctcatgaagccatcctcctttgttccggtactcgcattggtgggaattattctatatatgtttacagggtcttcaaagaagaaggataccggagcaatttttctgggatttgctacattgatgttcggaatggaagccatgtccggggcagtatccggactttcagaggtgccggccttccgtgagctgtttatcatgttcacgaatccgattctgggacttctggcaggaacagtacttacctgtatcattcagtcgagctctgcctctgtcgggattttgcaggcattaagtatgaccggacagattacctttggagcagctataccgatcgttatgggtgatgcgatcggaacctgtattactgcaatgctttcaagtatcggaacgaagcgggatgcgaagcgggcagcagtagcacacctgaccttaaatatggggggcgcactggtatggcttatcatatactgtgtaatcagatccgtctttgcaccgccgattctgacagcggtggcaacaccactgggaattgcaattgtgaacacattatttaaggtgcttaacattatattatttatgccgctgactggcctgttggagaaggtggtttgcattcttgtaccgggaacagccaaagcagaaaaggatactgaactggatgaacgtcttcttgctacaccgacacttgccctgcagcagtgtcataccattgcggttgacatggcgagggatgcggtaacttctttaaaggaagcattacaaagctttgagcattacacaccgcagctggaggaaagcatccggaacaaggaagaccttaccgatcattatgaagatattctgggctcttatcttatcaaactgagctcgcagaagatcagcagtgaagatggagaagaggttactatgctgatgaaaataatcggtgatttcgagcggatttcggatcatgcggtgaatgttctggaagcttccacagaaatgcgtgagaaggagctgagcttctctgacagtgccaagggagatttcaaggtgatttcagctgctgtggaagagattctggatctgtcctatgaggcttttgcaaataataatattaacagtgcagtcaatgtggagcccttagagcaggttattgatgcattgaaggaggagatgcgtacccgtcacattttgcgtatgcaacagggaaattgcaatgtgatcgcaggcttcgtatggtccgatcttctgacctgccttgaaagaacatccgatcactgctccaatattgcaggctgtgtgatcgatgttgcccatcatgagcttcatctgcatgaaaccttgcaggcaattcacgaggacagcaaagagtttcagaataaatttgagatgtatagcgagaaatatgctgtacatgaattataa

SEQ ID NO: 420 - DNA, 1533 bp, Unknown
  Unknown gut bacteria
atggcactgctggcagtttttgtcagtatttttttcatgccgtcttttgtgaaatttgtaaaaaccggagataatatgtttacggtttttttgaatggacaggaagtcggcgtggtcgattcggtcgaagatgcacagagctatgcggtggaagcgcgaagaaatgtggcttcccggaacaatcatctggttctggtggagagcgaaatcgaaaccgttgggcaggaagtgctatggggcagagtagattctccgaagcttgtgatcaataacatggagaaggtctattcctccgacatgaaggaatccatgattaagtcctatgtggttaaaatcaatgaaaaaatcatcaatcttgccaatctggatgaggttgttgcacttttgcaggcagcagtaaataaatatgatgaggacaaagagtatcaggtggaactgcagcttgatccgacaagagagcttccggttatgagtgcatctgttgcaacacgcgaggagatgcaggagcaggaagaggcggcggaggctgtagcactggaagccgggttccaggcagatatgacggcattgtttgaccagattgagccggatgtggagaaggactttgaggattaccagcttggtataatctccatgagtttcggggatgatatagaggtagctgaggcgtatctggatgagggtgaactgacggatatcagtcttgccatcaatgaagtgacaagtgacgaagagaaaaatgagatttataaggtggtttccggtgataccctgtcaggaattgccattaagacgaatgttccgctggacaagctgattgaaatgaatgagtccttagaggatgaaaattcaatgatccgtccggatcaggagttgattgtaacggtcgaagaaccgatgctggctgtcctgcgtcaggaagaaatgtattatgaagaagattatgacgcggatgtcatttatattgataatgatgactggtatacaacagaaactgtggtgcatcagcagccgtccgccggacaccgcaaggtagttgcggttgtagcctttgaaaataataaaaaggtttcggaggagattatcaaggaggagattacttatgtggcagttccgaaggttgtggaacgcgggactaaaattcctccgacctatatcaagccgatttccggaggacgtctgacgtcaaactttggacgacgcaatcgtccgaccagaggcgcaagctcctatcataaaggagttgactgggcaacaccgacaggaaccgcagtttatgcttcctgtggtggtaccgttgcaagagccggctggggaagcggctacggatattgtgtatatatcaatcatccggatggcagacagacccggtacggacacttaagcaaggtgctcgtttctgcgggacagacggtttcccagggacagaagattgctttgagcggaaatacgggtgtcagtacaggaccccatctgcactttgagatcctgattaacggatcccaggtgaacccgctgaaatacctgaattag

SEQ ID NO: 421 - DNA, 3492 bp, Unknown
  Unknown gut bacteria
atggcatttacgcatctgcacgtccatactgaatacagcctattagatggatccaataaaattaaagaatatgtgaagcgtgtcaaggagcttggcatggacagtgcagccatcacggatcatggagtcatgtatggcgtgattgatttttataaggcatgcaaggcagagggcattaatccgattcttgggtgtgaggtctatgttgcaccgaattcccggtttgataaagagctgaccggtggggaggaccgttattaccatctggtgctgcttgcggagaataacaagggctatgagaacctgatgaagattgtgagccgcggatttacggaaggatattattacaagccgcgtgtcgatctggagctgctgcaggagtaccacgagggaatcattgcattgtcagcctgccttgcaggggaagtgcagcgttatatccagaaggggcttgtggatgaagcaaagaaggcagcactgaaatatcaggactgcttcggaaagggtaattatttcctggagctgcaggatcacggactgccggagcagaaattagtcaataccacacttttacagatgagcagggaactggatattccgatggtcgtaacgaatgacgtgcactatacctatgcggatgacgtgaagccgcatgatatcctcctttgtctgcagaccggaaagaaattatcggatgaagaccgcatgcgttatgagggcggtcagtattatgtgaagagtgaagaagagatgaagggactgtttccctatgcgtgggaggcagttgaaaatacccagcggattgcggaccggtgccatgtggagattgagtttggagtgacgaagctgccgaaattcgatgtgccggaggggtataattcctggacttacctgaataaattgtgttacgacggtctgaaggagaggtatggggatgaaaatgcacctgccggagagaccggacagacgttgaaggaacgccttgattatgagctgaatgtcattcagacaatgggatatgtggattactttctgattgtctgggactttatcaattatgctaagcagaacggcatcatggtaggacccggacgaggatcggcggcaggaagtattgtttcctattgccttaagattaccaatattgacccgatccgttataatctgctgtttgagcgttttttaaatccggaacgtgtatccatgccggatattgatattgacttctgcttcgaacggcggcaggaggttatcgattatgtagggcgtaagtacgggcaggaaaaggtggtacagatcgttacctttggtacgctggctgccaagggggttatccgtgatgtgggccgtgtgatggaccttccgtatgcctatgtggattcccttgcgaagatgatcccgaatgaattaaatatcacgattgataaagcacttcagatgaatccggacatgcgcaagctctacgaaaccgatgagcaggtgaaggagctgatcgacatgagccgtcgtcttgaggggcttccgagacatacctccatgcatgcggcgggtgtagtcatctgttcccgtccggcggaggatcttgtgccgctgtcaaggggcgccgatggttccattacaacccagtttacgatgacgacgatcgaagagctcggacttctgaagatggacttcctgggactacgaacccttacagtgctgcgtgatgccgtgaagcttgtgaagcagagtaccggaaaagagattaatctcgatcagattgattttgatgataaaaaggttctggcatccatcggaaccggcaaaacagacggtgtgttccagctggaaagtgcaggaatgaagaacttcatgaaggaactgaagccacagaaccttgaagatattattgccgggatttccctgtaccgcccggggccgatggactttatcccgaagtatattaagggaaagagtaattttggaacagttacctatctgtgtccgcagctggagccgattctggcacccacctacggctgtattgtttatcaggagcaggtaatgcagatcgtacgtgatctgggtggctatacccttgggcgaagcgatctcgtgcgccgtgccatgagtaagaaaaagcaggccgtgatggaaaaggagagggcgaatttcgtctatggaaatccggaggagggcgtgcccggatgtgtggcaaacggcatcccggagaatgtcgcctcgaagatttatgatgaaatgatggattttgcgaaatatgcgttcaataagtcccatgcggcatgctatgcggtggtttcctaccagaccgcatacctgaaatattattatccggtagaatttatggcagccctgatgacttccgtgattgataatccgggaaaagtggcagaatatattatggtctgccggagtatgggtattacgatcctgccgcctgacatcaatcagggagaaagcggcttttccgtaaacggcaacagtatccgttatgcactgactgccatcaaaagtgttggacgtcctgtgattgatgcggtggtgaacgaacggaaggaacgtggcgcctacacgaatctgcaggatttcatcacccgtatggcagataaagatatcaacaaaaaggcgattgaaaactttatcaaggcaggcgcgcttgacagccttggcggaacacggaagcagtttatgagtgcctatgtgcagatcatggatcacatcgtacatgaccggaagaataatatggcagggcagataagtctgtttgatattgtggacgaatcggagaaatccagctatgatgtccggcttccggatgtcggggagtattccaaagatatgattcttgcttttgagaaggaagtgcttggaatctatgtcagcggccatccgttagaggagtttgaggatctgtggagaagaggcatcacgaatacgactgcggattttgtgctggaagaggaatccggtgaaacgagagtgagggacaatgcgtcctgtacgatcggtggaatcatttctaataagaagattaaatatacaaaaaatgataaaatcatggcgtttctgcagattgaggatctggtcggaacggtagaggttatcgttttcccgagagattatgagaagaacagcatgaagcttttggaggataataaggtctttattaagggacatgtttccctggaggaggatcgcgatggcaaggtgatctgtgagggaattactgcttttgacgagatcccgaagaagctgtggattaaattccctactatggaggcttatcaggcttcttccaatgaactgctgcagaccctgcagacctcagacgggcatgacagcgtggtgatttatattgaagaagcaaaggcaatgaaaaagcttcctccaagctgcagtgtgcaggccggtgaagagctgaaggcgcagctttgtgcaaagtatggggaagacaatattaaaattgcatgggatatccgcaaagaagtataa

SEQ ID NO: 422 - DNA, 3114 bp, Unknown
  Unknown gut bacteria
atgtatgccttttggcagagaaatatagaggtgactaccttggataaatatgaatacaaagtacgtgcagatgagattaaatccttaatttcagaaggcgaatacgaggaagcagttaaaatcgcagattccattgactggcgcagggtaaaaagcgtgatgatgctctgtaccatcagtgatttatataaaattaaccggagatatgaagacagcaggaatattcttcttctggcctatgagaagcagaagggccggctgatcgtatattctctctgtgagttatctattaagcttggagaatatgttcaggcgattgaatactacaaggaatttgtccagcttgcaccgaaggacagcggcagatatattctgcagtataagctgtatgaagcacaggatgtaagtctggaggagaggattgaggttcttgaagaattaaagcgccatgattaccgtgaaaaatgggcctacgagctggcttatctttaccacagggtaggtcttgaaagtaaatgcattgaagagtgcgatgagatgattctgtggtttggggaaggcagatatgttcttaaggcatatgagcttaagatgctgcatacacctttaacaccggagcagcaacagaagtacgaggaattgaagagccataatggaatgcgtgcttcagactttgccgtagatcaggcagctgtgcgtgaggaggcaaagtatgaaaccgaggacgagggcgatgatgaatacagtcgtcagatgaatcagctgacagacgatacgaagcagattccgaagacggaacagacttcttcagaggaagaagatctggatattcaggtgaaaccggttgatgtcagccagtacaatacgattaatttacagaaggagctcgcagagagtatgcgggagcttctggagaataaaaccggagacatgccggcaggtgaagtgaatgatctcatgatgacacagatgtatgcaccggtagatcatacagagggtgcggatgaatccgcacagaccgatgcggctgcggataacgaaatgatccggataccggatatgcagccggttgaaccgcagatggaacagacggtaaccgcagaaggatctgtagcagaggtacaggaagcagaagtacaggaagcccctgtacaggagacagcacagacagaagcaacagagcagcccgtagaagaagcgcaggaaaaggcacagccggttctgcgtcaggataccgatgagatgaagctgatcacggatgaagacctcaaacaggcagatgaggaagtgttttttggcaatacttccgaagtgaacgtgcaggatgtggtttccgagcttgccgagaaaaatgcggaccgtaccgctttccgtccggtggaggaagaacaggaagaagtcacaccgggagttacgcctgcttcaatggatgcgatgtccaatacgggtgtgatccgcacctttaataaaaaatccgggtacgatgatatgctttcccaggaatatgacggacagatcagtctggtggtgccggaatccgaacaggtagagaagcagattaccggacagctcagcatcgaggatgtgatggcggaatgggagcggatgaagaaggagaatgaggaaagacgtctcaaggaaatccgtgaacgcgtgcgtaagcagacggacaacctgtttgccgattttgatgagtctacgaaatccggacttctggaagagctggaaaatgccatggtaactgcggccatgaaggaagaaaagcttcgtgccgataaggaaaagccgaaggttgtcaaggtttccgatattgagaagcagcgggaagaaaaggaagctcatccacagcagaaggaagaggtgaaaccgcagcctgtggaggaaccggaagaaatcatcgaagaatctgtggatgaagtgatggaagagctgccggggacagaaccggttatgggagaagtacaggattctgttccggacgaactggttgaggatgccgagatcatcgatgaggaagaggaagctgcggaggaatccggggaagaaatggtcgaagaggccgcagaggaagtaacggaagaagctgccggggtagaaacgacagaggagaatccggaggaagaagcagcagaagaaccggaagagccgaagaagatgcctctccgcagaaagaagaaaaaggtacagcagaattttgatgaaacacagaatattgtgttagagtttgaagatataccggaaatgacggaaaaagttccggcacaggcagcacaggctaagaagctcagggcaccaagagagattaagaaggaggacgagccggtacaaacgaccggggaagtgatctcctctacagaaaaggggcgcgaactgacagagcaggaaagaaaagagtttgctccgtttatccatcatcgccggacacgccgtcagattgcggaggtcatcgataacatcagccttgcttcctacactggcaatgttgttgtcaccggtgaagagggaacggaatctactgcttttgcaaagctcctgattaaggatgtgcagtccaatgacagtaatttctccggtaaggttgcgaagatctccggatcagttctgaacaagaaggatattgcagagacgttaaataagctggcaaacggtgcactgatcgtggaggatgccgcagcacttaagaagccttctgtggatgttctgtttcgtgagatgaatcaggaggaaaaggggctgattctggttctggaggatactaagaaccggatggacgcattccttgccaggaataaggacttacaggaagtatttaatttaagagtggatctggaagcactggatgaccagacgcttgtgaaatacgcaagaaaatatgctttagagcaggaatactcgattgatgatcttggaattctggcgctgcatacgagaattgccgatctgcagaccggtgatcatgaggtaacgctttccgagattgaagagcttgtggatgaagcaatttattatgcggataagaagacgccaaagcatttctttgatgttctatttggaaatcgatatgatgatgaggatatgatcattttaagagaaaaagatttcatgcattactag

SEQ ID NO: 423 - DNA, 2244 bp, Unknown
  Unknown gut bacteria
atgcaggaacaggaattacttgacttattaaaggatatgtctttggacgagaagattaatcagatggtacagttgaatgctgatttttatgatatagaggaaaatggggacagcatcacaggaccaatgctggaaatgggattaactaaagatcaggtctggcaggcaggttccgtacttggaaccgtgggagcagccaagattaagaagtttcagaaggtttatatggagcatcaaccgcatcacattccgcttttgtttatggcagatgtgattaacgggtatcggaccatatttccgatgccactggcacagggatgtacctttgatccggaactggtaaggaagatggcatctgtttctgcaagggaaaccgcacgtgccggacttcatctgaccttttccccgatgtccgatctggcacgagatgccagatggggacgggttctggaatccacgggagaggatccttatctgaactgctgtatgaccagtgccatggtaaagggttatcagggagaggatgttttgaaggaagatcatgtggctgcctgtgtgaagcattttgctgcatacggggctccgttgggaggacgtgactacaatcaggtagagctttccgaaagaaccttgcgggaggattatcttccggcttacaaggcgggggtagacgccggtgcccagatgattatgacctcttttaatacgttaggacgtgttccttctacagcaaacaaagctctgatgcgtggaatcctgcgtgacgaatggggctttgacggtgtggtgatttccgactgggctgccatctgggaacttttaaagcatggaatcgcagaggaggaagatgaggcggctgcgcttgctgtgaaagccggtgtcgatattgatatgatgacggagatctatgcgaaccacctgaagaagctggtagaagagggaaaggtggaagagaagctgatcgatgaggcagcgtaccggattctccggcttaagaatcgtcttggactttttgaaaatccctataagaatgcagatgaagtgtatgatgaagctttagaaattgaagaggagcatcgggcactggcaagagttgctgctgccgagagttttgtactgctcaaaaacgatggaattcttcctcttgtgaaaaaggcagatgcagcagaaaattcacagcataccggaattgcccttattggtccttatgtaaaagaaaagcagatctgcggatcctggtcattattctggaagcagtcggatctggttacggtggaagagggaatccggaataaagaactggataaaaacatggcttatgcaaagggctgtgagattctggattatcagcagaaaatctgtggttttggcgtagaatttgaaaattcaaaatcgaaagaagagctggaagcaatgatgcaggaagcggtagagacggcaaagaaggcagaaactgtcattctgttccttggtgagcattatcaggcaagcggtgaaagtgcttcccagaccgaaatccagttaccggcccatcagttggaattactggaccgggtttatgaggtaaatccgcagatcgtggttgtaacctttagcggacgtcctttagacctgcgccatgtagtggaaaaggccaaggcagttttacatgtctggttcccgggaaccgaaggcggaaacgccattgctgatgtgttattcggagatcaggagccggggggaagacttgccatgtgcttcccttataccgtaggacaggttccggtatattacagtgagttacacaccggacgccgccgcccggagggagaaattacaccgagaggcgtatccggctacctggatgcacctaatcacccgttatatgcctttggatatggactgacttatacaagctttgcttattccgaggtttcattgagcagtgaaatcatgaccagggaagagaaccttactgctaagatcatggtgcagaataccggaaaccgtgcaggaactgaggttgttcagctttatatccgggatgtggcaggcagtgtagcaagacctgtgcgggaattaaaaggctttcagagaattgctatgcagcccggagaaagcagggaggtaacctttgaaatcacagaagagatgcttaggttttataatattgatatggaatatgtggcagaacctggcagattcgaagtttatatcgggggaagcagtgatgctgaacagaaagccgaattccggcttgtatag

SEQ ID NO: 424 - DNA, 2403 bp, Unknown
  Unknown gut bacteria
atggcagtagatggaacggcagtgccggatgccattattaaggctgtgcagcaggcaggatatggagcaagtaaaaagggcacaaatgcaggagaaggaaatcagatggatggtgcacagaatgatgcggatgcactggcagatcacgagacgccggttttgcttaagagactgattgcctctgtggtatttcttctggtactgatgtacttttcgatgggacatatgatgtttggctggccgctgccaccctggtttgacggaaatcatgtggctatgggactggtacagcttttgctgacagtcattatcatggtgattaaccagaaattctttatcagtggatttaaggggctgattcaccggtcacccaacatggatacactggtggcgttaggttcttccgcatccttcctgtggagtgtgtatgcactgtttatgatgacaaaggcgcagaccgttggggacatggatgcggtgatgcggtacatggatgagttttattttgaatctgcagcgatgattctgaccttgattaccgttggtaagacactggaagccagatccaagggaagaacgaccgatgccttaaagagtctgatgaagctagctccgcagaatgcaacaattgtgcgtggaggacaagaggttacagttccgatcggacaggtgcatcagggagatattttcgtggtccggccgggtgaaaatattccggtggatggtgtgattttagaaggaagcagtgccgtcaacgaggcggctcttaccggagaaagcattccggtggataaaacggttggcgatgacgtgtccgcagctacgataaaccagtcgggatttatccgttgtgaggcaaccagagttggtgtagatacgacgctttcccagattattaaaatggtaagtgatgcagcagcaaccaaggctccgattgccaagattgcagataaagtatccggtgtgtttgtaccggtagtcatttccatcgcggtggttacctttatcgtatggctcttaattggaaaggaattcagctttgcgctggcaagaggaatttccgtactggtgatcagctgtccgtgtgcacttggacttgcaacgccggtagcaattatggtcggaaacggcgtgggagcgaagaacggtatcttatttaagactgctgcaattcttgaaaatgcaggaaagatagaaattgttgcactggacaagacaggaacgatcaccgaaggggaaccgaaggttaccgatgtaattccggcaggaaatatcacggaagatgaactgctttccctggcagtttctctggaagcaaagagtgaacatccgcttgcaaaggctattatccggcggggagaagagctttctgtgaaaccggaagaggttacggaatttgaagcacttcccggaaacggacttcatgcagtaagcaatggaaaattacttcttggaggaagcctcaggttcctcagtgaacagaccggtgtttcaaaagaacttcgtacgcaggcgcaagagcttgcagagcagggaaaaacaccgctattgtttgcacaggacgggagaatgctcgggatcattgctgttgcggataccatgaaggaagacagcccgaaagccattcaggaattacgaaagcttggaatccgtgtcattatgctgactggggataatgagcgtactgcaaatgcgatcggaagaaaagcaggcgtggatgaagtggttgcaggtgtccttccggatggaaaagaaggtgtgatccgcgaactgaaggagcagggcgtgaccgccatggtcggtgatggaatcaatgatgcacccgcacttacccgtgcagatgtggggattgctattggagcaggggctgatgttgcgattgacgcggccgatgtggtactgatgaagagccatctgtccgatgtaccggcggcaattcgtctcagccgggcaaccctgcggaatattcatgagaacctgttctgggcatttatttacaacattattggaattcccctggcagcaggctgcttcgttgctttcggactcaccttaaatccaatgtttggagcagcagcaatgagcctttccagcttctgtgtggtatcgaatgcactgcggttaaacctgtgcagggtgcatgacggttcccatgaccggccgtttcataagaaaatgactccaaaagttaaaacaatcaaaacagtcagaattaaaggcatgatgtgtgagcattgtgaaaatcatgtaaaaactgctttggaggcactgccgggagttttggaagcagttgtcagccataaggaaggaactgcaattctgacaacggcaggtcccttaaatgaaaagcaggttaaaaaagcggtagaagaggccgggtacaaagtgttgtccattaagtaa

SEQ ID NO: 425 - DNA, 1833 bp, Unknown
  Unknown gut bacteria
atgcttcagcatcttgagaagaaaaatgtcactatgcttcccggtttattccgtgaaagaatgcttgtaaaccgtaactatcttctggaactgggtacacaggaattattacagaactactatctggaggcaggaatcgttatgccggatcttcagattctcgaaagaccggaaactgcaaagcttcactggggatgggaggctcctacctgtcagctccgcggccatttcttaggtcactggctttccgcagcttcttcattaattgcatccgaaaatgatgccgctttaaaggcaaagcttgacgaaatcatcagcgagcttgccagatgtcaggaattaaacggcggagaatggatcggacctttcccggagaagtactttacccgtctggaaaaggagctcgatatatggtctccccagtatgtcatgcataaattaatcatgggacttacccatgcttatctctacgccggtaatgaacaggctcttaccattgtccgtcatctggctgactggtatatccgttggaccgaaaaggtacagtccaccaacccgcacgctgtctacagcggtgaggaatccggtatgctggaaatgtgggcacagctttttgaaaccacgaaggatccggtttatgaaacactggcttcccgttacagcaatccgagccttttccataatctgtcagagggaaaggatgctttaaccaactgccacaccaactccagcatcccgtgggcacatggtgctgccagaatgtatgaagtaaccggagatgagaagtataagaccatcgtagagcttttttggaaatgtgccgttaccgaccgcggttatttctgcaccggaagtgccaactccggagaattctgggtaccgcctttcctttccggccagtacttaaacgaccgcgaccaggaattctgtaccgtatataatatggtgcgtctggcttcctatctgtatcgctggaccggtgacaggcagtatggcgactacattgaacgcgccctttacaacggcttccttgcacagcagaatgcacagaccggcatgccgacctacttcctgcctttgagcgcaggcggtcataagaaatggggcaccaaacgccacgacttctggtgctgccatggaaccatggtgcaggcacagaccctgtatccggacctcatttactatgaggatcctgaacagaacgagcttctgataagccagtacattccttccattgcaaaatgggattgccatggacagctcattgaggtttcccaggataccaatatgaagtattacaacgatcaggcattcttcgatgagaaggatcagggacagagctccagatggcagttacagttcaaggtaaaggcttccgcccctaccgtattcactctctgcttacgtgtgcccgcatgggttaagggtgcaccggttgtcagtgtaaacggcgaagcgctcaccaatcctgtgatagaaaatggctgcctgaaaatccagaaaacatggaaagatgacaccattgatttattccttgcgcctgctctttcctatgtgtcattaccggatcaaccggagaaatccgcaatcatggaaggacctgttgttcttgccggtatgtgcgaaaaggatcacggactttataccaatggtgaaactccggaggatgcgctttacgcacagtccgagcatatgtacaatgtcttcccctggaagcagagtacttatctcacaaaaaagcagccggaaaactttaccttccgaccgctctatgaaatcgatgaggaaacctataccgtatacttctctttaaagaagccctcggatctgtaa

SEQ ID NO: 426 - DNA, 1809 bp, Unknown
  Unknown gut bacteria
ttgagaactcctgatgaaaagcagttaaaggcaatcaaccacgattccggaccggcacttgtactggctggtccgggaagtggtaagacctttacgattgtcagtcacattcaatatctgattcgcaataagaagattccaccggaagaaattcttgttgtgaccttttccaaagcggctgccatagagatgcagacgcggtatctggaatctgcggattccaatccttccacaaatcctgtccggtttggaacatttcacagtcttggttatcagattttaagatccacaggtcaattccgaaatttttcattgattacagataagcagaagtatcatttcctggaggttattctgaaaaacgaagggctttcctctttatgtacccatgatcaggaagcaattcttttaaatgcccttgcagcaagaaaagcaggaggtatagagaagagatcattggaattactggatgtggagacgcctggatttgatgcagaaaagctgtttgccctgtatcagagtgatctggaagaacggagactgttggattatgatgatctgattttgaagtgcaatgaactttttcagaaatcaccggcggttttggaacggtatcagcagctttttacccatattctggtggatgaatttcaggacatcaatgcttcccagtatgaattgattacgatgctggcgcttccacagagggagctgttcgtggtcggggatgatgaccagtccatctatggattccgtgggtcgagaccggaatttatgaggggatttcttcagcagtacacagatgtgaagcgttatgaacttaccgcgaactaccgcagtggggaacggattgttgcacttggccggaaaattatcgaacagaataaagaacgtttcccaaaagaatttctcccaaagaaaaaaggcggtgaagtctcttttcagcatctgaataccaggcgggaagaggaagagcttctggtgcaggatatccggaggaattcgatggaatgtctggatcagacggcgattattgtaagaacaaatctggaggccagacagtatgaggcacttttgaaaggaaaacaatttccggttgccggaagtgtaaagaaggaacagggggtctttcaatcggaaatagcagaggatctgtatgcgttcttaaggtttctgtatgagggaggacaccggaaggatttcatgcgcattatggataagctggaaccggatcttacgagaaaggcgcttgtctcagaaattgtaagtgaagaggagcttatgcgttattacagaaataacgttgagatgcggggacagatccggaagctgttttcaaagcttgcacttgccggacggctgcagacgcatctggctatccggttgtttcggaatgagatcggatatgattcttatctgaagaagaaaagcagaagctatgtggaatacgaagataagaagaaaatggcacagaccattcaggaagtgtttgcgtcctaccaaaggacaaagccgttagatgaatttatccagcaatgtcaggaaaaggaaaataaaagcccgatagcagagcagagaaagggaatccatgtaatgaccatgcatgcttcaaagggtctggaatttcagcatgtatatctgccggatctgaatgaagggattattccaccgaagggtgttgttgatgcaaagcagattgaggaagaacgaaggctcctgtacgttgccgtaacaagagcccgtgaaaaattgttcttatatgaaaccagggagcgcaaccgtaaggtgacgcggtttcttgttttatag

SEQ ID NO: 427 - DNA, 2793 bp, Unknown
  Unknown gut bacteria
atgatcgttatgattgctgttgcttctgtaatgattcatcgtgtgtttgaactccagattgtgcatggagaggactatattgattcttttcagatgaaaattaaaaaggagcgtacaatagcaggaagccgcgggtgtatatatgacaagaacggaaacctgcttgcctataatgaactggcacattctgtaaccatcgaggatgtgtatgaaagtggtaagatgaaaaattataatctgaataccacgattcatacactggttcaaatgattgaaaagaatggagatcatattgtcagtgacttcaaaatcacgctggataaaaacaatcattatgcatttaccgtagagggaacaaccctgaaacgttttctcgcagatgtctatggaaaacggaatattgaagatcttgaagaaaaacagagtacagcaaccgcacaggaggttgtagattatctgtgtggctgggaacgcttccggatcggagagtataccagagatactactaaggatgagttcattccgggagccggatatgataagagtgaggtcttaaagatactgacgattcgttatgatatgaacagtaattcttatcagaaatatattgcaacgacagttgcaacagatgtgagtgaggaaaccgttgctgttgtcatggaaaataatgacattctggaaggggtttccattgtggaagataccatccgcaaatacgtggacagtgtctattttgcacatattatcggatatacaggaaaggtttctactgatgagctggaggaattacaggcaaaaaatccggattacgatatgaatgatacggtaggaaagcttggaattgaaaaatccatggaaacccagcttcagggaattaaggggaatgaaactatttttgtaaacagtgtcggaaaggttacagaaacgacggattatcatgaaccgattgccggcaatgacgtatatctgaccattgataaggatctgcagattgcggcatacaaaattctggaagaagagcttgccagtattttgtataccaatattatcaatgcgaaagactttgatgcatccaaagtaacaagcagtaaaattaaaattccgatttatgatgtttactttgccctgcttgataataacgtgattgatatcagtcatttcacagatccgaacgccggagaaacagagaagcttgtgaaggaacggtttgaggaacgtaaggcagaaacctttgagcagctgcggacggagctgattgatacgaagactccttatgagaaactttccttagagtatcaggtatacgaaagctatatagccgagcttttatataataacgggattcttatgcgggatgtggttgatacttcggatgaaacctatattgcatggacgctggatgagatcatcagtctgaatgaataccttaattattgtatttcccaaaactggattgatgtatcgaagctgaatttgagcaagcagtattccgagtcggaagagatttatttaaagattgttgattatattttcgagcagcttgacaatgatctggcctatacgaagaaggtttataagtacatgttaaagggtgatatcatcaatggcacgcagatctgtaagctgttactcgagcaggatattattgatattgatgaagaagaagagcagcgctttttgaatggcagtataacagcctatgcatttatgatgaaccggatacagaatctggatattactccggcgcagcttgcccttgatcctcattcggcttccatggtgatcacggatgtcaataccggggatgtacttgctcttgtgtcctatccgggatatgacaataacaagatggcaaacggtgtagatgcagaatattttaacagtctgttaaatgatcagtcaacgccaatgattaattatgcaacaaggcaaatgaccgcaccgggatccacatttaagatggtatcggcaaccgccggacttatggaaggaattataacaccacggtctaccctgttctgtaatgggctgtttgataagattacgcctccggcaagctgtctgggacgccatggttccctaaatgtgacggaagccattaatcattcctgcaacatgttcttctacgaggttggttacgaacttggtacagaaggagagagctattccagcgaactgggacttgagaaaatccggaattatgcagatctgtatggtcttacggaaacaaccggaattgaaatcgaagagtccgcacctaccgtatctacagaagatgcggtccggtcagcaatcggacagggtaccaacaacttttctaccgtcggacttgcccggtatgtaacaaccattgccaacaacggaacctgctacaatctgacgctcgttgataagattaccgaccgcagcggcattgtgcttaccgataaccacgcatcggtccgcaataccatcaatatggattcctcttactgggatgccatccagcagggtatgcgtaaggtgattgaaagtaaaagctattataacgatcttggcgtaaaggtggccggcaagaccggtactgccgaagaaaacaagaatcgtggtaatcatgcattgtttgtctgttatgcaccgtatgaacagccggagatcgccgtggcaaccagaattgcctatggttatacgtctacttacgcagcaagaatgacgaaagaagttttaaaatactattttgatctggcagaagaagacgaggttattacaggaacggcctcacagattaccggagtgattgaagcgaatgattag

SEQ ID NO: 428 - DNA, 2022 bp, Unknown
  Unknown gut bacteria
atgattgaaagcaaaaaagtacagaaaatgttatatggtggagattacaatccggagcagtggccggaggagatctgggaagaggatatgaggctttttcataaggcgcatattgatgtcgtgaccttaaatgtattcagctgggcagcattgcagccggatgagagcacctacgatttcagcaagctggataagattatgaagcttgtaaaagagaatggcttaaaggtctgtatggcaacctctactgcagcgcatccggcatggatggcaagaaaatatccggatgtactccgggtagagcacaatggaatgaagaggaagttcggcgcacgtcataattcctgtccgaacagcccgaattaccgtaagtattccgcagcgcttgtggaaaagatcgcagagcgttataaggattacgataatatcgtagcctggcatattaacaatgaatttggcggctggtgctattgtgaaaactgtgaaaaagccttccgtgtatggctgcagaagaagtatggtacccttgatgaactgaaccgtgtatggaatacggcattctggagccacacgatgtatgactgggacgatgtggtagcctgtaacatgctttccgaggagttcctgtgggatggacagatccgtacgaacttccagggaatttcccttgattacaatcgtttcaattccgacagcatgctggaatgctttaatatcgaaaaggatgttttaaagagaatcacaccggatattccggttaccacgaacctcatgggtgcttataagcatctggattatcagaagtgggcgaaggatatggactttgtttcctgggataactatccggcatatgacgccgtaccgggagatgcagccatgaaccacgatctgatgcgtggacttaagcagggcaagccctttgcactgatggaacagacaccgggagtcagcaactggcacatatactgcaagttaaaacggccaggcgtaatgagattatggagctatgaagcggttgcgcatggcgcagatactgtaatgttcttccagatgagaagaagcatgggtgcctgcgaaaagtatcacagcggcgtgatcgagcatgtgggaacggatgataccagagtattccgtgagattaccgcacttggtgcagagcttgataagctgcagggtgtaacgcttggtgcaagagcaaagtctgatgttgcgattgtctttgactgggataactggtgggcagcagaattaagtgcaggtccgagtaagctgattaattatacgaaggaagtaagcttctattacagggcattcttccagcagaatatttccgtggattttgtcagtgtggaggatgatctttcttcctataagctggtggtggcaccgatgctttatatgtgcaaggatggattcgatgagaaggtacgcgaatatgtacagcagggcggcagcttccttacgacctatttcagcggttatgtagaggatcacgatctggttactctcggaggctatccgggcagactgaaggatattcttggcatctgggtggaggaatccgatgcacttcctccggaagagaataactcctttgtttatgaaggaaagcagtatccggcaggtcttctctgcgatctgatgcatcttcgcggtgcaaaggagatcgcctcttatgaaagtgacttctacgcaggcatgccggtgctcaccgagaatgagtttggtaatggtaaagcttattatgtaggcgcacgttcgaatgaagagttttataagaaatatcttggtgatatctgcgaaagccttggtatcaggccggttgcaaagacaccggagggaattgaggcaactgcccgttacaatgacaatggagaattcctgttcctgttaaataatacacaggaggaaaaggaagttgtgatggaagaagccggaaccgatctgctgacggatcaggtttatgcaaagggtgatacgcttactcttgaaaaatatggcgtagccattgtgaagagataa

SEQ ID NO: 429 - DNA, 1953 bp, Unknown
  Unknown gut bacteria
atgaagctgaagttctcccgtaagttacggattcttaccttttctctgattgccaccctcgccgctattttctgcctttacctgtatgaaacaaaggatacaaggcagtttgagcagctttcccaggatcttctctatacagaattgagcggtaacaccataagtctgcactacaccctcgcctatccggaaaactatggattatcggctgatccgatcctgccatcctcctttacggatgttgataccagagcccaggtcacggagtggcagcgccgtctttcctgtatcgatccccaaaagttagacccacaggaccggtatgcctatctgttattcgaccggtttcttgcacttaccttagaaggctcggactttacttattacaccgatccgctgtctccctcctccggcatggtttctggacttccggtgctgctcgccgactatactttccgcactaagaaggatgtagaggattatcttggcattctcgaacagaccggagcttattttgatgcactcatccgttatgaacaggaaaaatcctccgccggactcttcatgtcggacacctctgcggacaatgtcatcgaacagtgtgattccattatggatcctgttcttcttaaagatggcagccattttctgcagcagacgtttaccgagcgcctcgacggtcttgcatcggacgaaatcatcaccggagaagaaaagcagcagtacatcgacaaaaacaacctgctgcttactacggtaatggctcctgcctatgaaagggttggcgatgcctttcttgttttaaagggaaccggaacaaacccctatggtctttgctattatccggagggaaaagaatactacacgtatctgctcgcccagacaaccgggagcagtcggagcattccggaaatccgaaggctccttgaaaaggattatcagaaaaacttccatgcactgcgcgatctcataaagaaccatcccggactgcttaagctgtcaccggaggatttttccttaagcctgaatatgcaaaacagctactccgatcatccggaggaaccgggggataccgatctcccaacaaagcctgcagcaacatcagatatcttatgccggctgtcagaagcaattctcgatgatcttcaaaaacagatgaaaccggatttcccgaagcttacctgtatacccgaagccaaagcaggacaggaacatgacggcgaaagtaattctgtctcctgtcagataaaaaaggtctcctcatccatggaggcctacagcagtccggcgtattacctcactcctcccatcgatgacctgtggcgcaacaccatatatctgaatgagccgaacattaccgatgatctcaccctgtataccaccctcgcccatgaagggtatcccggccatctataccagaccgtttacagccagagcttcttaaatcagcaaaacgcttcctgtatccgctccatgctgcattatggcggatttgtggaaggctgggcggtttatgtggaaaacttatcctatggctatgccgcacagttgacaaagaatgaagaagctgcggcttacattgaggcctgccggccgaaccgcaacctgcatctgtgcctgtattcctacatggatattgccattcattatgatggagccaccccggaacagatcggacggtttcttgaaaatctggggcttggccaacatacaaatgtagagacaatctatgaatatctcgtagaggaaccctgcaattatctgaagtattatctcggatatctggaatttctctccctgaaacaaaaggcagaggaactgtggggaacagattatagcgattaccggtttcataagtttgtactggaaacgggaccgtcggatttccgctcgctaggggaactggtaacagctcacccttatcatggtcaaaactttggaaatcagagttga

SEQ ID NO: 430 - DNA, 3483 bp, Unknown
  Unknown gut bacteria
ttgattgaattgaagttagagcccggagaaaagtacgaaggaagctttaccattttcggaaagcccaatgtcatgacagaaggaacggtttcaacgacggagctgcgcatgaagtgtctggtggaatcctttaccggtacagaagaagagatcccttatgtgtttgatgcggcaggaatgattaaaggggactctttgaagggtgaattccgtgtgatttccaatcagggggaatatctgattccgtatcatgtggaaattgacagtgagaatctgaattccagccttggaagcattaagaatctgtttcattttgcaaaccttgcgaaatcaagctgggaggaggctgcaaacctgtttttctcaaaggatttcgaacaggttttacaggggtcggataagcagtatctgaatacctaccggggacttgtgaaggacggcaggaaggaacagtatctcgaagaattcttattacaaatcaaaaagaaacagcagattgaatatattattgaaaatcaggagatccgtatggaaaatccggagggaattaccgaagggcgtgtggtgatccagcgtaacggctgggggtattcccagcttttcgtggaagcggaaggaaggtttctccgcatggaaaaggacatgatccgtgaagaggattttctgggaaattgttaccggttctccttttacgtggatgcggacaagcttcatgcgggcaggaactatgggaagatccgcttcaccaatgcctacacctcatcagaggtgacggtaatggcttacaaacagcggattgaccgcaaattcaacgaagcaatccggcagaagaagcatgccattgtggaattgatgcagtactatgaagccttccgtacgaagcagatcagtgcgtcgtcttggatgaatgaaacgagcctgattatggaccggcttcaggggctggatgaacagaatccggcctatatgctgatgcgggtacagctcttaattacccaggagagaacgaatgaggccaggtggcttctcgaacaggccgatgagcttcttgcaggaaaatataatccaaccttatattgctattacatgtatctttctaccctgctaaaccgtaccgaagagtacattgatgagatggcagagcaggtagagaagattttcagggaaaatatggatgactggcgcattgcatggcttctcatctacctttcggacgattattcacggagtccttcgaagaagtggattgttcttgaggaacagtttgccaagggagcgacaagtcctgttctgtatattgaggcatatcatctgatccggaataatccatcgattctgatgcagcttgatgatttcgagattcaggtgttatcttatgcagccagaaagcagcttcttaccacagaggtggtggagcagattgtctatctggcgaagaagctgcgcggataccggaagccgctttaccggattctgcgtgtctgctatcagatactgccaaccgatgaagtgctgcagacgatctgtacgatactgattaacgggaacattaccactccggaagcctttacatggtatgaaaagggaattggaaaggaactccgtatcacccgtctgtatgagcactatatgatgtcactggagctcaaggatgatgtggtcattccgaaaatggtactgatgtattttgcctttgacagcagtctggatggtttacataattcgttcctgtatgcctatgtctatcggaataaggctgtttatccggagctttatgaaagctacagggagcatcttaaacggtttgtggtcttccagattttaaagaagagaaacaataaatggcttgcttacttatataagaatctggttacggaaggaatgcttaccgaggagatttcggaaggactggtaacggccattttcctgcaggagctgcatctgaaacggaaggacatcagcagggtctgcgttatctatgacagcttaaaggaagaacaggtgtatccggttacgggacaggtcatgtatctgccgttatatggaaacagttaccggatgatactggaggattttaaggggaaccgcttttgcagagaggaagaatatgagcttgaacggctcatgattccggacaagattgccgggatgattgccccgtatgtaaaggatgagattctgtttgacctgtggctgtgtgaaaagggacaccagcttctcccggtcagcgaaagcaacagggagcatatgaagcagattatggagtccccgcttgtaaaggagtccattcagaaggaaatccgcttaaagcttatgcagtacgattatgaccatgatcagatgaacgagctggatgaagttttgaatgatcttaagccggagatgattttccgtgacagcatgtcccagatgatacggttcatggtaatccggggcatgtatgagaaggcttacgaatggatcagcctctgcggcggagaggacatcgaagcaaagattatcgtgcggctgtgtgggcggcttttagctctcgatggaatgaaagaggatccggtgatgacggcgctgattcaccgtgcatttctgtcgggaaaatatgatgagcttttattgaattatctgaacctgtatttcaagggaaccgtaaaggaaatgcgggatgtctggagtactgcggaatcctttggcgtggacacgctggcaattgaggagcggatcctgattcagatgctgtatacggatgcctttgtcggaaatgcggcagctattttccagagctatgtaaagaagggggcagatccatcggtagagctggcatttttagcccagtcctgtcatgattatttcgtaaaggacaaggtgaccgatccttttattctgaatgaggtagagcggatctgggaagaggagcaggcacttccgatggtgtgcaagctcgcctatacgaagttttatgccgggcataaggaacagacgaacgaaaaggtttccagaaatctgctcattttcctgcgggagatgacagcggaaaagatggtgttcccgttttataaggaatttgcagaaaatattacctttatgcataaatatatggataagaccatggtggagtatcatgtccatgatggaaaccgtgccgtaattcattatctggttgagcgggaaggaaatgtggagaacgagtaccgcaaggaagagatgaagaacatgtatgacggcatatgtgtgaaagaattcgtcctgttctttggggaacgtctccagtattatattgtggagcttgaggacggaaaagagcagcttaacgagagcggcaccttcagccggagtgatacggacacaaaccagaagatcagccggtataatctgattaatgacattgccatggcacggacgttgaaggactatgataccatggaaaacatgctttttgagtactatgattattcatatttgttagacgaattgttttcaatgaagtag

SEQ ID NO: 431 - DNA, 2778 bp, Unknown
  Unknown gut bacteria
atgagcagcagagtattggattttgaaaagtatacagcgaaggcccgtcaggcggttgcggaaggacaggtgcttttgctgaatcagaatcatgtgcttcctctgccgaagggaagccatgttgctgtatttggcagaatgcagcttcattattataagagcggtaccggatcaggcggtatggtgaatgtaaataaggtgaccggtatcctggaggcgctcgaggagagcgaagacgtacaggtatatgagccgttagtgggtgtataccgcgagtgggagaaggatcatccgtttgatgaaggtgtcggctggggaaatgagccctggtcgcaggaagaaatggaactgaatgaggcattggtcgaagaggctgccgaaaagaacgaatatgcgattgtcattctggcaagaacggccggtgaggataaggacaacaaaatgttggagggtgcgtactgtctgacctccatcgaagaggacatgcttcaaaaggtacggaagagctttgcgaagatgattgtgctgttaaacaccggtaacatcatggatatgagctttatggatcaatatcgtccggatgcggtgatgtatgtgtggcagggaggaatgatcggcggccttggaacggtcgatgtccttaccggcaaggtgtgtccgtccggccggctttcggatacgattgcggcacagatgtccgattatccggccgatccttattttggaggtctggaacaaaacctttacgtggaggatatttatgtaggataccggtattttgaatcagcagcaaagagcaaagtattgtacccgtttggtttcggactttcttataccacgttttcgatggaagcgggtggattttcctatgcggaaaatcaggtgtcctttgtgatgaaggtgacaaataccggttccgtagcaggaaaggaagtcgttcaggtttatgcaaaggctcctttgggaaagcttggcaagcctgcaagagttctgattgattttaagaagacgaaggagttaatgccgggcgagtgtgagacgcttgcattcgcaattccgacatcggtgtttgcctcctataatgaggtaagtaccgcaagaatgccggtcggatgggttttggaagccggagaatataccatttatgcaggtggcaatgtgcgtgatgcctatgcagtaggttcctttactctggatgaactgcagatcgtagaggagtgccgcaatgcgttagctccgacaaccgcttttaagcggatgaagatgaccgcggccaatgaacatgcagaagctgccggtgtatatgaggttgcaatggaagaggttccgttacgggtggtttctcctgaggaaaagagaaatgcagagcttccggaaagctgtgaaatcaccggagaccgcggtataaagcttgcggatgtcaaggcaggaaaagcaacgcttgacgaatttgttgcgcagctcacggaggaagagcttgccagcatcgtacgtggagaaggaatgggaagcccgaaggtaacggccggaacggcagcagcattcggcggtgttacgaagtcccttcttgaaaagggcattccgtgtggctgctgcgatgatggcccgtccggcatgcgtcttgacagtggaatgaaagcgttcagccttccaaacggaacactgcttgcctgcaccttcaatacacagttaaatgaagagctttatgcattcacggcggtggaaatgatcaagaaccgtgtggatatcctgttaggacccggtatgaatatccacagacacccgttaaacggacgtaactttgaatatttttcagaggatccgctgcttaccggtaagatggcagcggcgcaggtacggggcttaaagagtgcagggatgaccggctctttgaagcatttctgcggaaacaatcaggaaacgaggcgccatacctccaacagtatcatatccgagcgtgcgctgcgcgagatctatttaagaggatttgaaattgcagtgaaggaagcaaaagcagatgcagtcatgacaacctatggaccggtgaatggcatctggacctccagtaactatgatctggttacggatattctgcggaagcagtggggctttgaaggcgtggtcatgaccgactggtgggcttatgtctgcagggaaggggataagcctgcaaagaccgattttgcaacaatggtaaaggcacagaatgatctttatatggtatgtccggattcggaaaaaaatgagcatggcgataatacggtcgagtctctgcatgacggatcactgacacttggcgaattacagcgctgtgcgaagaatatctgccgctttatgatgaatacacatgcctttatgagaatgcagaatgaagaagatacgattgagattctcggagcggaagagggctttgaggaatgtgtcggggatctgacctattataaggtggacagggaggtcgtgattgacctgtccggtcatgaaatttccaagggaaccagcattgactttgcactggatcttgagcagctgggatattataaggcagagcttacggccaagtccgatcttggagaactggcacagattccggttaccttatcctttgccggaacaccgcgcggggtatatacctttaatggtacaaacggtcagtgggtaacgcagacaagagaagcggatcttggcatgaaatatgcgattatgcgcctgtacttcccgcagaacggtattgaagtaaaacagattaagtttgtctatgaccgtccgtttgaataa

SEQ ID NO: 432 - DNA, 1446 bp, Unknown
  Unknown gut bacteria
atgaaaaaaattctttttgtcgcatcagaaggtgttccatttattaaaacgggtggattggcagatgttgtcggatcattgccgaagtgcattgataaacaatactttgacgtacgtgtgatacttccgaagtatacctgcatgaaacaggagatgaaggataagctcacctatgtcacccatttttatatggactttcattggaaaaacgaatatgtgggaatacttaccgcagaagtggatggtgtaaagtactatttcattgataatgaaatgtattttggaggctttaagccgtatggggacaatgccttatatgagattgagaagtttgcttttttctccaaggcagcattatccattctgccgattattgattttaaaccggatctgattcactgccatgactggcagacaggtctgattccggtatacctaaaggaacgtttccagggaaatgatttttaccggggtattaaaacggttatgaccattcacaatctgaagttccagggtaaatggagcattgatgaggtgaaggatattacgggacttccggattacttctttacaccggataagctggaatcctacaaggatgcgaacctgttaaagggcggcatcgtatatgcggatgccattacaacggtcagtgagacctatgccgaagagattaagacggagttctatggtgaacatctggatggcctgctccgtgcaagaagcaaggatctgcgcggaatagtaaacggcattgactatgacgatttcaatccggaaacggataagaatattccatatccttataatgcagtgaacttccgcaaggaaaaggtaaaaaataagagagcacttcaggaagagcttggacttgaaaaggacgataagaagatgatgattggtattgtttcacggcttaccgatcagaagggcttcgatctgattgcctatgttatggatgagctctgccaggatgaggtgcagattgtggtattaggtaccggtgaagaacggtacgagaacatgttccgtcactttgactggaagtataacaacaaggtatctgcgaatatttattattctgatcagttgtcccataagatttatgcagcagcggatgcattcttaatgccgtccctgtttgaaccctgtggcttaagccagttaatgagtttacgttacggaaccattccgattgtgcgtgagacaggaggacttaaggataccgtagagccgtataatgaatacgaaagcaggggaacaggcttttcctttacgaattataatgctcatgagatgttatccaccatccgttatgcagagaagatctattacgataagaagcgtgagtggaataagatggtggatcgcgcgatggcagccgatttctcatggcatgtatctgcacagaagtatcaggagatgtacgactggctgattggttag

SEQ ID NO: 433 - DNA, 1866 bp, Unknown
  Unknown gut bacteria
atgccgtcacaattttttggactgaatattgcaggatcgggcctgcgggcatcgaacgctgcattaaatactacagcaaataatatttccaatgaacagactaagggctacagccgtcaggaggttacccagcaggcaagtgatgcattacgtacctttacgacctacggatgtgccggtgccggtgtggatactatcgccattgagcgtgtaagagatagcttctatgatgtgaaatactggaataacaactgcaaatatggtaattattccgtgaagcagtactacatgaagaccatcgaggattatttcaaggacgatggatccgtaggaacgagcggtttcaaaaccatctttgataatatgagtgctgcactgcagtcggttacaacgaattccagttccacaaccagtaaggcgcagttcatttccgcagcgaagaccttaacggattacttcaataatatgtatggcaatctgcaggagctgcagaaggatattaacctcgaaatcaagcagaatgtggatcagatcaattccattgcagaaaagatctcaaccttaaataaacagatcaatgtgattgaaatgtccggtccgaaggccaacgagctgcgtgaccggagagaagtgctgatcgatgagctttcggaaattgtggatgtggatattacggagcatgatattctggattccagcggtggaaagaccggaggaaccagatatattgtgaagattgccggaggtcagacgcttgttgatgcgaatgattacaacaatctgacttatgtggcaagagcatcggatgaaaaacttaatatgaccgatgctgacggcttatataacattaaatgggaaaatggcaatgacttttcccttgccaatgcttccctgaacggtaagctcaaggggctttatgagctttgctatggtaatgataaggcgaacttttcaggaaccgtgaaatctgtggatgacgccaataataaggtgacggtttccattacggatgataaattaaagaacctgcaggaaagcatgctttgtcaggcgggcggcgagatcacgatcggtaatgtgaagtatctttataccgactggagctttgatgaagctgccggtacttataccttccagctgagtaatgatacagcacgttctccccggattacagcaggaatgaaaggaaagagcgtccgtacctccgaaaaggttgcttatcagggaattccctattatatgcagcagatgaatacctggatccgaggattcgcagacaaggtcaatgaaatttttaacgcaggaaccaatgcttacggagacagtggagcagccaatcagggaaatatcctttttactgcagatatggtgaacggaaagcagtattcactggatgatcttaagggggcacccccgaacaatacctatggcaggtactacgtgatgactgccggtaacttcagcattaatcatgcactccttagcgaatacggcggcgatgcagatctccttggaaccagaagcagcaataaggttggtgtggaggaatgtgagcaggtgaaggaagtgatcacccttcttaccagcaaagagaagttcagcttccggaatgcttctgccaaccagatgctggagctgcttttatccgatattgcattaaatgcgagcaatgccaataccttccagaaaacctacgaaggcctgaaaacttcgattgacaaccagagatcttcggtatccggtgtcgataaggatgaggaagcagtcagccttgtaaaatatcagaattcctatactctggcatccaagatgatccagacacttacggaaatttatgatcagctgattctgaataccggtgtatga

SEQ ID NO: 434 - DNA, 2241 bp, Unknown
  Unknown gut bacteria
atggaagaaaaaatcatcaaaaccgagtattcggaagtgatgcagaaatcatatattgattatgccatgagtgtcattatcgcacgtgccctgccggatgccagagacgggttgaaacctgtgcagcgccgtgtgttatacgatatgcatgaactgggaatccgttacgataagccgtaccgtaaaagtgcgcgtattgtcggtgataccatgggtaaatatcatccccatggagacagctctatttatgatgcgcttgttgtaatgacacaggatttcaagaaaggaatgcccttaattgacggacacggtaacttcggtaacattgagggagacggagcggctgccatgagatacacggaagcccgtcttgaaaaggtgacgcaggaagcatttttggccgaccttgataaaaatgttgttgattttgtgccaaactttgatgaaacagagaaggagccttctgttctgcctgtaaagattccaaaccttttagtcaatggttccgaaggaattgccgttggtatggcaaccagtattccgcctcacaatctcggtgaggttgccgatgcagtaaaagcctacatgcagaatgaagagattaccacagaaggattgatgaaatatatcaaaggtccggatttcccgaccggaggtatcgttaccaataaggatgagctgctggaaatttatgaaaccggtgtcgggaagatcaaggttcgtggcaaggtagacatcgaaaagggaaaagccggcaagaccaatgtggttatttctgaaattccctataccatgatcggtgccaacatttccaagttcctgatggatgtagcaactctttccgaaacaaaaaaaacgcaggatattgtagacattacgaaccagtcctccaaggaaggaatccgtattgtcattgagcttcgtaaggatgcagatgttgaaaactttgtcaacatgctctataaaaagacacggctcgaggatacctttggtgtgaacatgctggccatagccgatggcagaccggaggtcatgagccttaaacagattatcagacacaatgtggatttccagtttgaagtagcacgacgaaaatataccacacttcttgaaaaggagctggaacgcaaggaaattcaggaaggcttaatcaaagcgtgcaacgtcatcgatcttgtcattgaaattttacgtggctccagggatcgagccatggcaaaagcctgtctggtagagggtaagaccgatggcatcaaattccgttccaaggaatccagaatcatggcttcccagctctgttttaccgaaaagcaggcaaacgccatcctggagatgcgtttatataaattaatcggactcgaacttgaagcgttgatcaacgaacacgaagatacgcttgccaatatttaccggtatgaggatatcttagaccgccgggattccatggcacaggttatcataaatgagcttgatgacatccgccgggaatatgggaaaccacgaaaaacagtcattgaaaatgttgcagaagccgtttatgtagagaaaaagattgaggagatggatattgtcttcttaatggaccgcttcggctatgctcgttccgtggatgttccaacctatgaacggaacaaggaagcggcggattcagaaaataaatatgtggtattctgtaagaacaccggtaaaatctgtatctttacaaataccggacagcttcacacggtaaaattacaggatgttccgtttggaaagttccgtgacaagggtgttccgatcgataacatcagtaattatgactcacagaaggaatatgccatcacggtagaaagccagacgagtttgaatctctaccggattctgtttgttaccgcccaagccatgatgaagatcgttgacggtggtgaatttgatgtggcaaagagaacggttgcagcaacgaagctgcaggataacgatgaggtcatcagcgttgaaattatcagggagcagaagcaggtcattctgcagtccgctgaaggatatttcctgaggtttggattagaggaagttcctgaaaagaagaagtcggctgtgggtgtacgtggaatgaagctttctgataaggatcatgtagaagctgtttattatacgctggcagccatgcctgatccggatattgtatataaagacaagcatgtggaactgcagcggattaaaccgcagcacagagacagtaaaggaacgaagcttcgtctttag

SEQ ID NO: 435 - DNA, 1827 bp, Unknown
  Unknown gut bacteria
atgtgtggaattgttggttatattgggaaacatcaggctgccccgattattttagagggacttgcaaagctggagtaccgtggttatgattcaaccggtatggcagtttttgatggaaagaagattaatattcagaaagcagcaggcagactgcaggtgcttgagaatatgacaagaggcggagagacgatgccgggctgtgtcggaatcggacacaccagatgggcaacgcatggaaagccaacggatattaatgcgcatccgcacgataatcaggatgggacgattgctgtcgtacataatggaattattgagaactatcagcagttaaagcagcggcttataaatcgtggctacaaatttgtatccgataccgataccgaagttctggtgcagctgattgattattattataaagggaatccgttagaagcaattacgaaggtgcttcaccgtgtggaaggttcctatgctctcggcattctgtttgcagatcatccggaggaaatttttgcagtacgtaaggactgtcctttgattgtaggaacaagcagtgaaggaagctttattgcatcggatgtgcccgcaattttgaagtataccagggaagtttattatattgataatcaggaagtcgttgcattaaaggaaaatgagattcatttctataccgtagacgaagaagagatccagaagacaccttctcatgtggactgggatgcagaagcggttgcaaagggcggatatgaacatttcatgttaaaggagatctacgatcagcccagagcagtccgtgagacctttgaaaagcatatgaaggatggcaatgtggagattgaagagctccgtatgaccgatgaagaaatcaggaagctttcccgtattcatattgtggcatgtggtactgcatatcatgcaggcatgacggcaaaatatgttattgaatccatggcacggatttctgtagaggtggatatggcatccgaattccgttaccggaatccgatcatcgaagagggagcactggtgattgtcatcagccagtccggagaaactgccgataccctgcaggcactccgcgattccaaggcacgtggagccagggtactgggtattgtaaatgtggttgggtcctccatcgcaagagaagcagacagtgtcatgtatacctgggcaggaccggaaattgcggttgcgtccacaaaagcgtattctgcacagctgattgcactttatctgctggcaatgaagtttgcaagagttaagggtacaatttcggaagaggagtatcagcagcttgtttttgatctccgccgtctgccggagcagattgaactgcttcttggtaataagaccaggattcagcggtttgccaaccgttatgtggccgcaaagagcgttttctttatcggaagaggcctggattatacattatccatggagggctctttaaagcttaaggaaattacctacatgcattctgaggcctacgcagcaggtgaattaaagcatggtccgatttccttaattgaggatggaacactggttatggcctccctgactcaggaggatctgtataaaaagactatcagcaacatccgtgaagtgaagtccagaggcgcatttgtgttagcacttacaacgaccggacatgatgatatagaggatactgccgattacgtactttatattccgcagacgaacaggtacttcaccaattcactggcgattattccattccagatgtttgcctattatgtatccattggtaagggacttgatgttgataagccccgtaaccttgctaaatcggtaactgtagagtaa

SEQ ID NO: 436 - DNA, 1515 bp, Unknown
  Unknown gut bacteria
atgggaaaaccaactggatttttagaatatgacagagaggtttccaaagcagtgaagcctcatgagagaattaagaacttcaatgaatttcatactccgttatcgagagatcatcagcaggagcaggcagccagatgtatggaatgcggtgtgccattctgccagtcgggtatgaccttaatggggatgacaagcggatgtccccttcataacctggtgccggaatggaacgatcttgtgtataccggcaactggaagcaggcgtataaccgtctgaaaaagaccaataattttccggaatttaccggaagagtgtgtccggcattgtgtgaagcagcatgcacctgcggtctgcacggagatccggtctgcaccaaggaaaatgagttatcgattattgaatatgcgtatcagaacggctatgcagatccgaagccgccaagaaccagaaccggtaaaaaggttgcagtcatcggctcaggtccaagcggacttgcaaccgcagaccagttaaataagagaggacattcggttacggtctttgagcgttccgaccgtcccggcggactattgatgtatggtattccgaacatgaagctggaaaaacgcttcgtagagcggaagatcgacgtcatgaagcaggagggaatcacctttgtgacaaatgcagaggtaggtggagagaatccggaatatgcagcctcgagaatcatggagcagtttgaccgtgtggttcttgcctgtggatctgccaatgccagaaatattgatgtaccgggaagagatgcatccggcatttactttgcggtagattatctgaaatccgcaacgaaatccttactggatgccaacatggagatccgtaaggcagcgaaaaactggatcagtgccagggataaaaatgtagtcattatcggtggcggtgataccggaaatgactgtgtgggaactgccatccgtcagggcgccaagaatgtgatccagattgaaatgatgcctaaagcaccggataaaagaaccgaatccaatccatggcccgaatggccgcgggtgtgcaaggtggattacggccaggaggaagcgattgaccagtttggtaaggatccccgtatttatgaaaccacagtcaaggaatttatcaggaatgaaaagggtgagctgacggctgtaaagacgattaagctgcatggtgaagtcgataagaagaccggcagaagagtcatgaaggagatcgaaggaaccgaacagattcttccggcagagctggtgctgattgcagccggatttttaggatgtgaaaagagaattgcagatgcgttcggggtagagctgaatgcacgcaccaacgtaaataccgaagcaggaaaatatcagacgaacgtaccgcatgtttttaccgcaggcgatatgcaccgcggacagtcccttgttgtctgggcaatccgggaagggagagaagcagcaagagaggtcgatgaaagtctgatgggctattcgaacttaggcatacagtaa

SEQ ID NO: 437 - DNA, 2103 bp, Unknown
  Unknown gut bacteria
atgagtgagggactggatggtgatgagggctggtctgattatgaagaagaggatgatgaaggatactccggtggcagtgcgacaattggaggagactcatcctatcagagcagtgtgttagaggacaattccttaaagggaacggtcatttcacaggaaaacgggcagatgcagatcagccgccggagcagagatgaagaaattcctatgggtgatggggactggacaatctttgtatacctttgtggaagtgatctggaatcggacggtggagccgccagcagtgatattgaggaagcctttgcagcaaggggaagcgggcaggtaaaggtggtttaccagaccggcggatcgtacttctggtatcagaatattaatgaaaacagggtacagcgttatttgttggaggatggagatctgacgctggttgatgaaaagccggaagccaatatggggactgcttcgacactggctgattttctgtcctggggggtaagtaattatccatcggaaagaatgggcctcattctctgggatcatggaagcggaagcattaatggagtatgctttgatgagcagtatgattatgacagtcttacattgggagaactggatcatgccctgaatcaggtgtatgatcagatgactgaccggtttgagtttatcgggttcgatgcctgtctgatgagtacgctggaaactgcaaatgtactgacaccttatgcgcggtatatgtatgcttcacaggagatggagccgggaagcggctgggactatacttcccttttgaataatcttgctgcgaatccggatcaggacggagcgcagcttggagaaaaggtgtgcagggaatattatgaccattgcgcggactatggattcggaagccagagatcggcgaccttttccattattgatctgtcgaaaatcgatgatgttctgatctccatgaatgaagccttccgggtggtttatgaacagggagatcttggtgatgttacgagagctgtgctggaagccgattcctttggaggaaacagtgtcagcgaaggatattccaatatgctggatcttgggaatatgctggatcagctttccggttatgggcaggaggtaagggatgcttcacagacgttacaaagctgcattctttataccatgaacggacgacttcacaagaatgcatccggactgtctgtttactatccggtttccattcaggggtcggaggagttaaagatcttttcccggatctgtccgagtaattattattatgcattaattgataaaattgcttatggggcagaaaacggaagtgcggcagattatgataacagtaccctgctttcggatatggcagacattaatgaatggctgggggaggaaagcggctttaccggggatgtcagcacaaatgccggggaatttgcagatattgagatcggacagatgggggtatcggacatttattttgatgaggacgggatatatacagtttcgtttgataatatggatgagctcgcctatgcctgctgcagtgtgggtatggatgacgatgcggatggattcttttaccttggaaccacggaggaagtgatctatgatattgaccggaactgtgtgactgacaattttgacggctcatggccctgcatcaatgacaatctgctggcactggagcttgtaaatacgacggacagctgcagcatttatacctgcaatgttcttttgaatgatgaggttgaaaccaatctgcggatcgaatatgactgggaatatgatgaatggagtgtgatcggaatctgggacggtattgatgaggagaccggtatggcatcgcgggaggtttatgagctgcaggatggtgatgtaattacccctgcttattactggttttcggtagatgacgatgaagactggtattatggagacgatattgttgtagatggagatcttgagattacttatgaataccttccggaaggagtttattattactgctttgagctgcatgatatctatggaaatgtgtattatacaccgttcacacttcagtatgtagatgaagacggagaggtctgggttgatggagaattctattaa

SEQ ID NO: 438 - DNA, 2625 bp, Unknown
  Unknown gut bacteria
atgaaaccagtagaattacggatcagtggctgggggccctacaaggagcttcagacgattgattttacaaggatggaggaacgcgggctgttcctgattacaggtgcgaccggagccggcaagacgacgatttttgacgccatcatgtatgccctgtatggctgcatgagcggtgaggtacgggaaaagggatcggtgcgttcggactttgcaaagccggatacgcccacctttgtggagctgtcgatgacacataagggcgaaagctatcacatttaccggaacccggaatatctgcgcccccgtaagcgtaagggagcggatggaaaggaactgacgaaggagaaggaaaaggcgattctgacgcttccggatggaagcagtgtcgagggcagcagcgaggtcacccggaaaatcgaggagctgctttgcctggattaccgccagttcaagcagatttccatgatcgcacagggggagtttacgaagctcctgacagcatcttcgcaggaaaaaacgaagatcttccggcagatttttgataccggcctgtacgagagaatcgcacagctcttaaaggagcgttccaatgcgatttataaagaggtgagcggataccgtcataaaatggatgaggatgtggagctgtatcatcctctggaagagtctgcagaggtatttgcgacactggtgcagggggaagcttatgattatgaggccgtgcttgcgttcctaaaggaagaaaagaagcgcatcgggaaggaagaaaaggaagtccttgcgcagtatcagaaattagaggagcggacgcttgtgctgaacgggaagctggtggaagcacagaaggcggcagagctgcaaaagagcctcgagagggaaacggagagaaagcagctgttagatcaccgaaaggaggaaatgcagcagaaggaaatacttctgtggaaggcggacagggcaggggaaatccgtcagcaggagcttttatgcgaggaatccgctaagcagatcgataaaataaaacagcagatccggcatcttcaggaggaaaccggattacgtgagcagcagatccttaccctgcagaagctgccggaatatcaggctgactttgaagcagcctgtgaacggaaggagaagctgtctgagcaggaacgggaaagtgaacataatatagaattatgtaaacaactggaagcacagctgaaacagctgcaggaggtctatctaaagctggaacaggaagagctgcttgcacggcagacgtatgaagaaacagagcaccggtatcgtcataaccttgcaggcatattggcttcggagcttgaagaaaaccggccctgtccagtctgtggatcccttcatcatccggcaccggcggctgtcacagaagagcatctgaccagggaaaaggttgatcaggcaaagaagacatggcttcagaagcaggaaaagaccatgcaccagcatggcgaaaccatggctgcaaggggaaaggcagaacaggcgaaggaaaagggcggtgagcttttaaaagccatcggacagatgcaggaacagatggatcagcttcctgcagaaatcaaagcacttttgtcaaaatatacccggaaatcctttgaaggggaactgaaccgcctcttacaattacgtgtcgagcgtgcagaaaagcaggagcagatccttaccttacaggaggagcttcaaaagggacaggagcttttcagagaaagagaagaggaaagggatatcctcttaacgaagtatggctttgcttccagggaggaatatcagggcagtcttctttcaaaggagcagatcgaggccgggaagagagagctgcaggactatgagaagaactgcagggcaaatgaagagctgctgcagcatctgaaggaacaggtacaggagattgttcttgcggatccggtaaagctgaaggaggagcttaaggaagctctggaagaaaagcgggctgtgcagcagatgctttcaaagaagcaggaaagccggaatcttacggagagaacctatagttctttaaaaacaaagcttgccggtcttaaggagactatggagcgttataccttagttaaggggctggatgatctggcaaacgggaataataagaaacggcttgtctttgagcagtatgttttgatttcctgttttgaagagattctgtatgcggcaaacctgcggttgcagacaatgagtgctggaagatatgagctgcgacgtgtacggggaattgtggatgcccgcagcaaggacaatctggaaatggaagtgctcgactattacaccggtaagtaccgctcagtgaaaaccttatcgggaggagaatcctttaaggtctccttaagccttgcccttggcatgagtgatgtcattcaggcacagagtggtggaatccgggtggaaaccatgtttatcgatgaaggcttcggtactcttgatggagaatcactcgatcaggcgtgtctggtactgcagggattaacggagagcaaccggctgatcggacttatttcccatgtgccggagctgtccgagaagattccggatcagatccgtattcataagacgaatactggaagctatgccgaagttgtgatacagtga

SEQ ID NO: 439 - DNA, 1470 bp, Unknown
  Unknown gut bacteria
atgagagtgggatttgataatgaaaaatatctgcaaatgcagtcagagcatatagaagaacgtattaataaatttggcgataagctttatctggaatttggaggaaaattattcgatgactttcatgcatccagagtgctcccgggctttgagccggacagcaagctgcgtatgctgatgaagctggcagaccgtgcggagatcgttattgttataaatgcagctgatattgagaagaataaagtacgtggtgatcttggaatcacctatgatgtcgatgtacagcgactgatgaaggagtttgaaagcaggggactgtatgtgggcagtgttgttctgacccattataccggtcaggcagcagcagatgcatttaaagcgaagcttgagaagaagggtgtgagggtttaccttcattatattattgaaggttatccttctaatattaataagattgtcagtgacgagggctttggtaagaatgaatatattgaaaccacccgtccgcttgtggtggtaacagcacccggaccgggaagcggtaagatggccacctgtctttcccagttataccatgacaataagcgtggtattaagtccggctatgcgaagtatgagacttttccgatctggaacattccgttgaagcatccgattaaccttgcctatgaagcagcgacggcagatttaaatgacgtgaacatgattgacccgttccatctggaggcttatggtgtgacaacggtcaactacaaccgtgacattgagatcttcccggtgttaagcgctatttttgaaggaatttacggagagtgtatttacaagtcacctaccgatatgggcgtgaacatggcaggaaactgtatcattgatgatgaggcctgctgtgaagcctccaatatggagattatccgtcgttattatacagctctgaataacgtggtaaacgataagggcagcgaaaacgaagtatataagattgaactgctgatgaagcaggcaaagattacgaccgatgaccgtaaggtgaccgtagcagcaaaccagcgtgcagaaaagcttggtgttcccactgcagcgattgaactgcaggatggtacgattattacgtcaaagacttccgatctgctcggtgcatcggcagcattactgctgaatgcattaaaggcattaggcggtgtggatcacgatacgcatctgatttctccggaagcgattgagccgattcaggtgttaaaaacgaaatatttaggtggaaagaatccgcgtctgcataccgatgaggtgctgattgcattaagtatttccgcacttaccgatgagaatgcacagaaggcgttagagcagcttcccaggcttaaaggatgtcaggtgcatacctcggtgatgctttccaatgtggatattaagacattcaagaaattaggggtggatttaacaagtgaaccccgtaaggaaagaggattttaa

SEQ ID NO: 440 - DNA, 1167 bp, Unknown
  Unknown gut bacteria
atgaatgaacttcaggaaagaatcttaaagagcatggatctgacaagacaactgagtgaggaggaaatccatgaagcaattgatttgcggatgaaggaagagatcaggaaaacgccactggatctattgtccagagagaagctgcaccgcaatattttttatgaaatccgccagcttggaattttgcagagcctcatcgagaatccggagattacagaaattatggtgaatgggacaagcggtatcttcattgagacgaagggaaagcttaagaagctggatatctgctttgaatccagggaaaagctgacccaggtcatctggcagattacggcggattgcaaccgtgccatcaacgatgccagtccgattgtggatgccagattaaaggatggcgcaagagtgaatgttgtgcttgatccggtggcgattaacggtccgattctgaccgtgcggcgttttccgaaaacaccgattacaatggatcagctcattgagcttcaaagcattacctgtgagtgccgtgactggttaaagcaggcggtacaggacggagccaatattctggtgtgcggaggaaccggatccgggaaaacgacatttttaaatgtgttatcccagtacattccctcagaggaaagagtcatcaccattgaggatagtgcggagctgcagcttcttggaatccccaatctgatccgtctggaaacaaggaatgccaatgtggaaggctgtaaggaaattacgatccgtgatttgatccggacgtccttacgtatgcgtcctgaccgcattgtcgtcggggaggtgcgtggacaggaggcgattgatatgcttcaaagcgtcaatgtcggtcacagtgccatgacaacggtgcatgccaacagtgtccggaatgtggtaagccgtctggaaacgatggtgctcatgggaatggaaatcccgatctcggcgatccgcagacagattgtagaggggtttgatgtgatggttcatctgggtcggtgtaagaacgggagacgtgctgtcatggaggttgcagagcctatgcacattgcagatggagaggtttgtatgaacactgtctttaagagaaatcaacagggggaattagtgaaggttggggaatttactgagaaaacaaaaagcaagctggtccgtatttaa

SEQ ID NO: 441 - DNA, 2616 bp, Unknown
  Unknown gut bacteria
atgaacagggttcagaaggttatctgtcatgtggtacagcatgctgcacttgttgtaggcgttgtattgcttacaacggcgctgctgagttcgtatgttcgatatgagaccgtaaacggtgtgcggtctacattcttaaataacgaaggtcggcagaaggactttgaagattcaaaaatttttaatgagctgatgaaggaacaggcgctcacgattgtccggtatggtgcaatacgcgggcagcttgaaaccgacggggtatacgatgccaataaagttattgatattacggcatatgccaaccggtttgaaggtgtaccaaaccggtatgtaacggtagattattatttagaggatctgatccgctggggcaaatatggtattgaatatgtgatgacggaaacctgcgcagcagattttctaagcggaattacacagtataccgtcatttccaatgcggaatacggaagttatcacggtaacttcagcccatataatactgacttgagtcattcagtagaaaagattgatgtttccggaaactcattatctccgacaatttatgaggatgtctatacaggagactggttgagtggagaaggtggggaaaacacagaggtatcacagcatcagcttctggtaaaccgttatcagacagtcgatggcaaaaatgttgaggattatgtttcaaactgggaggagtatgatcagctggtagcttcccttgcaacgacgatccgggatctgacagagaattatgcactctgcggggagtactacgactattatgatgaaaccggaagtgatgccaaatccaatgtagtatatctgatccgtaaaacgatcggaaataaaacagagctttatactaatctgggaacggagcggacggatcctgcttttttagaggcggctctgaaagaaaagtgcgaccggtatcttctttatgatgcgcaggatctgcgctatgaaacgaatacgcagattacggaagcagaactccgtcagtttatcagcgattacggttatgcatatccggaaaacctgcagatcatgatcggagtgaacgaggaccgcgcagtgaaggactgctttgttactgccggcgcggcttatcagaatgcagttccaaactttacgcagaatgtcattattgcggtgatctggctgcttgtattccttgccatggtgatccttcttacggtcaaagagggtgttgtcaaagataaagagaccggagtgaaaacctgtgtactgcatgtggaagataagattccgacagaaattttccttgtattttttgctattgcaattgggcttctgattggggtgtgcggagaacttttctttggtggaagatggatatcagatatctatactttatatcggagaaacggcgttgttctgcttactgccggaattgcactgcttggaagtctgctttgttccttcttttactatagtcttgtgcgcaggatcagggcacaccggatctggaaaggaagcatcttgcgctgggcaattgttcagcttaagaagggagtctgttatatgcagaatcacaaatccatggtggtacgggtatggataccgttccttggatttgccggagtgaacctgcttgcggtgattcttgcagaccaaatgatgatgtcctatgtggtgtttatcggaatcctgctgtttgatgcactggttggtgtggtgtgcttccggaatgcagttgcaagacagaatattttgcaggtgattaaccggatctgtaagggagacctgaaggccaaggtggatgagaccggactgaatggagataatctggtgctggcaaaggccgtgaaccggatcggagacagtgtgcgggaggcggttgaaaccagtatgaaggatgaacggttaaaggcagatctcattaccaatgtttcccatgacctgaaaacaccgttaacctcaattatcaattatgtggatctcattaagagagaacgggtcgataatccgaaggtacaggaatatattgaagtactggatacgaagtcacagcggttaaagcagttaacggaagacctgctcgaagcctccaagatttcttccggaaatattgtacttcatatggagcggattaatctggtggagctgctcaatcagacgcttggagaattttctgagaagtttgagcagaagggacttatatctgtggttaatgcaccttcacaggccgtctatgtactggcagacagccgcagaagctaccgcgtgatggaaaatctctttaacaacatttataagtatgcattagagggaaccagaatttacattgatcttggcttcacagaatggaagagtgcagacggaagcggaagccaggccggcgtattcctttctttaaagaatatttccgcaatggagcttaatgtggcaccggaagaactgactgaacggtttatccgtggggatgaatcgagaacaacagaaggaagcggtctcggactttcaattgcgaagaacctgacagaagccatgaatggcatgtttgagatttctattgacggtgatttattcaaggtagtgcttgtatttccaaagatggatgatgtgaagccgcaaacagaagtataa

SEQ ID NO: 442 - DNA, 2493 bp, Unknown
  Unknown gut bacteria
atgaataataaattatataaattaatgaactggccgagaattgaaggaattgtgtattcggaggaagcaaacccgcaggagattctgggggtacataccacaggtaagaatgtcctgtttcagatgttctggcctggggcagtgaaggtaaatgtacattttatggaagagaagcgttctgaggctgcagaggtagtatccactgcaaaattggtacttccgatggaaatggcagatgagaacggtttctttgcatgtctttatcagggaaagaagccgcagcactatgaatatgaaattattgatgcccaagggaacagcagaatgattaaggatgcctatgcattcgcaccggtatccttatctaaaaaggatgctgtacgttttacttcaggcattcattataccatttatgaacatttgggagcacatccttgtacgagaaacggtgttgccggaacacagtttgcggtgtgggcgccgaatgcggtccgtgtcagtgtcgttggagattttaacaattgggacgggcgcatttatcccatgataaaggatggtacaaccggtatttttgaactgtttataccggatgttcaggcaggtgactgttataaatatgaaatcaggaaaaagggcggtctgaccgttttaaaggcagatccttatgcattccgccagcagcttcgtccggatacggcttccatcgtggaagattctcattacagctatcaggatgcagaatggatgaagaatcggaagaaatatgccgaaaagaatgcgcccatcagtgtttacgaattatatctgggctccttccgtcatggagaggatggaaaagaaagcttatcctaccgtgaactggcgcctcttgttgcagaatatgcaaaggaaatgggctatacacatgtggagctgatgccggtgatggagcatcccctggatgcatcctggggttatcaggtgattggttattatgcaccgaccgcgcgctacggaacaccggatgacttccggtacttcgtggatacgcttcatcaggcgggcatcggtgtgattctggactgggttccggcacatttcccgagagatacctatggacttgccgagtttgacggaacctgtctctatgagcatgcggatccccggaagggaagtcatccgcactggggaacattgatttataattacggacgcccggaagtatccaactatctgattgcaaatgcgttatactgggcagagcagttccatgccgatggaatccgcatggatgcggttgcttccatgctgtatctggattatggacgtaaggatggcgagtgggttgccaatatttatggcggcaatgagaatctggaagcgattgaaatgatcaagcatctgaattccattatgaaaaagcggaatccggatgtgctgatgattgccgaagaatcgaccgcatggccgaaggtgacgggagctttggatgacgaaggacttggctttgatcttaagtggaatatgggctttatgaatgattacctggcctatatcggctatgatccgtatttccgtgcacatcatcataatgaattgactttcagcatgatttacgcctacagtgagaactttatgctgccgttttcccatgacgaggttgtacatggcaagtcttccatgattggcaagatgccgggcaccattgaagataaatttgcaaacttacgattgacctatggctacgtgatgacccatccgggcaaaaagcttctgtttatggggcaggacattgcagagttccaggagtttgacgaaaccagacagataaaatgggagctgttaaaggaacctgcacataagggaattcatgatctggtgcgtgatctgaatcacttatatcaggagctaccggcactttatgagaaggatacggaagcagacggtttccagtggattaactgcatttctcccgagaagtgcatgctttcttatatgagaaaggccttaaagccggagcagacactggttgttgtcgcaaattttgccaatatcgagcaggaattctgtatcggggttccgatggcaggcaaatataaagaaattctgaatacagatgataaggcctacggcggaaagggatgggtaaacgcccgtgcgatacctgtaaatgatgaggaatacgatggacagccctgttcctttaccatgaaggctgcaccgctttctttgagtatctttaagtttgttgcctatacagccaaagagaagcagcagatcgaaaaccgcaaagcagaaacgaaagcgatccgtctggcacaggaagccgggcagcgtgcaaaagaggctgaagcagaagccgaagagctgaccttgcgtgcaaaagaattaaagaagcaggcagaagaaatcatgcagcaggcccagaaggccttacaacgtgctaaggaagaagagaagcttgcttcaattgaatggaaaaaggcagaagaggcagcaaagaaagcaaaataa

SEQ ID NO: 443 - DNA, 2034 bp, Unknown
  Unknown gut bacteria
atgaaaaaggcagacgttggtgtagcggcatatatcgtagcagcctttgtaatgctgattgtaccgattccaagctggcttctggatgttctgcttgcatgtaatattgcgattgcatttacgatcctgtttactacgatgttttccaaggaagtactggatatgtcattcttcccgaccattctgttgttcaccaccattttccgtattgcactgaatgtatcttcgacccgtctgattcttacaaccggtgatccgggacaggtggtagcaaccttcggaagctttgttggtggcggggatctgattgtaggtgcgattgtattcctgattttgctgattgtgcagtttatggttattaacaaaggttccgaacgtgtagctgaagtaacggcgcggtttactttggacgcaatgcccggtaaacagatggcgattgatgcagacttaaatacgggagcaatcaatgatgccgaagcaaaaaggcgaagagacaagattcaggaagaagcgagcttcttcggatccatggatggtgcggtaaagtacgtaaagggagatgcaacggcaggtcttattattaccgcagtcaatgtcatcggcggtatcgccatgggtgtactgcggcagaatatggatattacagcggcactgaataaatatgttattttaacaatcggtgacggtctggtaagccagattccttctcttctgatctcactttctacaggtattctggttacgaagggatcgaaggatgcagactttggtacggtactgatcagacagttattcggtgtaccaagagccttgtatctggtaggtgcaattattgcaggacttggtattgttacgccgcttcccacagtggttttcctggcattgggactgatttttgtcgtgacgggacgtgtgattgcgggaacgatcgaaacagcgcagattgaaaatgaagttgatacggaggaggcagcggcagaagagatccggcagcctgagaatgtcaacagtctcctgcaggtggatccgatcgagctggagtttggctacggtattattccgttagcggatgtgaatcagggcggtgacctgcttgaccgggtggtgatgatccggaggcagattgcactggaattaggtacggtagtgccgatcatccgactgcgtgataacatccagctaaatccgaaccagtatattattaagattaaaggcatacaggtgagcgagggcgaaatcctgtttgatcattatatggcaatgaatccgggctatgtggaggaagagattaccggtattccaacgtttgaaccgtccttccatctgccggccatctggattacggaagggcagcgggaacgtgcagagagccttggctatacggtagtggatcctccttctatcattgcaacccatctgacggaaattatccgccagcatattgcagagctcctgaccagacaggatgtacagaatctggtaaacaacttaaaggaaacaaatccttcgctggtagacgaactgattccgaagcttcttggacttggcgaggtacagaaggtattgcagaacctgcttaaggaaggaatttctatccgtgaccttctgacgatctttgaaacactggcagattatgcaccttctacgagagatacggatatcttaaccgagtatgtgcgtcagagcctgaaacgtgcgatttccaataagttcttcccaccgaatgagacaacgagcgtggtaacgctggatccgaagatcgagcaggaaattatggcaagtgtgaagcagacggaaaacggtgcttatctgacactggatccggaacgtacgaaggccattatcaaatcagtggaaacggagattgcaaagctggaaaacctggggaagaatcccattattattacttctccgattgtccgtatgtatttcaaacgactgacagaggattatgtgaaggatctgatcgtagtatcctataatgaagtggaaaataatgtagaattacagtctgtaggaatggtgacagcatga

SEQ ID NO: 444 - DNA, 1776 bp, Unknown
  Unknown gut bacteria
atgaggttagtcatggtacagtcaagaacacataactgtggccagttacgactcccggatgtgggagagaaggttacgctggtcggattttatgataatatgcgaaaggtgagtaagaatctcggattcctgatcttaagagatttttacggaatcacccaggtggttgtggagaccgaagagatgatggacaagttaagcggcgtcaataatgagtccacgttatctatcaccggaacagtccgggagcgttccagcaagaacggcaaccttcctaccggtgaaatcgaagtcgtaccggaagatatccaggtacttggcaagtgtatttataatgaacttccgtttgaaattaacagaagtaaggaagcggatgaagcaacccgtctgaaataccgttatctggatctgcgtaatcctgctgtcaaagagaagatcgttcttcgaagcaaggttgttgcagagctgcgtcagagaatgaccgggcatgatttcctggaaatcaccactccgattctgacctgttcttctccggagggagcgagagattacctggttccgtcccgtaatcatccgggcaagttttatgcattgccgcaggcaccgcagcagtttaagcagctgctgatgacgtccggctttgaccgttatttccagattgcaccctgcttccgtgatgaggatgccagagcagaccgttctcaaggtgagttctatcagctcgatatggaaatggcatttgcttcccaggaagatgtatttgcggttattgaagatgtattacctcccgtatttgcaaagtacggtatttataaagaagcatccaaagcaccgtttgccagaatctcttaccgtgatgcattagagaagtatggttcggataagccggacttaagaattgatctggtattacaggatgcaacagaggtgcttgcggattgtggattcggacctttcgatggacagtgcgtggaagccattgtggtggatcagttcacggcaacccgtaaggtaattgataagatctgtgccgatgttgaagtacagagcggccagaaggcttactggttcaagctggatgaaaacggcgaactggttggaggaattgcgaagttcctgcaggagcgtaaagaagcagtcatcgaaaagctcggccttaagaaaggtgatttcgtaggtcttaccgcaggtaagaagggcgatgctctgaaaggggcaggcgtattgaggaaataccttggaatgaacagtgaagcacatatgaagcagaactgttatgaattctgctggatcgtagacttcccgatgtatgaaatcggagaagaatccggagaactggaattctgtcacaatccgttctctatgccgcagggcggtatggatgcactgtgcaacgcagatccgctttctattaatgcttatcagtatgacctggtatgtaacggtgtcgaattatcttccggagcagttcgtaaccatgatccggaaattatggtaaaggcctttgaaatcgtaggcctgggcgaagatgcagtgaaagcaaaattcccggccatgtacaacgcattctgttacggagcacctccgcacgcaggaattgcaccgggtgtagaccgtatggttatgctgcttgccggtgaggagagtatccgtgaaatcattccgttcccgatgaacaagacggcacaggatgtcatgatgggagcaccttctaccgtagatgagaagcagctccgtgatgtgcatattaagattgatcttccgaaggaaaattag

SEQ ID NO: 445 - DNA, 3402 bp, Unknown
  Unknown gut bacteria
atgaagaaagtactttcccgttggtatctgttggtgatcggaggcttcctgttggctgccatggcagtgtttctcctgtgcggagaggacagtgtcatagctgtccatgacaatctggatctgtttatcccacagcttcaaatgatgaaaaacgatcactcgtttttcagtcatgatgcttatgtggatttccttggaggaatcagccgtgatacgctgttctccgagttttatatttacacgattctgtttatgctgttgccggcattcccggcgtatattacagcatatttcctgaaaattctgattgccattgcaggctctgttctgcttggcagggaactccttggtgaaaaatataaaagtcagcaggctcttgtctggttatgcggctttgcctacggaatcctgaatgtctttccggcatttggtattccctttgcgtccattcccctgcttttgttcctgcttgttaaaatcatgcaaaagccgtcttttggatggtatgtggcgttgtttttctatccggtgctgtcctatttttcctatttcggactgtttattctggcgtatatggcgcttgcctttctgatcttatggattaaagaccggaaattcccgggaagaatgctgcttgccattgctgtgctgtcggtggggtacatcgtgtgcgaataccggctgttttacatgatgctgttcgatgacgaggtgacgatccgttcaacgattgtggcaggaagctatacggtttccgaggttcttgcgactatcggggactctcttgtaaagggtatgttccacgcagaaagcgtccatatgtatgtggtgcttccggtttgtgccgtttactttttttatctgaatatttcttatctggtgaagaaaaatgcaagagctattttccatgactggtataatcttctcatggtcattcttgtttttaacagcctgatttatggcatttattacctggagccggtgcggaatgtggttgagtttctgtgcccgccgcttaccggatggcagtttaaccggacgattttctttaatccttttgtgtggtatgctgcatttttcctggtattgaagcggttgtatgagaaggaaaaaaagagccttcgtgtggcagcaaaccttctggcgcttgcagcagtgcttgtgattctgggaagcaatacccgttataatgacctttatcatacctgttttggcaaggtgtatgaaatggtgaagggacagaaggcaaatgacctgacctaccgtgaattttattctacagacctttttgacaaggcaaaagaggatatcggatactgtggacagtggtccgtggcatacggcttttatccggctattctggaatacaatgatattgccactcttgatggttatcttggcttttattcccagaattataaggaagaattccggaaaatgattgcaccggcacttgaccgggtggaggagagccggctgtattttgatgaatggggagcgcgtgcctatctttattccggtacggatccttccattattaacagctcccgtatctatgaggtgaccgaccatgacctgtatctggatgtggatcagtttaagcgtctgggaggacggtacattttctcccgtattgacctcggcaatgccgaagagatcgggcttaccctgatcgggacctatacggatgaggcttcaccgtacacgctttatgtctatcagacaacctcccgctatcgggatgtggaccatgccaatctgacactggaagagatgaagcagacgacctgtgatatggagctgctggatgcacagctgacagaaatgaaggaactggcagcagaagcggaagcagccggggaagccaaggatccggagcgtgtgaaggaattgttcggggagacactggatgaagtggaaaagctgtcaacctgttattctctttcacagattacctactatcagaatatttttgatgaagagaatcaggaaattcaggcagagcttctcgatgacgtgatggattacggagaccggttgaatgtatcgatccgggagctgtgtaaatcaccgtatcagaatacgatgactgagctgatgaatgcggagcaggtggaggcttaccttgagtatgaagagatgacggacgaagagaaggagcttacggcgaaggaaaacagtctggagcaggagtacgagcagctttcctccgaagaattttattatgaatatgacggggaagagtgggatttgaaccgtctgaatatggaagcggatgagatggatcatgatgctgttgttgagatctatcagggaatctgcaagcagaggaatgatgcggtcggagaggtttttgtggagcttgtggacgttcggaatgagatcgcaaagctgaacggctatgacaattatgcagaatatgcttatgatgcagtttatgtgagagactataccctcgatgaaaccagggatcttttaaaggagatccgtaagcacgtggtaccggtcatggcggatatgaaggatgtgcttaatgacacggattatatgagattgtattccgaaggacaggggatcgaaagtacatcgatcattgaacagatcggaccatatctggaagagattgatccggagcttaaggatacacaggagcattttcttaagtaccggctgtatgatatggatacctcacagaacaaggcgaacacggcttttaccatgcggttatcttactttaaggatggctttatatacggacagatgtatgacaattacatggactactacaatgtaatccatgaattcggacattacaacaatgtctaccgcagtgccgataccttttttgaatccagtaacaacattgatgtcagtgagattcattcccagggtatgcagatactgttttatgactattacgatgaactgctaggagaggatatcggagatatttacgcattttatgatgtgtacagcatggcggataatgcgatttccacagcactgatttcagagtttgagattgctgcttatgagaatccggatatgacgcttgaggagctgaataagctgtatctgcagctttcacgcaggtatggcatgcagtatgattccaagatcaaggagctttatacctggtctgaggttccgcacattttcacctcaccgtgctattatttctcctatctgacttcagcattctcgagcctcgatattctgacgatggcagaggaagaccgtcacgaggctgttgaaacatatatgacgctgacgaccattccgggatatgtgccgtactgttcagctgtggagtatgcgggactgcgcgatatttttgatgatggtgtggcacaggatattatagaagagaccgcatccattcttggagtaaagggatattag

SEQ ID NO: 446 - DNA, 1761 bp, Unknown
  Unknown gut bacteria
atggttaaaatttttaaaaagatgatggtgcttcttgatgcacgtcagaaacgaattatggtgcttcagttaattctgatgctgattggagcgattcttgaaactgccggtatttcgatggtagttccggtaatgcaggtggttctggaagaaaatgcggtggcaaagcaccgttatctccaggtgatctgtgagctttttcatattgacaaggagaataccacagccgttatggtgtttgtgatgatggccctgattctgatgtttgtcctcaagaatgtctttctgttcttccagcagaagtcacagcttaagttcgtctataccaatcagtttgccacctcgagacgcatgatgatcaactttatgcagcgcccgtatgaatattatctgaatgcggatacgtccgtgatccagagaagcatcacttcggatgtgaataacatgtatggactgattctggcgatgctgcagcttttcagcgagggtgtcatttttgtgggacttgtcattgtggtggcctttatcagcggaattaagatcaccattatcgtggcagctcttctgattgcggtccttctgcttattatgtttattttaaagccgatcatgaaaaaggccggcgtagagaatcaggactattacagtggtctttataaatggatcgatcagtcggtaatgggaatcaaggaaatcaagattgccaataaggaaagctactttattaatgagtattccaagtgtggaaatggctatgtaagtgccgtacagcgctataatttgtacaatgccactccgcggctcttaattgaaaccgtagcagtagccggaatgattatttttatgatgctgcagctgctaaatggaattgaagcaagtgaggtcattacccagctgagtgcacttgcggttgttgccatgcgccttgtgccctgtgcaaaccggattaacaaccatctgacctcgatttcctattttgaaccattctttatgggagtcagtgaccatttacaggatgatatccgtgataagaatgtaaattacgacgcagaagcgtatcgtcagaaaattgatgtacagaagatggagatccgggataagattgaattaaaggatattgtttatagatacccgaacacggagacgctgatttttgaccatgcggatatggtgattcccattggacagtcagtaggaattgtggggacaaccggtgccggaaagtctacggttgtggatattatgctcggactgttaaagctccagcaggggcagatccttgcagatggcgtggaggtccgtgatcattaccggtcctggcttaaaaatgtcggatacattccgcagaatatttttatgattgatgataccatccgtaagaatgttgcatttggttacgcggacgaggatattgacgatgacaaggtctgggcggcacttaaggaggcccagctggatgagtttgtaagaagccttccggaaggacttgataccggaatcggtgagaggggaatccgtatttcaggaggccagagacagcggatcagcattgccagggcactttttgaggatccggaggtgctgattatggatgaggcaacctctgcccttgataatgatacggaagcagccatcatggattccattaaccgcctgcatggacggaagaccatggtgatcattgcacaccgtctgcagacgatcgaaaagtgcgacattgtttatcgtgtcgaagacggaaaggtgacaagagaacgataa

SEQ ID NO: 447 - DNA, 1866 bp, Unknown
  Unknown gut bacteria
atggggtatattacgcagaactatcaaaaggatgttctgcaggctatttttaaagaagcaaatgaactgggttatacggtgttttgttttgccaatttcggggcatacggggataaggtgttatatgcggaaggtgagcgtggcatcatgtatctgccggatcttacacagcttgacgggattattgtcggggaagatacgtttgatgtgcccggaatgggtaacgaaatatatgtatatctgaagaaaaacgcagactgtccagtggtttatctgcgcacggcaagagagggattttatcgtgtggtgatggacgaaggagaagcaatcaggaacatgacccggcattttacacaaatccacgggtttcgggatgtctgttttatgacaggagcttttgaccggctggatgccagaaatcggtatcagggttatctggatgtaatgcatgaggaaggaattgaagttacggatcatatggttttctttggagattactggcgcgagaaagggaaggaagcagtggactggttccttcaggggagaaaacccggaaattacccacaggcgattatctgctcaaatgattatatggcgctttccgtgtgtgaggaattacagcatcggggcatccggattccggaggatgtgtgtgtgtccggttatgatgatattacagagagcagggagtattatccgccgcttactacggctaaggttccatttaaggaaatgggaaagagagccgtacggattattgaagaagctttacagggagaaaaacctgagcctgctacaacctttgttcctgaaatgtgttttcggcaaagctgcggttgccatgaacaggaagtggagaaccatagttggcggcggatgtataataaactggacgcagcaatagaaatttataaccagtctctttttttaaatacagattatcaggaagcttttcgcgaagaggattatctcaaggtgactgagcgttacttcggaaagctgggatgtgacaggggattcctttgcttatgccagaaactggagaatgatgagaatgctcagttgccgggagcatttacagacaatatgattttgcgcaagatctttatcaaagacagaccctcgaaggattatcatgaggtctttccacgtggaatgctgcttcctgaattggtaaacagtgccgtgcagggacaaagcatgatcgtatttccaattcatttcaaaaatcggatctttggatatctggcgttggcggtcagagaatcggagtggccgacttcctttgtacaggcgtatatgatggcgctggcacttgccatggaaaacagtgccgcacagaaggagattgcagacctcgaacagttccggaatctgtaccacagggattccctgacgggactctataatcggcgcggctatgagtactatctgcgcagtctgtatagcaggagcaaagaggaaaaccgtcattttaccattgtaagtattgatatggatggactgaaatatattaacgataattttgggcatgcagaaggagatgctgcattgtcccgactgtctgtagtactggccgaactggtacaggagaatgagatttgtgcacggacggggggagatgagttcatggttcttctttattataataaggaaggacgtgaggagcagtttataaaggaactgtataaacttcttgaagaggaacagaatcgtaatccgaagccgtatcccgtacatgcgagtgtaggctactgttgtgtaagtaaaagttcagatatgtcccttgcagcatgtacgcagcttgccgacagcaggatgtacgagaataaaaaggcgtataaggaatcattgaaagcaaaatag

SEQ ID NO: 448 - DNA, 2244 bp, Unknown
  Unknown gut bacteria
ttggaaacgattaagggatatgtggatcatatcatttatcagaataaggacaatggctatgcggtactgtccatgaatgtggatgatgaggaagaaatttgcgtagggatctttcggggtgtagataacggagagaatctggagattaccggtgaatatgtggagcatccaagctatggctttcagttcaaggcaaatagcttcaaagttgtggagccggatgatctgctcagcatggaacgttatctgggatccggtgccatcaaaggtgtcggtgaggcgctggcgaagcgtattgtgaagaggtttggcaaggataccttccgtgttattgaagaagagccggagcgtctggttgaagtcaaaggaatcagtgagcggattgcacagcagattacagatcagatgattgagaaaagggaaatccgtgaagcttttctatttttgcagaaatatggaattaccaatacactggctgtgaaaatctacgaaaaatacggaatggggatgtatggaattctgaaagagaacccgtaccggcttgcggaggatattcagggagtcggcttccggcttgctgatgaaattgcagagaagattggtattcatacagattcggattaccggatccggagcggaattctttacacactgctgcaggcgtccctcgagggacatatgttcctgccgatgagagtgctggtgcgcaggagtgcagatctgttgcaggtacctgaggaagcgatccgtgcacagattcagaacctgcatatggatcataaggtcgtcgtgaaaaagacaactgatgagccggaggtctatgcgttttcctattattatgcggagctgaactgcgcaagaatgctgcgggagttgaatgtcctgatggagtcagagcttcttgattcggaggaaaaacgaattgaaacgattctgcagcgtattttaaaggagcagggcctggaactcgatgagctgcaaaagaacgcggttctggaatgcgtgaagcatggcatcatgattctttccggtggtcccggaacaggaaaaacgacaacaattaacacgattatccgttactttgatgaagaaggaatggacattctgctggcagcaccgacgggaagagcagcgaagcggatgacggaagcgactggttatgaggcaaggacgatccaccggatgctggaaattaatggaggcatggaggatggaagccgcgcccgttttgaaagaaacggggagaatccgttagaagcggatgtggtgattattgatgaaatgtcgatggtagatatctatctgttccagtctcttttggaagcggtcagtgtcggtacacggctgattctggtaggggatgtggatcagttaccaagtgtaggtcccggtcaggtactgcaggatctgattgagagtaaaagctttccaaccgtaatgcttaagaaaatttaccggcaggccggggagagcgacattgtcatgaatgcccaccgcattaatatggggcagaagattgcgctcaataacaaaagtaaggacttctttttcctgccgagaaatgatgtgcaggtcatctataagcacatgatccagctgattacggagaagctgccacggtatgtggaagcgcagccttacgatatccaggtcctgacaccgatgcggaagggaagtctgggagtggaaacactcaatgagatcctgcagagatacttaaatccggcagatccgtccaggaaggagcatgcggccggtgaccggattttccgcgagggtgataaggtaatgcagattaagaacaactatcagctggaatgggagatcgtgagtcaatatggcatccggattgacagcggaagcggtgtgtttaacggagatatcggaacgattcgcagaatccgtgaggaatcctcgaccgtacaggtggaatacgatgaacaccgtctggtggaatataccttttcccaattggatgaaattgaacttgcatatgcaattacgatacataagtcacagggaagtgagtacccggcggtactgcttccgctgctttccggaccgaaaatgctgatgaacaggaatctgctgtatacagccgtgacgcgggccagaaaatgtgtgaccattctgggaagtcaggaagtggtagacggcatgattgagaatgaaaaccagtatcaccggtataccggacttggcaggcggatactggagctggaaagtgaggagcgtgtgtggtaa

SEQ ID NO: 449 - DNA, 2592 bp, Unknown
  Unknown gut bacteria
atgaatgagacaatgaatgaaacgaaagcaacgcccatggaaaagctggccacctttattgtggataaacgaaacctgtttttccttctttatatctttgcgctggtattctgtattttttcaacaaattgggttaatgttgaaaatgacattacgaaatatcttccggacagcaccgagacaaggcgcggtcttacagtaatggatgagcagttcgttacctatggaacggcaaaggtcatgatttccaatatttcctatgagcatgcgctggagctgcaggaggagattgaagcagtggatggtgtcacaagtgcagagcttgatcacacggaggatcattatcacgattcaagtgccctgtttgatgtgacttttgatgggacagcaaccgatgatatcagcttacaggccatgaaccggatgaaggaactgcttgcagattatgatgtctattatgatacggaagtaggaagtgattcggcggcggatctggcagcagagatgcaggtcatcgtcgtgattgcggcggttatcattgtgatcgtgctgaccctgacatcacgttcctatgcagaggttccggtattgattatgacctttggtatggcggcgattctgaatatgggaacgaactttttgtgtggaacgatttcctttatttccaattcagttacagtggtgctgcagcttgccctggcaatcgactatgcgattattctgtgccaccgtttttcggatgaacatcagacactggatacgagggaggcctgtattgcggccttaagtaaggctattccggaaatttcggcatcttcccttacaacgatctccggtctgggtgctcttgcattcatgcatttcaaaattggtatggatttgtccatcgttctgattaaagctattatgttaagccttctgtccgtgttcaccctgatgcccggacttcttgtgctgttcagtaaattgattgataaaacaaagcacaaaaatcttattccgaagattaccgcaatcggtaaattcgatgtgtttacgcgattcattgttccacctgtctttctggtgattgtagttgtagcattttatttttccaataattgtccatattgttacagctataccgatctgaccacagccaagcagagcgaaagccaaatcgcttatcagaagatcaagaataccttcggaacaagcaacatggttgccgtgattgtaccggcaggaaattaccagaaggaagaaaaacttctgaagacactggaacagcatgaagaagtaaaatcagccatgggacttggaaatattgaggccatggatggctatgtgctgacggatgcattgaatccaagagaattttcggagcttgccggtgtggaatatgagatcgcaaatctcctttattctgcttatgcagtcaatgaaaaccagtatggcaagatcgtgaacggtattgaaaattaccaggtgccgctgtttgatatgtttatgtttttaaaggatcagatggaggaggataatattaccctggatggggaagtgcaggatacccttgatgatctgtttgaccagttggagaaggcaaagctgcagctaaagaccgatgactattcccgtatggttgtatacttaaatcttccggaggagagtcaggaaacctttgacttcctgaaggtgatgcatcaggatgttgcgaagtactatgatcttgataattcctatattgtaggtaattcgaccagtgacctggatctgtcttcatcctttggaaccgataatatcatcatcagtgtgttatctgcattgttcgttattatcgtcctgctgtttacctttaaatccgcaggacttccggtactgttgattattgtgatccagggcagtatctggatgaacttttccatgccatacttacagaagtctccgttatacttcttaagttacctgattgtgaattccattcagatgggtgcaaatattgactatgcaatcgtaatctcaagtcactattccgatctgaagacgagaatgaaaccgaagcaggcaattgtagctgcattgaacgaggcatttccgactatttttacctcaggaacaattctggcagttgccggtgccctgattcagcagctgacaacgaacccgattattgcatctattggtaactgcttaagccgtggtaccattatttccattgtgcttgtacttgcggtactgccacagattttggttgtcggtgatattattattgaaaaaacaagcttccagcttaagagtaaaatcaatcttacgccacagaactttagcggtcttacccgtgtgaacggtctgatccggggacaggtaaacggtacgcttgagggtaacttttccgggtttgtacgtggtgatatgagtgttacactgattaccggtggagcggagagtgtgagcgatgaagaggatccgggaccggatgcagtagaggtatctgccatagaggaaaagaatccgcccggactgcctcagaaggacgacaggacaaatgatcatgcaaagtccgaagaacaaaataaagaagagaaaggaagtgcggaagatgaagaagtttaa

SEQ ID NO: 450 - DNA, 1749 bp, Unknown
  Unknown gut bacteria
atgacagaagaaattttaagtgccgtaagcagtgaagttttcagcgtctggttcttgattggcgcagcgctggtgttctggatgcaggccggttttgcaatggtggaggctggttttaccagagccaagaataccggtaacatcatcatgaagaatttgatggatttttgtattggtactgtagtatttattttaattggtttcagcctcttacttggtgaggatctggtcggtctcattggtaagccggggtttgatattttcaccagctacgcagactttgactggtccaatttcgtattcaacctggtattctgtgcaacgactgcaactatcgtttccggcgccatggcagaaagaaccaaatttttatcctattgtatttattccgcagtaatttctgcattgatctaccccattgaggcacactggatctggggcggcggctggttatcccggttaggcttccatgattttgcaggctcctgtgccatccacatggttggtggtatttccgcattaatcggtgctgctctcttaggcccccgtatcggtaaatacacaaaggatgaaagcggcaaaatcataaaggtaaatgctttccccggtcacaacattacaatcggtgcactcggtgtattcattctctggctcggctggtatcgctttaacggggcggcagccacaagcgtagagcagctcggatccatttttgtaacaacgaccattgctcctgcaattgctaccgttgtatgtatgatttttacctggattaagtatggcaagcctgatgtttccatgtgtctgaatgcatcccttgcaggtcttgttgcaataactgccggctgtgatgtaaccgatgctttcggtgccattgttatcggtgccgtatccggtgttttagttgtattcggtgtctggctgttagattacaagctccgcgttgatgatccggttggtgccgtagcagttcactgcttaaacggtatctggggtaccctggcagttggtttatttgcaaccacctctgctcccggaaatgattcatataccggtttattctatggtggcggcttccatctgtttggcttacagcttcttggctttgtcagtgttgctgcctggaccgctgttaccattacgattaccttcttaattattaaagcaaccgttggattaagagttacggaagaagaagaaattgttggtctggatcctactgagcatggtcttgcatctgcttattccggattcagcatcatggatatttccaacaccatgacgatggaaacaaatgccaacacaagtcttggcagcgattcctacgaagcagcttcacctgctgcaaagaacgcttccgtaaaggttgttaccgctcctgtttcccttgatacaggtattcataagattgtgattattgcaaagctttccagatacgattacttaaagaaagccatgaacgacttaggtgttaccggcatgaccgttacacaggttatgggttgtggtatccagaagggtgccggtgaaatgtaccgaggcgttgaaatggatgcaactttacttcctaaggttaaggtcgaggttgttgtcagcaggattcctgttgaggatgttattgaagctgccaagaaggctctgtacaccggacatatcggcgatggtaagatcttcgtatacaacgttgacaaggttgtaaagattcgtaccggcgaagaagattacgatgcacttcaggatgttgagtaa

SEQ ID NO: 451 - DNA, 1101 bp, Unknown
  Unknown gut bacteria
atggactttttaggaattctcagcgagacctttgctcgctccggctttgctaatctcagctggcagcagggcgtcatgctgctcatttcctttgtgctgctgtactgcgccattgtaaagggttttgagccgctgctgctgctgcccatcgcttttggtatgatgctggccaacctgcctgataccggtattatgaccgatgccaccgaagccgccacccttgcggtaaagaatgcttcggccgcactggccgccgatcctaccaacccaacgcttgtctcggaactggctgctgcccagtcccagctggccaatgttcactggtatgattccggcgttctgcgtatcatccaccgcggcgttaagtcttccatcttcccctgcctcatcttcatgggcgtaggcgcgatgaccgactttggcccgctgctggccaaccccatctccctgctgctcggcgctgccgctcagctgggtatctacattgccttcatcttcgccaatgccatcaccgtcggcggcgagcacctgttcacggctgctcaggctgcttccatcggtatcatcggcggcgcggatggtcctaccgctatctttgttaccaataagctggctcccgagctgctctctgccatcgcagtagctgcctactcctacatggctctgatcccgctcatccagccccccatcatgaaggctcttaccaccaagaaagagcgcgtcatcaagatgggccagctgcgcaaggtttccaaggcggagaaggtcatcttccccattgttgtttcctgcgttgttatcatgctcatccccgataccgcttctctgatcggctgcctgatgctgggtaacctgttccgtgaggccggctgcgttgagcgtctttccgacaccgcgcagaacgctctctgcaacatcgttaccatcatgctgggtaccaccgttggcgctaccgccgatggtcagaccttcctttccctgcagaccattggtatcgtcgtaatgggtctggctgccttctgcttctccaccgctggtggtgtactgctgggcaagctgctgtgcctgctcaccggcggcaagatcaatcctctgatcggt

SEQ ID NO: 452 - DNA, 1281 bp, Unknown
  Unknown gut bacteria
atggccataaataccgacaatgcgctgcggcgcagcgtgatctatgaagtatatgtacgcagccacacaccggaggggacctttaaggcgatagagcctgacctggaccggatagcggcactgggggtggatattgtatggttcatgcccattcaccctattggggggctgaacaaaaaaggaagcctgggctgcccctatgccaaccgggactatcgcaccgtgaacccggaatacggcacactggaggattttctgcacctggtggaggagatccataagcggggtatgaagtgcatcattgatgtggtgtataaccacacctcgcccgattccacactggtggcggagcatccggactacttctactataagccggatggctgccgcggcaacaaggtgggcgactggaccgatgtggtggacctgaactatgaaaaccgcgcgctgtggcagtatcagattgattcgctgtgctactgggcacaatatgtggatggcttccgttgcgatgtagccagcaccgtgccggtggccttttggcaggaagcccgccgggctgtggagcagatccggccgggggccatctggctgggagaaagcgtacacctggcgcacattcaggccttccgggagatgggcttctatgccgcgaccgatacggaattgttcacggctttcgatatcctatacccctacgacctgtggccgctgtatgaggatgtaactgagggacggctgccgctttcccggtggtttgatgccgtggattaccaggaggtgagctttgagagcggatacaataagctgcgctgcctggaaaaccatgataccagccgcgcagcggatcgcttcccggagcggaagaagctgctggcctggacagcgctgaattactttatgaagggtaccatactactgtacgctgggcaggaggtatgtgaaaagcacacgccctccctctttgagaaggagccggtggactggaacagcggagaggatatcagcggttatctggccaagctcgcggccatcaagaagaagctgcccaccgatgagctgttccgcattggggcggatgacacacagggcatagtgaccgccagctatatcgggccagccacacgggctgtgggcggcttcccgctggagggcaacggcggcaccgtggccgtacccctgccggatggcgcctacaccgatgccctaagtggcaaagcagtaacagtagccgatggcatgctgaccatcggggaagaagcggtcattctattgggataa

SEQ ID NO: 453 - DNA, 1131 bp, Unknown
  Unknown gut bacteria
atgtatcaactgaaactgacagaaggagcagcccggcggggagcgcttaccaccgtacatggtacggtgcagacgccggcctttatgaatgtggcgacggcggctgccatcaagggcggtatttccgcttatgacctgaaggagctgaagtgccaggtggtgctgtgcaatacctatcacctgcatctgcgacctggtgataatgtggtgcgtcagctgggagggctgcacaggtttaccggttggcagggacccatcctgaccgacagcggcgggttccaggtgttttcgcttgcatcgctacggcatatcgaggaaaagggagtgacctttgcctcccatatcgatggacatcgtatttttatgggaccagaggagagcatgcagatccagtcgcatttgggttctaccattgcaatggcatttgatgaatgtatcgaaaacccatcgccccgggattatgtgcagaaatcggtagcacggacgacccgatggttggagcgctgccaaaaggaaatggcccggctgaacagcctggaggatactgtgaatccacaccagctactgtttggcatcaaccagggcagcacctatgaggatattcgggtgcagcacatgaaggatattgctgcgatgggactggacggctatgccatcggtggcctggcagtgggcgagagcgccgaagagatgtatcatatcattgaggctgtggagccctttgccccgaaggataagatccgttacctaatgggtgttggtacacctgtgaatatcttggaatcggtacaccggggtgtagatctttttgactgtgtgatgccaagccgcaatgcccgacatggccatctttttacctgggaagggatcattaatatccaaaatgctaagtatgtaacggatgaccgcccggtggatgccctttgcgggtgcccactgtgccgtaaccatacccgcgcctacttgcgccacctgatgcgtgccaatgaaatgcttggtatgcggctggctgtgatgcataacctgtggttctataatacactgatggaaaagataaggttagcactggatgagggacggtttgagagcttttaccgcgagcatgtgccaatactgggtaatagaatataa

SEQ ID NO: 454 - DNA, 1251 bp, Unknown
  Unknown gut bacteria
atgaaaaaagcatttgcactggcactggctgtgctgatggtgtgcaccatggcgtttgcggtttccaccgggaaccagactggctaccccggcggcacctccgcggccgataacacctacatgcagtccatcgtgcccggacagtctatcgtattcacccaggaagagctgggcctgactgaccagaactggggcaagaccaacggcagctttgaccccaagaagaataccgttaccctgaccgtccccgtaggcagcgatctcatcgccagccagggctgggtacggaccgatgagaccacctacaagtatgtggtgaccaccaaggccaatgagacctctgtactggataacaatgccgatatcatcatttccggcgtaaaggtcaccgtttacggtgtttccgctccggcgctgaatgtgagctatgtgaaggatgtaaacggcgtgaccaactatacctatgttaccagctttgatgagctggcgagcttctccgccaaggagccgggcgacaacttctgccccatgaacgccaagagcgaggaccacatcctggccatgtgcttcgactacggccgcaaggctgatgaggccgacgccgtatttggcgcgggcggactgaatgtcgccaacatggataagaccggtaaaatcctgtatactgtaaaggccgccaccgtagatggccagtacatcaccagcggcagctggaaccagtccgtcaccgaggataacggcggcaaggtcactgtttctgtcccgctgaaggccggcgacaagatctactttggcaccgtgaattacaccaccctttcccccgccgcccagaaggcgctgaacgacaacctaaccaaggccggcgcttccatcaaggcttcctacggctacggcgctgagcaggtcatcatcaaccgcccggcggagatcaccgtggacggcatggccaagggctacaatgcctacatggtccgcgaggacggctccctgcagagcctgagcgccaagtttaatgagggcactggtctgctgagctttggcggcaccctgaccggcccggtcatcgtgaccgataaggcactgaccgcgaccaccaccagcaatagcggcaacagcggctccaatggctccaacagcaatggcggcagccagaatcctgccaccggtgccaatgacatcgtaggcgtagcggccgctctggggggtatcaccggcgtttccgccgccgccatttccctgaagaaggactaa

SEQ ID NO: 455 - DNA, 1551 bp, Unknown
  Unknown gut bacteria
atgttaggttctcaagtagtcattctgataaccatagcggtatacctgattgccatggtgctcatcggtgtatactttggcaaaaagggcagcggcaacagcagcgatgacttttacctgggcggccgcaagatgggcccgctggtgacggccatgagcgctgaggccagcgatatgagcagctacctgctgatgggtctgccgggactggcatacctgtgcggcctgccggaggtttcctggacctgcatcgggctggcgataggcacctacctcaactggcttatcgtagcgcggcggctgcggcgctattcggcccgcattggggccatcaccgtgccggactttttctcccgccggtatggcgataagaaaaacctgctttccgccattgcggcggtggtaatcctggttttctttatcccctataccgcttccggctttaaggccatcggtacgctgttcaacagcctgtttggggtggattaccataccgcgatgatcgtgggcgctattgtagtcattggctatacagtgctgggcggttttatggcggtttccttcaccgacctgatccagtccatctttatgaccattgcgctgatcgttgtagtggtgtttggcatccaacaggcgggcggtgtggataccgtcattgccaatgccgaggcgctgcccggctacttgagcatgaccaagggctatgatgtgactaccggcggcgcggcttccttcggggggctcagcattatctccacgctggcgtggggtctgggctactttggtatgcctcacatcctgctgcgctttatggctatcaaggaggaaaagaagcttaacgattcccgtcggatcgcgaccgtctgggtggtgatctcgatgttcattgcggtggctattggtgtgattggttatagcgtttcggtggcgggcaaggtgcccttcctgaccaacagcagcgatgcagagacgatcatcattaagctggcggacctgatgagtcagcacggtaccctgctggccattgtggcgggcgtaatcctttccggtattctggcggcgacgatgtccaccgcggacagccagctgctgacagcggcttccagcgtttcgcaggatctttctcagaatgtgtttggcatcaagctgagcagcaagaccgagatgatcgtggcacgggcgacagtactggttattgcggccatcggtattactctggcgtgggaccccaatagctcggtattccgggtggtttcctttgcctgggcaggctttggcgcggcttttggcccggtggtgctgttctcgctgttctggaagcgcagcaacaagtggggcgccctggccggtatggttgccggcggcgtgatggtatttgtgtggaagtacctgattgccccgatgggcggcgcatgggccatctacgagctgctgccggcctttgtggtggcgtgcattgccctagtggtggtttctctgctgaccgaggccccggaaaaggaaattgtagagacctacgaaagcgtgtgtgccaagaaggtaaaggcgtaa

SEQ ID NO: 456 - DNA, 1146 bp, Unknown
  Unknown gut bacteria
atgtcaaagctgaataaaccgcaggccactgcccgtcccgcccgggaacccttcctctatgtcacccgtcgggatcagatcccgctgggccgggccattctcatccgggtcatcgccatcctgctggcgctcatcgtgtgcagtgtggtcacccgtgtcctcaccggggatgaccccctctccatctacgccaccatcctccacggcgcgttcggcaccggccgtatgctggtcaccctgcatgatatcgccattctgctgtgcatctcgctggcggtcaccccggccttccgcatgcgcttctggaataccggcgccgaaggccaggtgctcatcggctgcctttccaccgcggtatgcatgctggtgctgggcggcaaagtgcccgatggtctgctcatcctcatcatggcagtttccgccatcctctccggcgttatctggggcattatccccgccttctttaaggcccattggaacaccaatgagaccctcttcacccttatgatgaactatgttgccatccagctggtggaatacttcctcaaggtggcggataagaccggctccaatgttgtcggccccgatctgctcacccacggctggttcccggaaattttcggcgtcaagtatctgctcaatatccttatcgtcgccatcgtctgcatcgccatgcacatctacctgcggtacagcaagcacggctatgagatcgccgttgtgggcgaaagcgaaaataccgcccattacatcggcatcgatgtcaaaaaggtcatcatccgcaccatggctctttccggcgccatctgcggcctggccggtctgctgctggtcggcggctcctcccactccatcgattccaacctcgtggatggccgcggcttcaccgccatcatggtttcctggctcgccaagttcgatcccttcaccatgatccttaccacgctgctgctggtgttcctggcccgcggcgccgatgaagtcacctccaagtttggcctcaacagcgatttttccgagatccttaccggcatcatcttgttcttcatcatcggctgtgagttctttatcaattaccaggtccatttcaatcatcacaaaaaagaaaaaacggcgtcggccgccgtcagcggggaggggaactga

SEQ ID NO: 457 - DNA, 1200 bp, Unknown
  Unknown gut bacteria
atgaacaagaaaatttcgcttggcgcggccatcgcctatatggccatcgtagcggctgtggccttttcccttaccatgatctactcgatgaacctgttcaatgtgaagatgacaggcatcaccgaacgggaaaaaatgtacagctctctgcatgaggtagacctgtatgtgcgggaaaattactacggctccatcaatgaggaagcgctgcaggaggccattgcccgcgggtatatcgatggcctggaggacagcaatgcccgctacttcaccgctgcggaatatgaggcctatacccaatccggcagcggcaaatatgtaggcgtgggtctggtgaccgagatggattcctccggctatctgctggttcgggaggtttatcccgattctccggcgcagatggcgggcatcaaggtgggggcgcttattaccaatgtaaacggcacccgcgtgaccgaaaataacaatgaaagcatggcgggccgcctgcgtggcgaagccggcaccaaggtgactctgaccatccaacaggatagccaggagaacaactacgagctgaccctgcgcgccattgaggtgcccacagtaaaaacgaccatggtaagtgaagataccgcctatatcagctttaccgagtggagcggtaccactgccgaccagttcatcgcccagctgaatgccttgaaggcccaggaagtaaagggcattctgctggatgtacgcggcgttaccagcaatgagctttcctatgcggtccggctgctggatccgctgctgcccagcggtactgtggcctattcccgcgctaaggacggcaacctgaccgccgtggcggaatccgatgcgaacagctgggatattccgctggtggtgctggccgatgagaccaccggtggcaccacggagctctttgtgatggcgctgcaggactttggccggtccaaggtggtaggcgcccgcaccgccggcaacggcgatatcaccgagatcttcaagctttcgggtggttcggccatccaggtcaccacggcgcagtatgccgggcccaagcaaaagagctttggtgataccggtgtgggccccgactatgaagtggaactggcagccagcgagagtaaccggggtgacatcctgggcaacgctgaactggatgctccctataagaaggcactggaagtgctggcagcggccatccggtaa

SEQ ID NO: 458 - DNA, 3576 bp, Unknown
  Unknown gut bacteria
atgaagctgaaagcggtggaaatgcaggggttcaagtccttccccgaccgcacaaagctgaccttcgatgacgggatcacggtcattgtggggccaaacggcagcggcaaaagcaatatcagcgacgccatcaagtgggtgttcggcgagcaatcagtgaagagcctgcgcggcgccaagatggaggatgtgattttcggcgggtccatcagccgcaagccgaccggttttgcatgggtgagcctgtttattgataataccgaccgcagcattgatatcgacagcgatgaggtggtcatcacccggcggctgtaccgcagcggagaaagcgaataccgcatcaataataacccggtgcgcctgcgggatatcaacgagatgtttatggatacaggccttggacgggatggctattcggtcattgagcagggcaagatcgcggagatcgtgagcgcgaaaagcacccagcggcgggagatttttgaggaagccgccgggatctcccggttccgctaccgcaagaccgaagcggagcgcaagctgcagcaggccgaggataacctggtgcgcctgcgggatatcatgcaggagctggaggaccgggtaggccccctgaaggcccagagcgaaaaggccaagcagtatgtggtgctggccggggaaaagaagtcgctggagatcagcctgtggctggagcagctggccaaactgggccggcagctggcggagctggaggacaagaccctgctggctgctaatgaccgcaccaccgcccaaaggcggctggatgagatcgagcgggagctggcggagatccagcacaaaacacaggacgcgaacctgtatattgagcataagcgcgagcgcatcaaggagtttgaggacgcgatctccaacgctaaggtggaggcggcggtcaagcagaataccattgatcataataacgataccatcgccgagctggaaaaggagctggagcgcagcgagctttccgccggggagctggaggaaaagctgactgccctgcgggaggattaccaaaaccgcctggacgaggcccaaaagacccgcgaagccctggagggggggcaaaaggcgctggaggctcagcggcaggaggagcaccgcctggcggcggagcagagcgcgctggcgctgcaaaaggaggagctgcaggggcagatccaccgggcggagctttcggccgagacggcaggaacgctggccgaggaaacggtgacccgcctggaagcgctgcgcggacaggccaaggacaaggatgaaaatctgagccgcctgcgggaagaactggccggacataaggcctttgccgaagagctgcaggagcggctgcaaagcctgcagaacagcaagaacggctacctgtataagctgaaaagccgcagtgataagcaggccgaggcggagagccgccagcgcaacagcgaaaagctggcaggcgagaagctgcagcgtgcgcaggtgctctccgacctggaaaagaactacgagagctttaataacagcgttaagtttgtgatgaagcaggccggcgcgggtgccctgcggggcatcgtgggtccggtatccagcctgatcaagaccgaaaaccgctattccaccgcggtggagatcgcgctgggcgcggcgatccagaatatcgtggcgcaggatgagggcgcggccaagcgagccatcgcgctgctgaaggagcggggcgccggacgggcgactttcctgccgctgaccaatctcaaggcgaacccggtaagtgaaagcgacctggccgcccgaggcggctatgtgggcctggccagcgagctggtgcagtgcgatgaccgctaccgtgtggtgatggattccctgctgggacgcaccattgtggcggaggacattgacgccgcgactgccatcgccaaggcgtacagctaccgctaccgggtggtgacgctggatggccaggtggtgaatgccggcggcagtcttaccggcggttccgtcaataagaacgcgtccattctttcccgccggggagagatagacgccctgaccgcagaggcgaagaaatacgcaaagcaggcggaggagctggaggcccagctgaccgagctgcgccgggagaccgataccattcaggcgacggtggacggcatagaggccgaggaaaagaccgcgcgggaggatctcatttccgcccagacgctggtggaccgcctggccgccaatgtggaggaagccgagcgcctgaacgagcaggcgctgcgggaatatgatgacctgaccgcccgtatggagcagctgcgccagcagaagatctccggcggcgagctggtgaagaaactgaccgaagaggtggagcggctgaccaggctttcggccgagggtatggctgcccacgaaatgttgactgcggccatcaccgaagctgccgaaaaggtgactgccctgcagatggaggacatcgcccggcagaaggactgcgaagccgtccagatggccattgagcagatggagggccagcaaagcggcagtgaggccgccctggccgccttgcgggaacgacaggagcagctgaaaaaggataatgaggccatccgggaggagatcgagcagatcaccgccggggcgcaaagcggcagcagcgagatcgaggagctgcgcagggatatcaaggacgccgatgcacagcgtgaccagctggaaatgcgccgcaatatcctctccaaggaaaacagcgatgtcatctcccgccgggaggcggccgccagcgagctgctgcgcctgcaggaaaagagcgaaggtatgcaggagcagcagaacagcatcagcgccaagatgtgggaggaatatgagctgacccgcagcgaagcggccgaacaggccatcccgctggaggatgtgggggcggcgcaaaagcgcctttccgagctgcgcagcaagatacgggcgctgggtgccgtgaatgtggcagccattgaggaatacgaggaagtgagcggccggtaccgctttatgaaggagcagatagacgacgccgaaaatgccaagaaggagctgacacggctcatcaccgagctttcggcccagatgagcgcgatctttaccgagcgttttgcgggcatcaaccgctactttggcgagatcttccgggagctctttggcggcggacatgccgagctgcgcctgaccgatgccaccgatccgctggagacgggtatcgagatcatcgtgcagccgcccggcaagatcatcaagaatctttccgccctttccggcggcgagcaggcctttgtggccatctgcatctactttgccatcctgcgggtcaatcccgcaccgttcgttctcatcgatgagatagaggcggcactggacgatgtgaatgtcggcaagtttgccgcctacctgcaccgcatgaccgatcatacccagtttatttccatcacccaccgccgcggcaccatggaacagggcgatgtgctgtacggcgtcaccatggaggaggagggcatcagtaagctgctgcggctggatgtggccgagatggaaaagaaatttggcaagagcctgaactaa

SEQ ID NO: 459 - DNA, 1014 bp, Unknown
  Unknown gut bacteria
atgagtaaagtgttcattcctgcaggttaccacagctgcctttccctgtacgatacccaaaaggccatcagcctgatcaagcgggtgtttgaggatactctctgcggaaatctgaatctcagccgggtatcggccccgctgtttgtggaggcttccaccggcttgaatgatgacctaaatggagtggagcgccccgtttcctttgatgtgccggatatcggccgggatgcacaggtggtgcactccctagccaagtggaagcgcctggcgctgcaccgctacggcttccgtcccggcaagggcctttataccgatatgaatgccatccggcgggatgaaacgctggataacattcactccatctatgtggaccagtgggattgggaaaaggttatcacgccagaggagcgtaatgtggcctatctgaaggctacggtacagagtattgtggatgcgatcgtttccactcagcgcaccctgcgggccatatatccgcagctgaatacggttccggacctggtgccggaggtcaccttcatcaccacacaggagctggaagaccgttacccggagctgacccctaaggagcgggaaaatgccattgcgagggaatgcggcactgtattcctaatgcagattggcggtaagctgcgcagcggccagccccatgatggccgtgccccagactacgatgactggaccctaaatggtgatctgctggtttataaccgagtgctgggaacagcattcgagctgtcctccatgggcatccgtgtagatcctgcggcactggaccgccagctgaccctttccggctgtgaaaaccgccgtacattgcccttccaccggatgctgctggccggaaagctgccgctgaccattggtggcggtattggccaatcaagactgtgcatgttcctgatggggaccgcccatatcggtgaagtgcagtcttcggtgtgggatgacgataccatgcagaaatgcgaagccgcgggtattatcctgctgtaa

SEQ ID NO: 460 - DNA, 939 bp, Unknown
  Unknown gut bacteria
atgcacattacccctatgaaccccaaagcaaatccccctactgtttccgcttcccagtcccattcccgtctgcttgcccacctgatggcgctgatggtttccgccatttgggccaccacctttgtttgcagcaaggagctccttgcctattacagcccggcgcaggtgatgttcatgcgctttgccattgcctactttgtgctgtggctgctgcgccctcggccgctgccgtggcagggcaggggagagctcaccttcctgctattgggcattttgggcggcacgctctatttctttaccgaaaacaccgccctgaagcacacctttgccgccaatgtcagcatcattgtggcgatggcgcccatccttacctccatcctggcgcacttttttaccagggatgaaaagctccacaccaccgtttggatcggctttgccgtggccatgagtggtgtggtgctggtggtgctcaacggtgcgctggtgctcaagctcagcccggtaggcgatctgctggcctttttggcggcagccagctgggcctgctattcagtccttatcaagcggctttccggccgggtggacagcacgctgctggcccgccgggtcatcctgtacggcgcggttacctcggtgccgctgctggctgcccgcggggagctttcaatcgactttaccccgctggcacagccaaagccgctgttctgcatcctgttcttggcggtgctgggcagtgccgtctgctttgccgtgtggaatgttgtcatcgaccggctgggagtcgttcacgccaataactatatctatctccagccctttatcactatagtggcctcccatttcctgctgggggaacccatgagctggacggccattgtgggggcgctgcttatcattggcggcgttatcatctccggccggcaaaaacggccgcagtaa

SEQ ID NO: 461 - DNA, 1431 bp, Unknown
  Unknown gut bacteria
atgagaaagtttgataccaaggtgcaatacctgaaatacaaggtgctgcgggaggtggcccggcaggcctggaatgataccctgctggataatgtcatgtccattccgcgggagctggcgccccgcaatgccgagaccatctactgctgtgtctacaaggagcgtgccatcctgagcgaacgggtacgcatggccatgggcggcaataagcagaaccccaatgtcatcgaggtcattgatatcgcctgcgatgagtgtcccatgggcggctatgaggtcaccaattcctgtcgcggctgcctagcccgccggtgcgaggatgcctgccccaagggagccatcacattccacaaccatgtggctcacatcgataaggccaagtgtgtggactgcggtgcctgtgcccgggtctgcccttattccgccattgtagaccgcaagcgtccctgcgagaacgcctgcaagatcaaggccatcaccatgaatgagaataaggccgccgctattgataacaatacctgcatttcctgcggtgcctgcgtctatcagtgcccctttggcgccatcaccgataaatcctatatcctcaatgttattgatatgataaaaaagagcggggacaatgagaaataccatgtctatgcggtcattgccccctccatctccagccaattcacctacgccaagctggggcaggttgtcaccgggctgcatcggttggggttttactcggtggcggaggccgccctgggcgccgatatggtggccgatgccgaaagccgcgaactggtggaaaagggctttctgaccagctcctgctgccccggatttgtcagctatattgaaaaggccttcccggaattgaaaccttatatctctcacaatctctcccccatggccaccattgcccgctatctgaaggagcatgatgcaacggccaaggttgtctttatcggtccctgcacggccaaaaagggggaggccgccaagcaggaagtccgcccctatgtggatgccgcaatgacctttgaggagttacaggcgctttttgacagccgggaaatcgatatcactgcgctggaggaaggaatgctggatgaggcctcctacttcggacgcatttttgcccgctgcggcggtttggcggaagcggtggcccaagggatcaaggagcatggccacaccgatttcgagctgaaagcaacctcctgtgacggtattgaacagtgccgcattgccctgttcaagaagagtaaaaagctgctggatgccaatttcattgaaggaatggcctgcaccggtgggtgcatcggtggggcaggatgcctgacccacggcccccgcagccgtgccgaggtagataaatacgggatggaagccaacgataaaaccattaccgaggcgttggcagctctggagcctaagccctaa

SEQ ID NO: 462 - DNA, 951 bp, Unknown
  Unknown gut bacteria
gtgcggctgaaaccgaatacgctgattgtagtggcggggcccacggcctccggcaaaacagcgctggccatccaaatcgcgaaagcggtggatggagagatcgtttccgccgatagtatgcagatctaccggggagtggacattgccacggcaaagcccaccccggaggagctggcggcggtgcctcaccaccttatcggctttttgccgatggatcgggctttttcggtggcggattacgcggagttggcccgcaaggagatcaatgatattctaagccggggcaaggtgccggtgctgtgcggcggtacggggctttacatcaaggccattgtggacaatgtgcagtacagcgaggcaatcaccggcgatgaagcgctgcgggagcggctgcggcagctggcggagcgggagggcaatgatgtcctgtggcggcggctggaagcaatggaccccgaaacggccaagcgtatccaccccaataatgtgggccgggtcattcgggccattgaggtgatgacggtcagcggaaagtccatccgggaacacgaagccgaaagcctgcgggagccatgtccctatcatgtcattgagctggggctgcgctatcacgaccgggaaacgctgtatggacgcattaaccggcgggtggataaaatggtggagatggggctgactgaggaggtaaaagctgcccgggaacagggcctgaccgctaccgccgcgcaggccatcggctggaaggagctgtatagctggctggacggcaaagaaacccaggaggaagcgctggaaaagctgaagcaaagtacccgccgctacgctaagcgtcagctgacctggtttgggacggatcagcggatgcgctggatcgagctggacacgctggccgcgggggaaacgccgctggataaggcaatggagatactggaaaaggagggaatggcatga

SEQ ID NO: 463 - DNA, 768 bp, Unknown
  Unknown gut bacteria
atggggaaaatcatcgcgatcatcaaccaaaagggcggcgtgggaaaaaccactacggcggtcaatctttcggcggcgctggggcagctgggctgccgtgtgctgctggcggacctggacccgcaggggaacgccaccagcggcgttgggatcaataagcgggaagtgaaggtttccagctaccatgtgctgatggaggagagcggcgcggccgaggccatcctgcccacacggttcaaggggctttccatcctgcccagcaatatagacctggccggcgccgagatagagctggtggaaaaggaaaaccgggccaaatctctgcgggcggcgctgctgcgggtaaaggaggactatgactttatctttattgactgtccgccttctttggggcttatcaccgtaaatgccctgaccgccagcgattctatcctcattcccatccagtgtgaatactatgccctggagggtctgacccagctgatgcagacggtgcgtaccgtcaagcggctggataatagcgccattgccgtggagggcgtgctgctgacgatgtatgacagccgcctgaacctgaccaatcaggtggtgggggagatcaagaagtactttgcggataaggtgttccgctccacggtgccgagaagtgtgcgtatctccgaagcccccagctatggcgagccgatctgctactacgataaggcaaaccgcggcacgctggcctaccagcgggtagcggaggagctgctggagcgcaaccggaagtaa

SEQ ID NO: 464 - DNA, 564 bp, Unknown
  Unknown gut bacteria
aagcgcatggggagaccatcactggcggagcaacgccgtgtggaaatatgccgggcgctgcaaagctgtgtcatccgcaacggatcgtatgagatgacctcggtgaaggacattgcgcaggaggcgggtatggccgccggaatgctgcatcactattttgagagcaaggatgatattctgctggtgacggcggaaatggtgctgctggagctgcagaaccacctgagcgacctgctgcgcatcaaggatgccgcggagagagaaaagatgctggaggagctgctgggcgataacgagcagaaccggttttacatcatgctgcaggccatggctctggccatgccggcggtgaatgagctgctgcttggcaagcaggaggagatgcgggatatcctggcagaacggctggaattccgcgggagtgacccggaaaaggccaaagccgatgcggatcggatgaccttcctgctgtgcagcgcgctgaccacccccaagggcgtacagagcgccgccgcgcggcagatgacagcggatatcctgcaggagcttttcccattgggctaa

SEQ ID NO: 465 - DNA, 1404 bp, Unknown
  Unknown gut bacteria
atggaacctaaaagagcccaatggggcagcaagatcggctttattctggcggcagccggttcggccgtcggcctcggaaacatctggaagttccccggcaaggcttacgaaggcggcggcggagcgtacatcctcatctaccttgctatcgtactcctcattggcatcccggtcatgctctcggaactgaccatcggccgcggcgcgcaggccaatgccatcgatagctacggcaagctgggccaccctggctacaagtgggtcggctggttcggcgttatcgtggcgtttatcattaccagctactactgccatgtaggcggctgggtgctgagctatgtggccagctacgccaccgagcccaccaaggtttacgccgatccgctgggatatttctatgcgctgctgggctacaatgccgtcaccggggaaacatggttcccactgactgcagttatcttcgcgggtatctttatgggcattacctgcttcatcatcgtcaagggcgtggagtccggcattgagcgctttaataagatcggtatgccggcgctgtttgtcatcctcattattctgcttatccgggcgcttaccatgcccggcgccggggaaggcctgcaatatatgctgattccggattggagcaaagtcaccttcagcaccgtgctttcggccctggggcaggcgttcttctcactcagccttggtatggctattatggttacctacggctcctatgttaaaaaggaagaaaacctcgccaaaaacgccgctatcatctgtggtatggataccctggtagccctgattgccggctttatcattgttcccgccgtatttgctaccctcggcgcagaaggcgttggcaagggcgcaggctttgcgttctcttcgctggccggtgtgttccagcagatgcccggcggtcagttcttcggcatcctgttctacatgctgctgctgttcgcggcgctcacctcctgcatttccctagtggagggcgttgttgccttcgctactgagcgctttggatggaaacgcacccccacgaccatcattctgtgcgtggtgatgttcctccttggtaccatttatacctgctctcaggccgcctttgatatcaagggtatctggttcgacttcaagaacggtcttaccacccccatcttcggcgactttatggagttcctcaccgaccgtctgatgattcctgtgtgcgcactaggttcctgcctgtttgtcggttgggcctggaagccccaaaacgccatccgcgagatcgagctggacggcaagcccttccgtctgaagaaggcatacagcttcctggtgaagtatctggctcccatcagcatcattatcatcatcgtggccagctttgccaccggcactaccctcagctaa

SEQ ID NO: 466 - DNA, 1032 bp, Unknown
  Unknown gut bacteria
atggagctggatcccagaaaaagcaggatcctcacctgcgtggtggaaagctacatccgcaccggcgagcccatcggctccaagatgatcgccgccatgctggaggagactgtctcctccgctaccgtccgcaatgacctggcctacctcagcgagcagggctacatcgagcagccccatacctccgccggacgcatccccactcaccgcggtttgcgctactacctcgatcacctgatgaagccgcagccgctggaggacgccgcccgcggcgagattgacgccctgttcaattactgcgaccccgaccccgaccgcgtgctggaaggcgccacccggatgctggccaaggaaaccggctgctttgccatttccaccaccatctcccgccagagcctctttgtcaagcgcattgagatcattccggccacggcccacaccgtcgtcatcctgctgctgtgcagcaatggcatggtgaaaaacaaggtctgccgggtcaatttcaatctgacccccaatgtggtggacttcttccagagcttcgccaatggccgtctggccgggcgcagcctcaatgagatcaccgcccagtacatcaattcgatggcctttaccctgggtgagcacaccgatatctttgcgccgcttttggccgctatttacgagctgtgccgggaagcctgcgaaggtgccctgtaccgcagcggcacggggaatctgctggaacatccagagctgagaaatgtggccgaccggctgtaccgcctcctcgattcccgcgaggaaatgctgcggatcatcggcagccgggaaaatgacctgtttgtcagcgtggggcgggaaaatgcccgccccgaaatggagaattcctccatgatcgttgcccgttaccgcatcggtgaggattccatcggcgccctggggctggttggtcccgtccgcatggattacgcccggctcatcccccatgtggagtactttgccgggatgctgagccggatgctgagcgatacactgaataacggtctgtaa

SEQ ID NO: 467 - DNA, 870 bp, Unknown
  Unknown gut bacteria
atgaaccgaactgaccgtcctgcccgctgtgccgctgtgcacgatctttccggcctgggccgctgctccctttccgttattctgccggccatgtcggtaatgggggtgcaggtgtgcccgctgccgactgcggtattatccacccacaccgggggctttggcaccccggcccgtcgcgacctaaccgactacctgaccgaagcgctggcgcattaccgtacactgggtctgcccatggagtgcgtctacaccggctatttgggctcggtggcacaggttgcgctgtgccaggggctctttgcggaatggcccgcggccatgaaggtggtggaccccgtgatgggcgaccacggcaagctgtaccacggctttacgccggaactggtacagggtatccgggagctggccacccatgccgatgttatcacccccaacctgaccgaagcagcactgctgctgggtgaggagccgaatacggcccccctttcgctggggcaggcccgcagcctgctggcacggctttcggccctggggccgggggtagtggttatcaccggggcagcgcttaccaccggggaatatgccaacctgtgttatgatcgggaacgcggcggctactggaaatcggtaagcgaatacctgccggtgcgttatccaggcacgggcgatctgtttgccgcagtgctgacagccggcctgatgcagggcgacagccctgctatggcgatggaccgggcaacgaggtatgtggagatcaccgtaaaaacgacctttggctacggcgccgattctcgcgagggagtaatgctggagcgcacactgggctggctgacccaaaaggagctgccgcgaggctaccgcacgctgtaa

SEQ ID NO: 468 - DNA, 1818 bp, Unknown
  Unknown gut bacteria
atgcccggaggagaaaaagacatggatatttttgcgcttctgcggctggtactgggcctggcctttttcctgttcggtatgaatgtgatgtccagcaacctggaaaagatggcgggcggtaagctggagcagctgctgaaaacaatgacagcgagcccctgggtgagcctgctgctgggcgcggccattaccatagcggtgcagtcttcctcggcggtcacggttatgctggtgggtctggtcaattccgggatcatgaaatttggccagacgctgtatgtcatcttcggcgcgaatatcggcaccacgctgacggcgtggatcctctccctttccggcattcaaagcgggaatgtgtggctgaagatgctgaagcccgaaaatttctcgcccattttagccatcatcggcgtagtgatgatgatggtgtgtaaaaacgataagaaaaagagcattggtacggtgctggtgggctttacagtgctgatgtacggcatggtggtgatgagcgacgcggtaagcccgctggcggagatgccggagttttcggcgatcctagcggggctgcgtaacccgttactgggcctggtggtggccaccctgtttaccgccgtgatccaaagctcggcggcctcggtgggtattctgcaggcgctggcgctgaccggcagcctgacctatgagatggtcattcccatggtgatgggcctgaacattggcacctgcgccacctcgctgatttccagcattgggacaagctacaaggccaagcgggtggcggtcatccacttttccaccaaggtcattggtactgttatctgcctgccgttgtacctgttgatcacctcggtgcttcagcttgattttatccatattgcagtgacaccatggaatattgccatggtgcataccatctataacctggctattaccgccattttgatgccatttaccaagtacctggtgaagctgggcaagtggctggtgaaggccaaagacgaaacggcacctaaggactccatgcagtacgcgcctgacctgctgctgctccgctccccttcggtggcgctgcaggagtgtgaccactataccttccggatggccgggacggcaagggattcgctggaacgggcgatctcgctcatcggcgcctacaatgagcaggacgccgaggtggtactgaagcaggaggacacgctggatctgtatgaggaccggctggatacctacctggtgtacctttcggcgcaggcgctttcccagcaggacagccgccgcgtggggaaaatgcagcacgccatcggggactttgagcggctgggcgaccacgccgtaaacctggtaaaggccggtaaggagttggagatcaaatcgctgtttttctcggaggaggcccggcgggagttgggggtgctttccgctgcggtgcgggagattttgcagttgacaaccgattgctatatcaataccgaccatgagatggcccaccatgtggagccgttggagcaggtcattgacgcactgaccaaggagatcaagcagaatcatctggcgcgcctgcaggcgggccgctgttccatcgagctgggatttatcctaaccgacctgctgactgactacgagcggatttccgaccactgctccaatattgcggtggcggtcatcgagctgcagcacgacgcgctggactcccaccgctacttgaacgaaatgaagcgtgacagcgatgcgttccgggagatgtatgtgaaattcagggagaaatatacactgccggaatcggcctatattgccagacaggcggcggaataccgctga

SEQ ID NO: 469 - DNA, 1179 bp, Unknown
  Unknown gut bacteria
atgatcgatctgtttgaaaaatgccgcaaaccgtccctggccagcgagctcaaggaaaaaggcatctacccctacttccacgcgctggaaagccgccaggccccggaggtcatcatggagggccgccgccgcatcatgctgggctccaataactatctgggtcttaccacctgcccggaggtcatcgaagccgggatcaaagcgtttgagcagtacggcaccggctgctccggctcccgtttcctcaatggtacgctggaaatgcatttggagctggaagcggagctcgccaaattcctgcacaaggaggccgtcgtcaccttctctaccggcttccagtccaatctgggcatcatcagtgccattgtcggccggggcgatgttgtcatctgcgataaggaaaaccatgccagcatctacgatggctgcaaattgagctacggcaagatgctgcgctttgaccacgccgatatggaggatctggagcgccagctgcaaaaggtgccgcaaaacgccggctgccttatcgtcaccgatggtgtgttcagcatgggcggcgatattgccaagctgccggaaattgtacggctggccaagcagtacggcgcccgtgtcatggtggatgacgcccacggccttggcgttctgggcgaaggcggccggggcacggccagccactttggcctggaagatgaagtagatatctacatgggcaccttcagcaagtcgctggccagcctggggggctacatggcctcctcccatgaggtcgccgaatatgtccgccatgcttcccggccgttcatcttctcggcttccattacaccggcttcctgcgccaccgctttagcggcgctgcgctacctggaggcccaccccgagatcgtggatcgtcttaatgccctttcggcctatgcccgggacggcctgcggaaaaagaaggtcaagatcattgaatccaccacccccatcatcccgctgtatacctacaccgtggaaaacaccctgaccgccgcccgccagctgtatgatgccggggtctatgtcaacccggtgctgccgcccgctaccccccctgccgagtgtctgctgcgcaccagctacatggccacccttaccgaaccgctcatcgatgaagcggtcgagatcattggcagcgtgctgggggaaaaagtatga

SEQ ID NO: 470 - DNA, 1083 bp, Unknown
  Unknown gut bacteria
gtgaacggcatgatccccaaaaaagaatgggcgcaggacaccctgcggatgctgcttctattgggggcagcggtggccgtatgcagcgtgctttcccgcgtgcacgatgacaacaacccctttgccgttctcatctttgtgctggctgtcgccatagtggcactggtcaccaacggctatgtgtggggtgttctggcctcggtcatcggggtgttctgcgtcaattacatgttcacctaccccttttggagctttgatatgagcatcacgggttacccgctcaccttcgtggtcatgctggtggtctcggtggtcatcagcacccttaccactcgggtaaagcaaaccgaacgcctgcggtatgagatcgaaagcgaaaagcttcgggcggatcttttgcgggctctctcccacgatctgcgcacaccgctcgcctccattgagggtgccgacagcctgctgctggagcagcccgacctgagcgaagcggagcgccgtaccctgctggagcagatccgtcaggagacccggtggctgacccgcatcaccgaaaatatgctctcggtcacccgtatggccggggaacaggtaagcctgcaccgcaccgatgaggtagtggaggagattgtggacagcgccgtgatgaagctgcggcgcagccgcaatgccctgccggtcacggtcatccgcccgcaggagatcctgaccgccccgatggatgccaccttgatggagcaagtcattctgaaccttttggaaaacgcggtgaaccacgccgagggcgctacccgcatccgggtggagatcgccgggcagggggataccgtgatgatcgctgtggaggatgacggcgcgggcttccctccagagctgctcccccagctttttgaccgcaagctgctgccgcagccgcgctcctgcgctgatggccgccggggactgggactggggctcacgctatgcagcgccatcataaaagcacacggcggccgcatgaccgccgaaaaccgccccgagggtggagcgcgggtgtgcctgtggctgcctgccggaaccgaagatgaggaggaaaccgaaggatga

SEQ ID NO: 471 - DNA, 1086 bp, Unknown
  Unknown gut bacteria
ttgttcaccgaaagtccattgaattgcccccgggggtatactataatattcggtagagttccgataaggaggacaatttttgtgaaatacaccggtatcccctgcgcggcctgcggcaaaaagtttaccgcggaagacgatgtggtcgtctgcccggagtgcggcacgccctaccaccgcgcctgctataaagaactgggccactgtgttaatgaggcccgccatgccgagggctatgtgtggcagccgcccaaggccgctccggggccttctgtgccgctggaggagcagccgcatgccccccagaacaagacggacggcgaaggctatgtgatgtgcagccgctgcggcaccgtgaaccctgccggacaggagcgctgcgacctgtgcggctacccgctgaaggagaccggcgaacgcatcccggctggggaccgcgagaccgaggacggcgggacctttgcggaatatgtgcgcgaccagtacaatgtgaaccccaatgaaaagctgggcgatgaactgactgcccgggaggtggccgcctatgtgggacccaatgccctgaacttcctatacaaattccgggcgatgctgcagcgcaagaccgctgtgagctttaacctgggggcgttcctgttcaccgggctgtactgcttctaccgcaagatgtatgccctgggcggcattctgctggccataaaggccgcctgctatatcccctttgccatcaattatatcccctacttccaggagttgatggccgcgggggccaccaccctcagcgagtttatgcacatcaataccctttccccctactaccaggcgctggtttccacctccgccattgtgcagtacggcgggctggtgctcagtgtgctttgctccctgttcttcaattatttctatctcaagaagatcacccagcaggtccgcatccagcgctaccgcggccacgcagcggccggtacccagcagtactaccagaacctttcccgcatgggcggcaccagttggctgctggtattcctcatcgtcatcgggctgctttcggtctcttctgtcgtcacttccctttttgtgatataa

SEQ ID NO: 472 - DNA, 1239 bp, Unknown
  Unknown gut bacteria
atgcagatgctcattaagaacgcgaagctccgtgaccgggaagagctggtcaatatcctcatcgatggcggcaagatcgttgatatcggcgtgggactgaccgccgaggccgagaccgttattgacgccgagggcaacctgaccaccgcttcctacatcgatccccatatccacctggataaggtcaatgtactggatgttctgcccaagaaccagagcggcaccctgaaggaagccattgagatgctgtgggataaaaagcgcaactatgtcaatgaggacattctgacccgcggcggcgatgtggtggagcgtgagatcaagaacggtgtactgaatattcgtacccacattgatgtggataccatcaccggcctgaaggccaccgagggcgtactggccctgaaagacaagtataagggcgtagtggatatgcagaccgttgctttcccgcaggaaggcattatgaaggatcccggcgccgataagctgatgtggcaggccatggagatgggctgcgatgtagtaggcggtatgcccgctaacgaaaactgccctgacgacagccgcgcacatgtcaagctgtgctttgacatcgccgaaaaatacgatgccgatatagatatgcatgtggatgaaagcgacgaccccttctaccgcacgctggagatggtggccgatgagaccatcgcccgcggctggcagggccgtgttaccgccggccatacctgcgccatggcggcctatgacgaccactatgcggcctatgttatcgaaaaggtgaaaaaggccggcatcaatgtcatcaccaaccccgtgaccaacctgatgctccagggccgcttggataaacagcccatccgccgcggtattacccgcgtaaaggaactgctggctgccggtgtgaccatgagctttggccaggactgcgtcaatgataccttctatccctacggcgccggcgatatgctgcaggtggccctgattaccggccacgctgcccagctgagcctgcccgatgagattgaaaagaccttcgatatgatcaccgatgacgccgccaagatcctccgtctgaaggattacggcttgaaggtcggctgcaatgccgatatcgtcatcaccgcttgccgtgatgcacgcgacgccattcgtctgactccggagcgtcgctatgtcatcaagcgcggacgcgtagtggcttccaccaccgtccagtctaaactcgccatcttctaa

SEQ ID NO: 473 - DNA, 1221 bp, Unknown
  Unknown gut bacteria
atgctatactggctccataaaccggcatacctgccgggaaccggcaacaaacccgagaagaaggagaacattatggcagaaaccaccaaagaaaacaaagcccagcgggccaagaaatatcgccgcagaagagtgactgccgcagtagccgcagccgcgatgtgcgcggtcatcggtgtgggggtaaacggcgtagtgaccgcccgagccaataccgccctggcggatgcgctggctacggccgccgatctgcagcaggcgcagcaggaaagcgcccggcaggccctgcgggaaagccgtactgctgccgaggcagacctgaccgcctatgtgactgaagccagcgaagaggctgaagccgccctgaaaaaagccgctgaggaagccgccaaggcggccgcggccaaggccgcccagaccaccaacacctccaccaatgacagcaccgagctgcccggcaacggaggaaaactgagcagcggtggccgggctcttgccgccaccaaaaccggcgggaactttaaggccagcgtttataccggcaataccggtgcttccaacctgagctactaccagtcactgaacagcgatgtgaaggcctggcttaagatccccggcaccaacatcaattacccggtgctgcagaatgccagcgaggaccactactacctgcaccgcggcctggaccgcggccagagctactacggtgtgctgtggacccagaccgcgactcgctttggcagcggcgacagcctttccagcaacaatgtcatctatgggcacaactggaagaactgtcgctggaacgctgccccttccacctactatgccggtcagcagatgtttgaatcgctgctgagctaccactacaccagctgggcggagcagtatccctacatctactattccacccccagtgaggaaatggcgtttgttatctttgcctgcttctacaccgagggcagcgattggtatatcaatgccgagggtaatattgacggtgtgatcagcggcgcgcagagccgctcccgccacaattttggtgtggatgtcaactccagcgataagctgctgaccctttccacctgcacccgttactacggcaataccgataaccagcgctttgtggtgatggcgcgcctgctgcgcccgggcgaggagatgggccctgtttccgtcacctataatcccaaccaccagcagcccaatgtatggggctaa

SEQ ID NO: 474 - DNA, 1143 bp, Unknown
  Unknown gut bacteria
atgaaaaagcagaatattatcattatcatcgtttttggcgcgctgatctttgggctggggctgctggggtggctcaccccggatcaagccttttccgaaaatgagaaccgctacctgcaggagctgccaaagctttccgaagataccatggtaaatggagattttggcgatgaggtggaggattatttaagcgatcagttctggcagcgggatagctggaccgccgcccgcagcaaaatgaaaatgctgctgcgcaacaaggatatcggcggggtgtacctgtgtgaggatgggtattacatcgaaaaggtgacccaaaccgatgtggacgaagcaaggctgcaaaagaacctgcaaacggtgaaggatttctttacccggtgcgaggaaaaaggactggcggcagaaaatctgacctttatgccggtgccgacccccggctataccctgcgggataagctgccgcgttatgccaccctctttgatgaggatgcggtatttgacgagatgaagctggtatttgatgaccagctggtggacctgcgaacggactttgccaaggcggcagagagtgagcagctttattaccgcaccgaccaccactggaaaacggcaggcgctctgctgggctaccagtgctaccgcgcagccatggggctttcgattcccgcagcggcggattacaccgtagagcggtatgagggcttccgcgggacgctgtacagcaaggtgctggataaaaacgcggcgaccgataccgtagagctgtaccaccggaaaggcgatgccgccttgaccgtgacctacgataacgccgatcatgccagctgttatgatacagaaaaactccagcaaaaggatatgtacgaagtgttctttggcgggaactggcccgcggtgaccattaccggcggaccggaaaatggccgccgcctgctggtgctgaaggacagctatgccaatgccctgctgccctttgccgcagcggattacgaaaagatcgtggcggtggacctgcggtattatcttggctccctgagtgagctgatggagcaggaaggcattaccgatgtgctggtgctgtatagtacctccgcctttatgagcgacaccaagatagaccggctggcactggcaaaataa

SEQ ID NO: 475 - DNA, 1602 bp, Unknown
  Unknown gut bacteria
atgaagtacatttttgtcaccggcggtgtggtttcgggcttgggcaaaggcatctgtgcggcttccctgggcagattgctgaagcagtgcggcctgcgggtcaaaaatcagaagttcgacccgtatttcaatgttgatcccggcaccatgagcccctttcagcacggtgaggtctttgtgaccgaggatggcgccgaaaccgacctggatctgggccactatgagcggtttgtggatgaatccttggacggcaatgccagcgtttcctccggcaaggtcttttggacggtgctgaaccgggagcggcaggggggctatctcggcggcacggtgcagatcattccccatatcaccgatgagatcaagcggcggatctatgccatggaggatggcaacaccgatgtggtcatcagcgagatcggcggcacggtaggggatatcgaaagccagccctatctggaggccatccggcaagtagcggtggaaaagggccgggaaaatgtgctgtatatccatgttccgctcatcgtttccatccccggcaccggagagctgaaaagcaagccaacccagcattctgtcaaggagcttctttcggtgggcatccagccggatattctggtttgccggacggaggcgcccatcaccgaggaggtgcggcataaaatcgctctgttctgcaatgtggaggagcggtgtgtcatccccaatgtgacggcccatactctgtatgaagtaccgctgctgctggaaaaagagggcctgtgcgatgccgtctgccgccggctgggtctgggagaacggacccccgatatgaccgaatggacagccatggtggagaagataaaaggggtgcaccgccgggtggaaatcgccctggtagggaaatataccggcctgcgggatgcttacctcagtgtggcagaggcgctgttccatgctgggacggcctgtgatgccgaggtggagatccgttgggtggattccgaaaacttgaccccggaaaacatagcggaaaccctggtcggctgcggcggcattctggtgccgggcggctttggcgaccggggaatagagggcatgatcctggcggcccagtttgcccgggaaaaggggatcccctactttggcatctgccttggcatgcagatcgccgtgatcgaatttgcccggcatgtggccgactggcaggatgccaacagcgctgaattttccggttctaccgcgcacccggtcattgccctgatgccggagcaggtgggcgtgacccaaaagggcggcaccatgcggctggggcggtatccctgtgttttggcggaggggacaagggccctttccctgtacggggaaaaggagataagcgagcggcaccgccaccggtatgagttcaacaatgacttccggtgtgagctgcagcaggacggcctgacactggccggtacctcgccggatggggcactggtggagatcgtggagatcaaggaccacccatggtatgtggggtgccagttccatccggaattcaagagccggcccaaccgcccgcatccgctgttttacggctttgtaaaagcggcgttggaggcagaggaaaagcggtga

SEQ ID NO: 476 - DNA, 1560 bp, Unknown
  Unknown gut bacteria
atgaggaggctttttgtgaacgcactggaactgcacaatgtcaccaagcgctttggtgaaaaggtcattgccaatgatcatgtcagccttaccgtccgccggggcgagattttggccgtgctgggcgaaaacggcagcggcaaaaccaccctgatgaacatgatcgccggcatctaccaccccgatgagggcgaaatttatgtcaacggccagccggtcaccatctcctccccgcgggatgccttccgctgcggcatcggtatggtgcaccagcacttcaagctggtcgatgtctttaccgccaccgaaaatattgtcctgggtgtggaggatggcaagccctaccgcctcaaggaagccacccgccgcgttgaggagatctccgcccgctatggcttcgagatcgacgccaaaaagaagatctacgccatgtccgtttccgaaaagcagaccgtcgagatcgtcaaggtggtgtatcgcggcgcggcgatcctcattctcgatgagcccaccgccgtgctcaccccgcaggaaaccgaaaagctcttcgccgtgctgcgccgcatgcgggaggatggcaaatccatcgtcatcatcacccacaagctcaatgaggtgctcagcctttcggatcgtgtcaccgtgctgcacaagggcaaaaacgccggcaccgtcaataccgccgaaaccaacgaagcccagctcaccgagatgatggtcggccaaaaggtcgttctcaatatcgaacgcaaaatgcccgaaaatccggaggatcgtctggtggtcaaggatgtcagctgcctcagccgggatggcgttcagctgctcgaccgggtcacctttaccgcccgcgcaggcgagatcttgggtatcgcgggcattgccggctccggccagcgggagctgctggaagccattgcgggcctgcagcccgtcaccggcggcgaaattctctatgaagaccccaagagcggtgagaccgaaaacctgcgggataagactcccctgcaaattcgcgagctgggcgtccgcctttccttcgtgccggaggatcgcctgggcatgggccttgtcagcaatatggatatcatcgataacatgatgctgcgcagctaccgccgcggccgctccgccttcctcgatcgtcagcccccgcgggaactggccgagcgcatcatcgaagacctcggtgtcgttacccccaatgccaccacccccgtccgccgtctttccggcggtaatgtgcaaaaggtgctggtcggccgcgagatcgcctcggcgcctaccgtgcttatggccgcataccccgtccgcggcctggatatcaattcttcctatcttatctatcatctgctcaatcagcaaaaggaaaaaggcgttgccgtcatctatgtcggcgaagacctcgatgtgctgctggccttgtgcgatcgtgtcatcgtcctcagcggcggccgcgtcaccggcactgtggatggcagcaccgccaccaaagaggagatcggcctcctgatgaccaaagccgaaagggagggtgaaagccatgtcaaagctgaataa

SEQ ID NO: 477 - DNA, 1188 bp, Unknown
  Unknown gut bacteria
atgtttggtactgtcgttcgcggggtacgcgcccccatcttccgggaaggcaatgatgtagtaaagggcactgtggataccgtcctgaaggccctgaaagaaaacagtgtggagccgcacgataaagatgttgtcgccattactgaatcggtagtggcccgtacccagggcaactatgccacagtggaacagatcgcagccgatgtaaaggcccgcaccggcggcaagaccgttggcgttaccttccccattctcagccgcaaccgtttctccgtgctgctttccggcattgccgcgggctgcgagaaggtcgtccttatgctcagctatccttccgatgaagtaggcaaccatctcatcagcatggaccgcctggatgaaaagggcattgatccctggaccgatgttctttccctggagcgcttccgtgccgagttcggctctgtgatccatccttttactggcgtggactatgtggagtactattccagccttatccgggaagccggcgccgaggtagaagtgatttttgccaaccgcgtgcagaccattctggactacaccgataccgtcatcacctgtgatattcatacccgtgcccgcagtaagcgattgctgcaggcggctggtgcccgtgtggttctggggctggatgacctgatgaccgctcctgtggcgggcagcggctacaatgcccagtatggtctgctgggctccaataaggcggatgaaaaccgtgtgaagctgttcccccgtgatgctatgctggtagccgaaaaaattggccagctgatgagcgaagccaccggacaccatatcgaggcgatggtttacggcgacggcgcctttaaggatcccgcgggcaagatttgggagctggccgacccggttgtggcccccggttataccaagggccttatcggtacccccaatgagctgaagctgaagtacctggctgaccacgatttcggcgatctttccggtaccgctctgcaggaagccattacccagcgtatcaaggagaaggactccaccagcctggtgggcaatatggtctccgagggcacaaccccccgtaaccttaccgatctcattggctccctgtgcgacctgaccagcggcagcggcgataagggcacccccatcatctacatccagggctacttcgataactacaccaccgagtga

SEQ ID NO: 478 - DNA, 1398 bp, Unknown
  Unknown gut bacteria
ggaggaaccgatatgctgaaagactatctttcatcctttgcaccgcagctgcacggccatgtggagctgcgcgcgcagatcagcaccagccacgcggtagccatgctgaacggcgacctgcaaagcaatgcccgcgcccagcagggcggtgtttctgctcgggtgtaccgcaatggcgtttatggctttgccagcgccgtggaatacgatgaggagagtgtgcgccgcgtgctgaaggccgccgaggagaacgcgcttttcctggatgcccgcgtgaagaagaaccgtcccgcgctgccggtgctgcccagcggcatggtggcgaaggataaggaatatattgaggtgccgcagaaggactacatcgagtttgtacgggcggcggatgattacctgaagcagaagtaccccaatctgttaagccgccgggtgctgctgcgccatgactgcatggagaagctgctgactgtcagcgacggcaccaacagccacagcgtgcggccccgcacccatctggtcgtgcagcttaccgctgacgcgcccgatgggatgccggttgagatctttgatgtgctgggcggcggcgagggcgtccttaccgaccactttaccgaccccagcaagtactacgaaaagctggacgagcaggtggagctgctgatgaagaagcgcgagggcgtctttaccaacgcggggctgaaggatgttgtgctggctccggcgctggccggtattttggcgcacgaggccgtgggccacaccgtagaggccgacctggtgctgggcggctcggtggccgcgcacaacctgggcaagcgggtcgccaccgaccttatcaccatggtggactatgcccacaccctgcccgatggcagccgtgccccgctgccggtgtatgtagatgatgagggtacgcccgcttctgatgaagtcctcatcaaggacggcatcctggtgggctacatgaacagccgtgagactgcccagcactttggcatggagccgcacggcaatgcccgcggctatgcgtacagcgatgagccgctgatccgtatgagaaacaccgccatcctgcccggcaaggacaagctggaggatatgatcgccgccattgatgacgggtactactttacccagaccaataacggccaggccgataccaccggcgaattcatgtttggtattatgatggggtatgagatcaagaacggcaagctgggacgggccatccgggataccaccatttccggggtggcgttccagatgctgcagaccgtggatatgctgagcgacgacatggtgtggagctgcagcggtacctgcggcaaaaagcagccgatgccggtgggcatgggcggcccggccgtaaagtgcaaagtgaatgtagcgggaaagtga

SEQ ID NO: 479 - DNA, 1152 bp, Unknown
  Unknown gut bacteria
atgatgagtgcggccgctacaaaaacgaagccccgtgtgatgagccggggcggtatcattgcctgcatggtgctgacactgttgacgccggtgggtttgctgctgatccatctggcgcgcggcaatgccgaagaagtggagcatctgtacagtcgtggattttatcatggtatggcaacggctctgacagcgctgaccgggagggcgcccttttcggtaatggaggtcatcctgcttttgctgggggccgctgcgctggtgttccttgttctttggatacgggaagccatccggcagaaaggacgctggtggctggtatgcttaaagcggctgtggatcatagtttcggcggcttcggcggtattcttttggtttattcttaccggggatcttaattactaccgtattccggtggggcagagtctggggttgcaaaccgaggcaacggatgtgaaaacgcttcggtcactctgtcatctgctggcggggcaggcggcggagctgcggccacagtgtgaggaagatagcgagggggtatttgcttcttccgtgacctatgcggaattggcggagaccgctactggtgcggtgacggcactggatgagatctatggggtacagctctttgacctggcgggacagacccgccccaaagccatgtatttttcagaggtcatgagctatattcagctgactggtgtgatttttccttatatctcggagccgaacatcaatgtgcaccaaccggcctatgggatctcctccaccatgtgtcacgagctttcccatatttgtggctttatgcgggaggatgaggcaaattttatcgcttatctggcctgctataatagcgataatacagagctgcggtacagcggcgcgatgatgggacttatccatgctacaaaccgcgtgtaccgctatgacccaaacgcctggcaggagatttatacgctgctgccggaaggagtgctgcgggatctggcggccaacagccgttactggaaaaagtatgaaacgccggtaggcgaaacggctgaccgctggaacgatgcctacctaaaggccaatgaccagaacgatggggtgcagagctacggccgtatggtcgatctgctcatcgctttttacagggcgcagggattgatttga

SEQ ID NO: 480 - DNA, 465 bp, Unknown
  Unknown gut bacteria
atgcaacaggaatactactctcaggctgggatggagcaggccatccaagagcttattaccaagacgatcaataatgagcgcggcggctttaatgccatgctagccccccgcctggtcacggtggattgggccgctaaaagctgcactcttgccttccatccgttggaatggatgagcaatccggctggtgtcacccacggcggcattctctcctccattgctgatcttgccatgggtatgctcagcattttctccgcccacggcgcccatgtcacccccaccgccaatatcagcatcaactacctgcggccagtgccgctccagcaggatttttatgtcacttctaccattgaccacatgggccgccgcctaaaccagacccactgcaccatgtacctgcccaatgctccggaaaagccctgtgtcaccgcggtggggacctactatgtgctggatgaaaaatga

SEQ ID NO: 481 - DNA, 1608 bp, Unknown
  Unknown gut bacteria
atgcttaaaacgctgctgaaagtccagtttgctgcgctcaaggcttcgctattccgcagccgccgcaagcagagcaaaggcggcacgggccgtaccatcgggtttgcggtgctgttcctttatgtcatcatctgcttctttatcatgttcggcagcttgttttcttctatctgcatgccgctgcatgagcttggtctgggttggctgtattttgccatcgccggtttgatggcctttatgctcacctttatcggcaatgtatttgccacccaaacgcagcttttcgatgccaaggataacgagctgctgctttccatgcccattgcgcccaagttcatcctgggcagccgtatgctgctgttgctggcgctggatctgggctatgtgctgctggtaatgggaccggccggtgtggtatattgcatgaattatcccgttaccgcgctaagcgtggcgtattttatcatcagtacgctgctgctgccgctgatggtacaggcgttctcctgccttgtcgcatgggtcatctctcttatcagcagcaaaatgcgcaataagaatatcatcaccatggtggtgtcactgctctttttggcagcgtatttctatctttatagcaagatgggcgatattatctccggcctcatcgccaatggcactgccatcgcggtggcgttcaaaaagtacgctttccccgcgtattacttcggcgttggcatcgcggagcataacctgacctatctgctgctgtataccgtttgcaccctggcagtgtttgaactggtatatgccatcctttcccgcagcttccggcagatcaccacagcaaagaaaggcaccgcacgcattaaatacaaggaaaggtcgatgcatgtcagcagcccggccgctgcgctgctgcgcaaggacttccggcacttcattggcaatcctatgtatgtgctcaatgcatggatgggggagatcctgcttgttgttgcctgtgtcgccatgctcataaaaaaggatattcttaccgagtttctgccgatactgaatggggaaggggagatcatggggctgattctctgtgtgatcctttgcggcctcagctgcaccaatcttatcacggccccagccatctcgctggagggtaagaacctttggatcgcacagtccatcccggtccctgcggccacggtgctgcgcgccaaagtcaagctgcagatgctgctctgtattcctattacggcgcttagtgccctgctgatgggaattgtgctaaagctggagctgctcacattggtgctggctgtgctggtgcctgcggccttcaatctgttcacggccctgctgggcgtggtggtcaacctgcattttcccaagttcgattacatcaatgaaacagtcgttatcaagcagagcatgagcaccatgatctgcatgttcggctccatggccgtggtgttggtattggcactgctgtatgcgctgctgctctccgcaagtgttgcgcctaccttgttccttgctgtatgtctggtgcttttggttattgtgtgcgtgttgatgtggcggtatttgggccacggcggcagcgcccgttttgcagccttgcaggcagattaa

SEQ ID NO: 482 - DNA, 1461 bp, Unknown
  Unknown gut bacteria
atgaacgataatcggagcggtggggaaggcctgcaaagaaagctctctccactgaatgtatgggcactagccctaggcagtattatcgggtggggtgcgtttgttatgcccgccaatacctttttacccaatgccgggccgctgggtactcttattgccatggctgcgggcgccatcattatggtcgttattgccctcaattacagctatatgatcaaccatttcccggtagcgggtggcgaattcacctttaccaatgcctcgtttgggcccacctgcggttttttgtgcgcgtggttcctgggcctttcctatcttgccatcgtgcctttgaatgctaccgctttggcacttatcgggcgtaacctattcccaaatctgacccagtggggctatctctattcggtggaaggttacagcatttacgctggtgaaattctgctggccatcattgcgctggtgctttttgcggtattcagcatccggggtgtcagcgtggctggcaagttccagactgtcctggcgctttctctggttggctgtgtgttcctgctggcgattgctgcgctgttcagcccgcatgcttccgcttcccatttggcgcccgcatttaccacagatgccaccggtaagtcttcgttgggcggtatccttgctgtggtagcggtcgcgccttgggcatttgtcgggttcgattccattcctcaggcttcggaggagttcaatttctcccataaaaagagccttgttattatggttctttccatcctgttcggcggcgctctttatgtcatcctcaataccatcacggccgcagtcctgcccgaaggctataccagttgggtgccttatattgccgattgcgccaaagataccctgcccgaaagccttgccggctttacggcgctccccacctttaatgcggcccgtctgatcctcggcaagcccggtctggttattttgggcattgcgctgttctgcgctgtactttccggcatcattggcttttatatggctaccagccgtcttttgtactccatgtccaaggaccatgtcctcccgggctggtttggccgcctgcacccccgctataaaaccccgatgaatgccatcctgttcatcatgatcatttcactgtgctgcccatggtttggccgcactgtgctcaattgggtggtagatatgtcctccatcggtgccgctattggatatggttttacctcggccgccactttggtacaggttcgccgcaataaggatacctccgcatggatgaccataaattccattttgggcgtcattttttcgctgtgcttcatagcactgcttatcgtccccaatccttgggcatacctggggccgcagtcccgtatcgcgttggttatttggactgtcatgggtgctgcattcttcctctacacccggcggaagaaggcagcggagaaggccatcgacgcttga

SEQ ID NO: 483 - DNA, 1344 bp, Unknown
  Unknown gut bacteria
atgcacgagatcaaatgtcccaaatgcggcgaagtctttaccgtggatgaatccggctatgcagccatcgtgggtcaggtacgggatgaagaatttcaccgggagctggcccagcgggaaaagcagctggccgccgaaaaagaaaaagatctggccctggtacgcactcaggccgcccgctctcaggagcagtccgaggcccagctgcagcggcagatcgaagaactgaaggcccagcttctctcccagcaggcccagcgggagctggccgtacagaaagccctggagcagcagaccgccgatctttccgcccgggatcagaccattactgaactacaggcccgcctgaacgcagcccaaaccgagcgggagctggccattcaaaaagtgacctccgagaaaagggacgaactgatcgaaagtcagcgggaaatcgataagctgagctatcagctgaaggaagccgcggccgccagccgggaaaaggagcaggagctgcgggaaagctacaagcgggagctcagcagcaaggatgaggtcatcgcctattataaggacctcaaaacccgcctttccaccaaaatggtgggagaaacgctggaacagcactgtgagatcgaattcaaccgtctgcggtccgccgctttccccaacgcttactttgagaaggacaacgacgcccgcaccggcagcaaaggcgattacatcttccgggagtccacctccgatggcatcgaatttctctccatcatgttcgagatgaaaaacgagatggataccaccgccagcaaaaaaaagaatgaggatttcttccgggaactggataaggaccgccaggaaaagggctgcgaatatgccgtcctggtctccctgctggagccggacagcgagctgtatggcggcatcaccgatgtcagctaccgctaccccaagatgtatgtcatccgccctcagttcttcattcccatcatcaccctgctgcggggctcggcactccatacggtggaataccgccggcagttggcggagatccgtaatcagaatatcgatatctcccacttcgaggaggaaatgaacgacttcaagacccgcttcggccgcaattacgatttggccagccgcaagttcaaaaccgccatcgaggagatcgataaaaccatcgaccacctgcaaaagaccaaggacgccctgctctcctccgaaaataatctccgcctggccaatgataaagcccaggagctttcagtcaagcgcctgacgaaaaacaatcccaccatgcaggccaagtttaaggagctggaagccgccaaaactcctcccctgccgcaggaaccaaacgaataa

SEQ ID NO: 484 - DNA, 783 bp, Unknown
  Unknown gut bacteria
atgaatctggatcgtatcatttcggtgcagaacagcatcaccgtttttcgggatggcgaccgctgcctaaaggtttttaatgaggactgcgccaaggcggatgtcatcaatgaggcgctgaaccaggcccgaatggaggaaacgaccgtcactgtccccaaaattctggaggtgaccgaggtaaatggcaagtgggccattgtttcggagtacatcaagggtgaaaatctggaacagttgatggagcgctatcccgaaaaggcgggggagtatatggaacttttcgcctctctgcactgccacatccaccagcagtcctgccccatgttcaaaaagctcaaggatgagcttcagcgcaatatcaacagctcggagctctccgccaccgaccggtatgacctttattcccggctggagcggatcccaaaatataacgaggtctgccacggcaactttgtgccgtccaaggtcatcatcagcgctgcgacaggagaaccatatatcattgattggttccatgccacgcagggcaatgccgctgcagatgccgcgttgacctatttgctgctgcggatgcgcggccgcagggaggaagccgagcagtaccttgccttgttctgtgaaaaaagcggaatcgaaccgcattatatccgccgctggatgccgctggtggcggcttcccaaacggtagtagccaatgcccgcagccgtgccgtgctgcagcggtggatcgatgaccccgcaggggcgcaagagatggaaacagaggtgaatgaagcatga

SEQ ID NO: 485 - DNA, 684 bp, Unknown
  Unknown gut bacteria
atggatcaaatcaggatcggagcgtttctcaaagcgctccgtaaggaaaagggattgacgcaggagcagctggccgaaaagcgggcggtttccggccggacagtctcccgctgggaaaccggcagcaatatgcccgatatcggtatgctggtcgtgctcgccgatttttatggcgtcagcatcccggaacttatcaatggagaaaggaaaagcgagaatatgaatcaggaaacaagagataccgccatcgccatggcggaatatagccaggtcacagcaaaaagcagcaggcggaaagtcattggcattctgtttataacatttggactgtttatcatcatatcggccctgtccatctttcccagcgagagcagctggggaagcatctatgccacgctgggcagcattattctcatcgccggcatctatcttatcatccgccagctggtcgcaaagcgcgctgtgcgcttaagtcttgtctttggctgcgccgtgctgctgttcggcgcctttaccctgtccgactatatcgccgttacgcagttccatcaggtgccgcgcttcagctacgaaacagtttacgattcccgcctcccggatcaactggtgcacaaaaccctgttcttcaccgtcgtccagcagaatcctggcaccccgcaggagcggatctatatcgtaaaatag

SEQ ID NO: 486 - DNA, 573 bp, Unknown
  Unknown gut bacteria
atgctgtatcacgcttcgcccattggcgggctgaccgagctgcggccacacatttccaaccatggcatcccactgctgtacttttcgcaaaaacgagaaaacacctttgtttacctttccaacgccgtggaaaagtactgccgggaaactggctttgcatacaacggtccatggaaaaagtggggaccctacggctttaccgatgatggcaggcagcggctggaggaatactacccaaacgcattggaagaaacctatcgaggcgtttccggttacatctatacggcagaaaaggtgatccggcgggggcatcctgttcctatccccgataccgtaacatcccgcggggcggtggaagcaacaggctgtgaatttatcccggatgcgtgggaagccattttgcatgcggagcaagagggattgctggtactgcgccgctacgaagaaatgactgaaagagaagcagactggctccggcggacggtacgggaggagtatcgccaggcggaggatcacccagaataccaacacttcctgcgggataagttcggtattgacccggaaagcttataa

SEQ ID NO: 487 - DNA, 1485 bp, Unknown
  Unknown gut bacteria
atgaaaggggagagagcaatgcgaaagatcacggcggtgctgatggccttggcgttggctctttctctttttgcgtgcgggggagagcctgtgcaggatgaaactccgggatcagatatccagcaggggacggtgattctgccgaagccgcaggaaaatgatgagagtggcgatagccaaaacggggaatatccctccgcacaggatccgttgccacaaaaaccgggggacaccaagaagccggaagaacctgataaggcagaggacggtaaaaatccgggtaagaacgaagataatgctcaaacgcctgccgaggacccaaagcaggaggagaataataacaataataacggtgataatgctacaaccccaagtgataccaaagttcccagcggggaataccgcgcggtatggatcagctatctggagctgggcggtatgctgaccgggaaaacagccaggcaattccgcagtaatataggtgccgcctatgataatgtgaagaacctgggctgcaataccgtgattgtgcatgtgcggccctttggagatgcgctgtatgattccgattacttcccatcctcctatcttatcaccgggacggagggggacaacttgccgtttgatcccctgaagatcatggtggaggaagcacataaccgtgggctgactttcgaagcgtggctgaacccctaccgggtgcgggcccgcaccggcaaggcactctgcagtgataaccccgcccagaaatacataaacagcggaagcgatgccgtgtatcagaccgcaaacggcggtattttctacaatcccggttcccgggaggccattgaccttatcgttaatggggtgcgggagatcgtgcgtaactacgatgtggatgccatccactttgatgattatttctatgctacaactgacagtagcattgatagtgccctgtacgccgcaaacggcggtggaaaatcgctggcagcctggagaagacagaatgtcaataccatggtgcgggaagtttatgccgcagtgaaggcggaaaaacagtcggtgcgttttggcatcagtccgcagggcaataccaaagcgaattacgataccctgtatgctgatgtagctacttggctgggcaatgccggctatgtggattacatctgcccgcagatctactatggattcaataacgccacctgtccatacagcagtgtgctgaaagaatttaacggcatgataaaggtgagtggcattgatctgtatgtgggtctggcggcttacaagattggcaatgaggatacctatgccggtaccagtggcaagtacgaatggcagcagaacagtgacctgctgagccgtatggtgactgaagccagaggggccagtcattacaaaggctactgcctttacagttatagttcggttattatgccggccagcggcgtaaaagcacaggtgcaggcagaattgactgctctaagtaagatactataa

SEQ ID NO: 488 - DNA, 894 bp, Unknown
  Unknown gut bacteria
atgaccacccttttgcagctctgccagcccttcgatcacgctgtgatggccgccatccagcagctaagcggcgccatgatggataagatcatgctggtgttcaccttcctgggcgaggagaccttcgctattctgctgctcatcgccgtgtactggtgctgggataagcggatcggcgaatatctcttgttctccctttacaccgccatgagcctcaacggcctgctcaaggatatcatctgccgtccccgcccgtttttgaatgacgagttcagcgacctgcgctatgtcaaggtaaagggcctgctggtggatactgagcacctttcttcctcctggtccttccccagcggccacagccaaaccgccggcagcatctacggcagccttatcaatggccgcaagctcgggatcaaagtctgcggcatcgcggtcatcctgctggtcatgctctcccgggtctatctcggcgtccattaccccaccgataccattgtgggcgcggtgctgggcctgctgtgcgcctgggtgtgcgggctgctgttccgccgcttttatcagcaccgcctgctgctgatggccgccgctgtgctgctttccggcctgatgctgctggtcagcccctccggcgacagcgtaaaaaccctggcgatgggcgtgggcgctgtactgggcatgtggctggaggacggcctggtggagttccgctccgccaatggcttcttcggcggggcgctgcggctcattttgggctttgcacttatcatggccatccgcatcggccttaaggccctgctgcccgatatgatgtggtgccacaccctgcgctacggcctcatgggcctgttcggtaccttcctgtggccgtgggtctttaccaaattgggcttttga

SEQ ID NO: 489 - DNA, 861 bp, Unknown
  Unknown gut bacteria
atgaaaagcacaagaaaatggatcgcagccatcatggcagtactggtgctggtactgatggcagcctgcggcaatggcggcaacgcagccaatgaaaataaagcagggtatcgcacactggaggagatcaaggcggcggggaccatcaatatcggggtattctccgataagaacccctttggctatgtggatgagaacggcgagtatcagggctacgatgtgtactttgcccggcggctggcggaggatctgggtgttaaggtgaatttcatctccaccgaggcggccaaccgcattgaatacctcaagaccggcaaggtagatgtgattcttgccaactttaccgtaacccctgctcgggccgaggaagtggacttcgcgctgccctacatgaatgtagcactgggcgttgtttctccggaagggcgggtcatcaccacgctggaggactgggatgagaacgatgagatgatcgttatttccggtacgaccgccgagacctacctgaccgagaattatcccaacatcaagctgcagaagtacgatacctacgccaacgccaagaacgcgctggagaacggcaatgcggcagcctgggccaacgataacaccgaggtgctggcctatgccatgcagaaccccggctatgtggtgggcattcccacactgggcggcaatgacaccatagcccccgctgtgaccaagggcaacaccaccctgctggattggctgaatgaggagatcaaggcgctgggtgaggagaagttcttccacgcagactatgaggccaccctggccgatacctacggcctggactatgaggatgaactggtggtagaaggcggcgtcaccgccggctaa

SEQ ID NO: 490 - DNA, 1404 bp, Unknown
  Unknown gut bacteria
atgcacaaagaaggagcgttgtttcccttggctactgcacgccataagtatgaaatagatatgtgtaccggtagcttgccgcagaagatcctgcttttttccctgccgctaatggccacaggaatgctgcagcttcttttcaatgccgccgatatcatcgtggtgggacggtatgtgggcagccacgcgctggccgccgtcggctccaatggctccatcatcaatctgatcgtcaacctgtttatgggtatctccatcggcggcagcgccgtcattgcccagcactacggcgccgcccagtacgaggatgtctccgaagccacccacacctgcatgctggtgggactcatcagcggtttctttgtcatggtagtgggcgtggtgtgtacccccgctatcctgcggctgatggatacccccgacgatgttctcccactggctatcctgtatctgcgcatctactttttggggatgccaggcagtatgctgtataactttggtgcggcggtactgcgcggcgtgggcgatacccgccgacccctgatcttccttttctttgccggcatcgtcaatgtcggtctcaacctgcttctggtcatccagttcaatctcagcgtagcgggtgtcggcattgccaccgttgtttcgcagtatatctccgccgcgctggtactgtggtgcatgctgaaaaccgatggctgctaccacatcgtcctcaaggagctgtgcatccaccgggataagctcacccttaccatcaagatgggcattcccgccggtctgcagggtgccatcttctctatctccaatgtcctcatccagtcctccatcaattccttcggcagcaccgccatggccggtaatgccgccgctgtcaatatcgaaggcttcgtttttaccagctgcaattcggtggcgcaggcttcccttaccttcaccagccagaacctcggcgccgggcagtacaagcgcctgcggggcatcaccctttggtgcttggccctgggcatcctcctttcggagattctcggctttatcgcctacggctttggcaattcgctgcttgctttctacaataaggattcggaagttattgccatgggcatgatccgtatgatgatcgtcggtaccacctacggtctggatgccattatggatattatggcggatatcatccgcgggatgggcagctctgtcatgcccatgatcgtcactctcatcggcgcctgcggcttccgtgtggtgtggatctataccattttcgccactcaccacgatctgcgggtactctacatctcctaccccatcagctggatcttgacctcgctcacccacatcatctgctatttcatcgtcaagcgccgccgactgagcggcctaacggagggagttccatcagtatga

SEQ ID NO: 491 - DNA, 681 bp, Unknown
  Unknown gut bacteria
atggtatattataagcagaatgtaaccggttacatcaccgaaattaaaggaggaaacgacatgaaggaaaccgagagaatcaaagcggggctgctgtttaggcccaactccatggagctgcgggacaccaagcacaaggcgcatgagacctgccgcctggtgaacacgctggatgagtatgatgagcgcattccggggctgatgcggtccattctgggaaagatcggggagcggttctacttccagacgccggtgcagttcaactatggcatccacacctacatcggggaggatttcttcgcgaactataacttctgcgtgctggatgacgcggatgtttacattggagataatgtgatgatcgcgcccaatgtttcgctgatggcggcctctcacccgctgatcgcccatgagcggctggggctgatgtgcggcgacgacggactgcccaccattgccgaaaacgccgagcccatccgcattggcaacaatgtgtggatcgggtgcaatgtgacggtcatcggcggggtgaccattggcaacgatgtggtcattggcgccgggagcgtggtgacccatgatatccccgacgggaccctggcggcgggcaacccctgccgggtgatccggaagatcaccgaggcggacagcatgaaggaactggcccgcgaggagctgtaa

SEQ ID NO: 492 - DNA, 1524 bp, Unknown
  Unknown gut bacteria
atgaccaaacttgaagacctgattgaacgcaaaggttcaatcgctctcggtggcggccaggcgcgtatcgaaaagcagcatgagcagggcaaaatgaccgctcgtgagcgtctcgagaccctgttcgatcccaacacctttgttgagatcgatgccttcgttgtccatcgctgctactactttggccaggaaaagcagcacttccccggtgatggtgttgttggcggctacggcaaggtagacggccgcatcgtctacgcttatgcccaggattttaccgttgtcggcggctccatgggcgaggtacaggccaataagatctgcaagatccttgagaacgcccgcaaggttggcgctcccgtagtcggcatgaatgattccggcggtgcccgcatccaggaaggtctggacggtctggaaggctacggcaagatcttcttccgcaataccgctgcctccggcgttgttccgcagatcaccgccatcatgggcccctgcgctggcggcgccgtttattcccctgcccttaccgatttcatcttccaggtgaataagaccggcaagatgttcattaccggccccgatgttatcaaatccgttaccggcgagcagatcgatgctgaaaagctgggcggcgctatgacccacaaccgcgtcagtggcgttgcgcacttcatggcctccgatgataccgattgcatcaaccagatccgtcgtctgctgagctacctgccctccaacttccgcgattccgctcccaccatcttcaatggtgacgatcccaaccgcattgccgatcagctggataccatcatccctgataatcccaacaaggcgtatgatatgtacgatgtcatcaaggccatcaccgatggcggcgagtacatggactacatgggcatgtatgcccccaatatgattacctgctttgcccgcttcaatggccgctccgttggtattatcgccaaccagcccaaggccatggccggctgcatggatatcaactgctccgataaggctgcacgctttatccgtacctgcgatgccttcggcattccgctgctcacccttgtagatgttcccggcttcctgcccggttccacccaggagcacggtggtatcatccgccacggcgccaaggtcatctatgcctactgcgaagccaccgttccgaaggttaccatgatcctgcgtaaggcctacggcggcgcttacttggccatgtgctgcaaggacctgggttccgatatcgtatacgcctggcccactgctgagatcgccgttatgggcgccgagggtgccgccaacatcatcttccgtaaggccactcccgaggagcgcgctgagctgatcgatgagtacaagcgcgagttcaataacccctacaaggctgccgagcgcggcatggtggatgatgtcattatcccctccacctcccgtcagatgatcatcgctgccatggagatgctcgatggcaaggtcgtggaagctcccagaaagaaacacggcaatgttccgctctaa

SEQ ID NO: 493 - DNA, 1089 bp, Unknown
  Unknown gut bacteria
atgagtaaatttaagctcggcgcatggttccatcgcgccgggaagctgctgcggggtcggacatttaccgcagcggggctggcagtggcggttggtttgtcgctgtgggctgtggccgaaaatgtcaagattctttacattgccgacggggcggagaccggtgtgaccctggcgctgcgcagcgatcccaccgagcaggcgctttcccgtgccggaatcacactgaagggaaacgataccgttaccacccgggagaccgccctggtttacagccgggtcagcatcagccgcggggtttcggttacactggtggccgatggccgcgagaccccctgcaccgtgaccggcggcaccgtagcggagctgctggagcagaacagcatcacgctgggggaaaacgactattgcgataaggaactttccgccctgctggaggatggcgatgtcattaccgtgcggcgggtggaaaagaaggtagtaaaggagcaggtggcgatcccctgcgacaccgtctataaatccagcagcctgctgcgcaatggccgcagtatgttgattaccgaagggaccaacggactggccgaaaacacctacgaggagctgtggagcggggacaccctggtttctcgggtgctggtgagcaccaaggaggtgacggccccccgcagcgccctggtgatagaaggccagcgaggcgcggcgatctcccggctggactggagcgaccaatacccgctggacgccaatggcatcccggtgagctatgagaaggtaaaaaccggccaaaaggcgaccggctattccgccggagagaacagctacggcagcagcggcgggtactgctattacggcaccattgccgtgaaccccaaagagtatccctatggtaccaagctgtatatccgcagcagcgatggcagctttgtgtacggctacgcgctggccagtgataccggtggatttatctccggcgaggtgggagtggatgtggatctgttctatgagacctaccgggaaagtgccctgaacagcctgcgcacggtggatatttatgtgctggagtggggcaacgggacgctgtactactaa

SEQ ID NO: 494 - DNA, 888 bp, Unknown
  Unknown gut bacteria
atgacctggaatgagcgttatcctacctattgcagcatgatagaagccaccctgccgcaatatttaccctcggtggagttgccgcagggtaaggtgagcgaagcaatggcatacagccttttgggtggtggcaagcgcgttcgcggttgtcttaccctggcgatgtgtgagctgtgcggtggcgatgtggaatctgctctgccactggcctgtgccgtagagatgattcatgcctattcgctcatccacgatgacttgccctgcatggataatgatgatttgcgccgcggcaagtcctcctgccatgttcagtttggggaaggcatcgctcttttggccggggatgccctgttgacccacgctttttcggtagtgtcctccgcctatttcagcggcagccttccggcggaaactgttctgcgctgtgttaaccagttggcatgtgcggctggggtagagggtatgatcggcggccaggtgatagataccatgctggaggaagtgcccatgaccccagaggagctggaagccatgcacggcatgaaaaccggagcgcttattagagcttcggcagtgctggggtgccttgccgcctgtgccccgcggaatgtcatccttcaggcggatctatatgcagccaaaattggcctcgcgttccagattgtcgatgatatattggatgtgaccgaaaccagtgaggaattgggcaaatccgccagcgatgctgaaaatcacaagaccacatatatcaccctgtatggcgtggaaaaggcccgtgaaatggtgcgtcgattggtgttggaggctgacctagctgtaaagggcaccatgctggatgatgaaatgctgtatgagctggctgataccctggctaagcgcaatcactaa

SEQ ID NO: 495 - DNA, 729 bp, Unknown
  Unknown gut bacteria
ggggataaattgacaaatacacactgtgtgtattataatcggccttacgatgcttccgtgggggtgaaccgcgcccgcgaaaagcatggaaagttagatttttcccagaaaggagtgagagcgatgacaacggccagccagtccatggataaacgcatgctgcgtacccgggaggccatccggtgcgcgctgctctcgctgctgaaccaaaaggacgcttctcagatcaatgtttcggagctgaccgagaaagcgcagatcagccgaaagacattttacctgcactatgccagtgtggatgaggcgctgcaggagctggaaaacgagatagagggatgggtgatggcccagctggcgcaaagcgacatctgggataaccggcacgacctctataccatcctgagccgggtggacaaggccctgcaggagcacgagacctactcctgctacctggaaaatcggcgctcccgctacttcctgatgtaccggctgaaaaattccattgccaagatggtgaaggatgagataacggaaaatgccggtgccgaggtgggagaggaggatgtggaggccgcggcggatttcgcggtttccggcgttctttcgatgtactacgattggctgacggcccagcgggtaacgctgcggcagatggccgagaaggcgcagaagctgctgaccggcgcggtaagcggccttttggggaaaaagacagaagaaaaggagtaa

SEQ ID NO: 496 - DNA, 1800 bp, Unknown
  Unknown gut bacteria
cgcaccctgctgaaaccaagacagaaaggcggaactgccatgaccgaagccatgctgacaccctggggagaggcacttgaccgggagcacccgctgccggaatacccccgcccccagctgaggagaaacagctacctgaacctgaacggcatatgggaatatgccattaccaaaacggccgaaaagcccgctgccatgcagggggagatcgtggtgcccttttcgccggagaccccgctttccggggtgggacacatcttgcagccggatgagtacctgtggtaccgccgcagcgtcaccctgccggagggctttttccggggcggccggctgctcctgcatttcggggcggtggaccagtgctgcaccgtgtgggtcaacggccaggaagcgggcagtcacaccgggggctacctgccctttgccctggatgtgaccgagcttattgagggcgatgcctttacgctggagcttcgtgtcaccgaccccaccgataccggttccctttcccgcggcaagcagcggctgaaaaacaccggcatctggtacacgccgcagtctggtatttggcagacggtgtggatggaatgcgtaccggaaaattatctgcggtccctgcgcattaccccaaagccggaggaaaatgcggtccacattcggctggaggcggatgaccctgccatggccgctgtcacgatttgcagggatgggggcatcattgccgaagggcaaaccgacgaaaatggagagagcacgcttaccatcccggcggaggaactgcgcctgtggagcccggagaatccgttcctctacgatgctgccatcaccctggcgggcggcgataaagtggagagctactttgggatgcgggccttcggcattgggaaggacgaaaaggggctgccgcggctgctgctgaatggaaagccctatttccagaacggactgctggaccagggctactggagcgacggctactacaccgcccccagcgatgaggcgctgatccatgacattgctgaaatgaagcggctgggctttaatatgctgcgcaagcacatcaaagtggagccgctgcgctggtactaccactgtgaccggctggggatgctggtatggcaggatatgatgaacggcggcgagagctattccccgctgtctatctatgtattctccaacctggggctgcgggtcaaggacgaccgctaccgctatttttcccggagcgatgaagcggggcgcacccactactacgaggagctgggacagatgatagacctgctgtacaataccgtgagtttggcgctgtgggtaccctttaacgagggctgggggcagtttgacgccctgaaagctgcggagtttatccgaaagcgggatgatacccggccgatcgaccacgccagcggctggtacgatcaaggcggcggggacatcaaaagtattcactggtatttccggccgtatcaccacaaacagccgcccaaggagcagcggcccatctgcctgacggaatacggcggctacaactgcgctgtgcccggccactgctggggcgagggagcagaattcggctacaagaagatcgctgacccggcggaatttaaccgagcgttccaaaagctgatggaggagcagatcatccccgccaaggagagggggctggccgcggccgtttacacccaagtgagtgatgtggagggcgagcgcaacggcctgctgacctatgaccgcaaggtatgtaaggcgaatgaggcgattttccgggcggtgaatgccaaacttaccggggacgcttga

SEQ ID NO: 497 - DNA, 1728 bp, Unknown
  Unknown gut bacteria
atgaagccgcatgaaaccaccgcccagtgcgtggagcgcaagctggggcgcaagctccgcctcatccgcgtggcgcgcggggaggaaccggccgatatcgtattcaaaaacgccacctatctcaatgtgttcagcaatgacttctgccatggggatatcgctgtttccgatgggctcatcgccggcatcggcagctaccacggcagcaaagaggtggatgtctccggcagctttgtctgccccggcctcatcgatgcccacatccacctggaaagcagcctggtttcccctgccgagtttgcccgagcggtcatccgccacggcaccaccactgtcatcaccgatccgcacgagatcgccaatgtcatgggagtggatggcatccgctatatgctggaggccaccgagggcctgccggtggatgtccactttatgctgcccagctgcgtgcccgccacgccgttggatgaaagcggctgcacgctggattatcaggccatcgatgacctgtatgaccaccctagagttcttggcctggcggaaatgatgaactatgtcggtgtcatcaatggcgatccagcagtcatcagcaaaatcctggccagtcaggcccaccacaaaaaaatcgatggccacgcacccgatctctccggcgccgatctcaacgcctatatcgccgccggcgtctattccgatcacgagtgcagcacctgccagaatgcgctggaaaagctgcagctcggccagttcatcatgatacgggagggcaccgccgcccagaatctgcgggcactcctgccgctgctcaatcagcagtactactcccggtgcatgtttgccaccgatgataaacaccccctggatcttttgcagggcggccacatcgattatatcatcagggaagccattgcctgcggcgttgatcccatcattgccatcaaggtggccagccatcaggcagcccgctatttcctgatgaacaacaaaggcgccatcgcccccggctacctggccgacctggtggtcttcgataacttccgtcacttcaatatccagcaggtgtataagcgcggccgctgcgtctttgcggatggcgaggttctaccctttgacgcgcccgctgtggaacccagcctttcccgccgcgcgcacgagaccttccgcattgcgccggtcacgccgcagcagctggccgccggagatctgccggtcatcggcatcgtcccgggcgaaatcatcacccagaaccttggccgggcggctgcccccgatcccacccatgatatcctaaagatcgccgtagcggagcgccaccatggcaccgggcacattggcctgggatacattaaaggttacggcctgcggcagggcgctgtggccaccagctttgcccacgattcccataatatcatcgccgtgggcgccgatgacgccgacctgtcctttgccatcaaccgcatctcggcgctgcagggcggtatcgtcgtggcggagggcggaaaggtaatagctgagctaccgctgccggtggctggcctaatgagtgacgccccgctggaggaggtaaacgacctgctggagcaggccaaggccgccgcccaccgcatgggtgtttccccgggcatcgatccctttatgaccctctcctttatgagcctgccggtcattcccgccctcaagatcaccacccacggggtctttgatgtggaacagtggaaatacatctga

SEQ ID NO: 498 - DNA, 741 bp, Unknown
  Unknown gut bacteria
atggcgcagaagattatcgaagtagcggatctgaaaaagtactataatggcggcgccgttcacgccatggatggcgtcacggtggatatctgccggggcgatgtcattgcggttattggtccctccggcggcggcaaaagcaccttcctgcgcagtctcaacctgctggaggtaccaaccgccggctctatcaaggtggatggcgtggagatcaccggcaaaaaggtcgatctgccccgtcaccggcaaaagatgggcatggtgttccagcacttcaacctgttcccacacaaaacggtgttggagaatctcaccatggctcctatccgcatcaaaaaggtgcccaaggccgaagcagaacaaaaagccatgactctgctgggccgggttggcctagccgaccgtgctaatgactatccggcgcagctctccggcgggcagaagcagcgggtcgccattgtgcgggcgctggccatggaaccggaagtgatgctgtttgatgaacccacctccgccctggaccccgaaatggtgggtgaagtgctggaggtcatgcgggaactggcccatgaggggatgacaatggtcattgtcacccacgagatggcctttgcccgcgaagtagccagccgggtgctgtttatggaagagggcaagctgggcgaacagggaaccccggaagtcatctttaccaatccgcagagccctcgactgcaaaatttcttaaaaaaggtgctgtga

SEQ ID NO: 499 - DNA, 918 bp, Unknown
  Unknown gut bacteria
atgaaaggaggcgtatttcatatgaaacaaattctattccgcggggcagccacggcactggtcaccccaatgcagccagatggctctttggatttagaaactctctcccgccttacagaatggcagatccaaagcagtatctcagcgttggtgccctgcggcaccccgggagaagccgctactctcactgatgaggaacgctttaccgtcatccaaactgtagccaaaaccgcagctggccgggtgccggtcatcgctggagccggatgcaatgacaccgcccgtgccgaacagaactgcctggccgccgcggcggccggtgccgatgccctgcttctagtcaccccttattacaataaatgcacgcccaagggcttacagtcgcattttgcgcggctggcatccgccacaccgctcccggtcatcctctataatgttccgtcccgtaccggggtgaccatcgatatggaaagccgccggaaactttccaaagttgataatatcatcggccttaaggaagccagtaccgattttagcctcattcatcaacacctgttggaacttggtgatactctccccctctattccggcaatgatgacctcaccctgcctctgatgtccctgggagcccacggctgcatttccgtcctcagcaatctgcttccccacagcaccgaagccctctgtcaggcgatcttgcagaacgatctaccggcagcccgttccctgcactattcccttcttcccttgatgaaatccctcttttgcgaggtcaaccccatccctgtcaaagctgccatgccgcttgttggtttcccttgtggcagctgccgcatgccactttccctcatagaaccggatcaccttgcattactgcaacaacaatttactatgatgaaacaactcggactctgctga

SEQ ID NO: 500 - DNA, 1209 bp, Unknown
  Unknown gut bacteria
atggctgagcgtaaactgcccacccgtgccgctattctggctgcgggctgcatcatgttcctcttcaccggtaccatctacgcctggagtatcctctcctcgcccttcccggtggaattcggctggaccagcgcgcagctgggtctcaatttcaccatcgtcatgtcctgcttctgcatcggcggcctggccggcagctttgttacccgcaggctttccgcccgtgttaccgtcctcattggcgcggtgatgtgcttcctgggctatttcctctgttcccgcatcaccgcccagagcctgtggctgctgtatatttcctacggcgggctcatcggtcttggcgtcggcttctcctacaatgccgtcctcggcaccgtggtaggctggttcccggataaaaagggctttgcctccggcgtactgcttatgggcttcggctgtagcacccttatcatgggcaatcttgccgatcgcctcttcaattccgccatgggctggcgcaccgcctacctgctgctgggcgcggccacactggttgtccttctcatcggcagccgctgggtcgtccccaatcctcaaatggccgctccggccggttcggcggcggctcccacccgcagggaatacaccgccggccagatggtcaagaccgctgccttttggctgctgttcttcatcatcgtctgttccaatatgattggcaccggcgtcatcggccattcccgctacatcgcggtggaagccggtgtggccaccggcatcacggcactggtcgtggggctgcagtcggtctgcaatggccttggccgtttggcgttcggcaccctgtttgataaaaagggcaacaccttcgccatgctcaccgatgtcggctgcttcatcctttcctgcctgctgctgctcttctctctgcgcggcggcggggccattccggcggtggccggcctgctgctcatcggcttctcctatggcggcatgcccactatgacctccaccgtcacggccgattgcttcggtacccaaaattacggcaccaacttcagcatcgccaatatgagtatgctgcccgcttcctttggtgctaccattgtcggcgccatccagaccggctccggtacctatgttacggcgttcctggtgttcctcggcgtcactgccgtggtcattctgctggatctcgccttccgtggggccgccaaaaaactgtaa

SEQ ID NO: 501 - DNA, 1740 bp, Unknown
  Unknown gut bacteria
caggaagagaaataccgccagttccgccagaaacgggacggagtggttgaggtgcgtccgaatgatatgctcaattccggtgagatcgtatccgaagttgtgaagatcccgcaggttacgatgaatgcgagccgttttaatacggtaaatcttcagaatgaattggcaaaaaatatgcagcagatcatggatgcgacggaaaaagaagaggtcaacgattccatggatgccattaagaaaatggtggaggagattccttatttacagcttccgcatgagagtgaggagcagaaggaagaaaaatacggacatattgagacggatgaagagatcgacggttctttaaagatcaattttaaagagatgttggcagaggattcggacggacagatcagtctgtacgttccaaaggatccgatggtagaaagacagattaccggtcagatgagcatccaggaagtgctggaagaatgggaaaagacaaagcgtgcggcagaggcagcattgcaggaagcagagcagcgccggttagaatctgcaaaagccagagcacttcaggaagcagaagagatcatggagcgtttagtcgatgtaattcctcagttgaatgcaggtctgtcgccaaaagaattattggaacaggagtatatgcagaatatgccggaaaaagacgaaaaagcagccagattatttcagaatgtcaatgacattcttacaagagagatcgagaaattatccaaagagaataacagcattgatcagatgatagaagagaataaaccagcagaggaatcttttggacaggagatggaaaatgaaatgtcagaagagttatcagaggagattccacaggaactgccgcaggtttccacagatatcggagatttattagtagaagaaccgataccggaggaaattgaagcagcaaaagaactgatgccggaagagccggcaaaacaggaagaacttccgtctatccagataccggaagatgtgatcgaggatgaagatgtaacgatgcatctgacaaaggcacaaaaagagatcttttcttattttgttccgatccagggaatggagcagcagctctgtcaagtgttgaccggagtgaaacggagacttggaagaagtacgaactctacagagggaaatatcatgatccagggaggaccgggcagtggtaagaccgtacttgcaacggatctgatcaaagtcattcaggaggaaaccggactgatcggaggaaagatcggtaagatcgaagccgcttctttaaatcaaaaggatattccggaattgatgaaaaaagtccgcggaggctgtctgatcattgaaaaagccggagagattacgcgcgagacggcagtgaagatgtctcttcagatgtcacaggacaccgcaggaatgttagttattttagaggataccaaagaaggaatccgtaaggcacttggacgcgatgaagaatttgcaaggaagtttaccgaaaaagtcaatataccgatcttttccattgatgaactggtagaatttgcaaaatcctatgcacaggagttagagtacgaaattgatgaaatgggagtgttagcactctataaccgcatcagcagtattgaaaaactcgatgaagcaacaacgctgtttgaagtaaaagacattgtggatgaagcagtggcaaaatccgaaaagggcggattcaaaaaagcgttcagcgtatttgcatccaaacgtcatggacaa

SEQ ID NO: 502 - DNA, 1452 bp, Unknown
  Unknown gut bacteria
atgaagatagcagaaaaattgtttggcacgcatagtgacagggaacttaaaattgtaaatccaatcgtagacaagattgaggcaatgcgggactccatgatggcattgtctgatgaagaactgagagataaaacaaaagagtataagaaacgtttagaagaaggcgagacattagacgatctgcttccggaggcatttgcaacagtaagagaggcagcaagacgtgttcttggcatggagcactaccgtgtacagcttatgggtggtgtggtactgcaccagggacgtattgcggagatgaaaaccggtgaaggtaagaccttggtatccacacttccggcatatctgaatgcattggaaggaaaaggtgtacacatcgttaccgtcaatgattatctggcaaaacgtgatgctgagtggatgggaaaagttcatgaatttttaggactgactgtaggtgtggttttaaatagtatggacaacgatgagcgccgtgaggcatataactgtgatattacttatattacgaataatgaacttggatttgactacctgagagataacatggtcatttacaaggagcagctggtacaaagaggccttcattatgcaattatcgacgaggttgactccgtattgatcgacgaggcaagaacaccgcttattatttccggtcagagtggaaaatctaccagtctttatgaggcctgcgatattttagcaagacaattggtacgaggcgaagagagccaggagttttccaagatggatgccatcatgggaattgaagtggaagagagcggagattttatcgtaaatgaaaaagataaagtcgtaaacctgacacaggatggtgtgaagaaggtagagcagttttttaagattgacaaccttgcagatccggacaacttagagatccagcacaatattattttagcactccgtgcacacaatctgatgttccgcgatcaggactatgtcgttcaggatgatcaggtattgatcgtagacgagtttaccggacgtatcatgccgggccgccgttattctgacggactgcatcaggcaattgtggcaaaagagtatgtaaaggttaagagagaaagtaagacattagcaaccattactttccagaacttctttaataaatatgataaaaaagcaggtatgacaggtaccgctttaacagaggaaaaagagtttcgtgatatttacggaatggacgttatcgtcattcctacgaataaaccggttatccgtgaggacttacaggatgccgtttataagacgaaaaaagaaaaatatcatgcagtagttgaggaagtgatcaaggcacatgaaaaaggtcagccggtattggtcggaaccattaccattgatatttccgaggaaatcagccggcttttgaaaaaagcaggaattcagcataaggtcttaaatgcgaagttccat

SEQ ID NO: 503 - DNA, 1437 bp, Unknown
  Unknown gut bacteria
atgtatgatgtcgtaataattggagcaggggtatctggtagtgcaatcgctagagagttatcacgttaccaggtaaatgcttgcgtagtagaaaaagcagaagatgtatgttgtggtacatcaaaagcaaacagcgctattgttcatgccggattcgatgctgaaaacggatctcttatggcagatttgaacgtaaaaggtaatgtaatgatggaagatctttctaaagagcttgatttctcctttagaaaaaatggatctttagtaatttgcttacatgaagaagacagaccaaacttagaggctctttatgaaagaggaattaagaacggtgtaaaagaattaaagattttagagcatgatgaagtattggcattagagccaaacgtaacagacgatgttgttgctgcattatatgcaccaacaggtggaattgtctgcccattcgaattaaacattgctatggctgaaaatgcagctacaaacggtgttgaattcagatttaacacagaagtaagagatatcgttaaaaaagacggtggctttgaattagtaactaacaacggagcaatctcaacaaaatgtgttgtaaatgcagcaggtgtatacgctgatgtattccataacatgatgagctctaagaagatccacatcacaccaagacgtggtgattactgcttattagacaaggttacaggagatttcgtagataagacaatcttccagttaccgggtaaatatggtaaaggtgtattagtatcacctacaatccatggaaatacaatcgtaggaccaactgctattgatattgaaaataaagaaggaaccaatactactcaggaaggaattgacgagctgatcagcaaagctggttcaacagtaaaaggtttaccaattcgtcaggttatcacttcctttgcaggacttcgtgcacatgaggacaaccatgaattcgtaatcggtgaagtagatgaagcaccgggattctttgatgcagcaggtatcgagtctccgggtctgacaagctcaccggctatcggagttcttgttgcaggaatgttaaaggataaattaaacttacaggaagatccgaccttcaacggaacaagaaaaggtgttacacatctgaactcttgtacaaaagaagagagagatgccttgattaaagagaatccggcttatggaagtatcgtatgccgttgtgaaatgattacagaaggagaaatccttgatgcaatccatagaccattaggtgcaactacattagatggtattaaacgtcgtacacgcgctggtatgggacgttgccaggctggtttctgttcaccaagacagattgagattcttgcgagagaattaggcgtagatcagtcagaaattagaaaatctggacgcgattccaagttcatcgttggaaccccgaaagacagattataa

SEQ ID NO: 504 - DNA, 2565 bp, Unknown
  Unknown gut bacteria
gcagatacggatgtcagcatcagctatgattccgtacagagttatacgggttcagccgttaccccggaagtaacactgatgtataatggcgagctgatggtaaaagatagggactataagattacatattctaacaacattgcagcatcttcaagtgcggcgatcaccatcaccggaacaggaaatttcaaaggaaaagtaaataaggtatttacgatttccagcagtgatatcgcttcggcatccattacgcttgataccgacagttatgtatatgacggaaatccgaaaaaaccgggagcaaccgtaaagctgacagatgataagggaacagaaaagaccctgcgtcttggaaccgattacagtattgaatacaaagacaacaccaatgcaggagaagcaagcgtcgttgtaaaaggaaaaggcaactacaccggaacctgtgagaaaacatttaccatttcggcaagaagcatgagtgactcacagtatgcgagtgagtttatgatccaggcgataccggatcagtattaccttggtaaaaatgaacaggtaaagccgaccatcacagtacagcgggaaggcgaagaactgaaacttggaacagattatacggttcaatactacaataatacaaccgtaagtacggatagcagcaaagcaaaagttaccgtttacggaaaaggaaattacaaggatgaaatatccgcagaatacaatatcgtaaaagtcccgatggacaatgtgacgatcagtgacattaacaactggacaaaattaggaacagcaccaaatccggcagtaaccgttacttataataatgtaaccctccgccgtggaacagattataccatagagtatgtggatgagagcggaaaagcactgaccaatgcggcaaaaggaatgaccggagtagtcagaattacagccacggcagacagtgtatatgaaggaatcacatccaaagatttctggatctgttatgatattgccgacaccttggcaagtgatgtaaaagcagagtatctctataccggaaaagacattgagccggcacctacgatcaagaccacttcaggcaagaccttgaaggcaggcgttgattataccgtaagctataatcaggatacggttaatgccggtgacaagaccataactatttatggaatgggcgagtatgcaggagaaactacctgtgcctataaggttacaccgaaacctttgacagcaagtgacattacctatacagcaacttcaccggtatatacgggaagtactgtgaaaccggaagtaaccgttaagaacggtgatgtaacactgagcgaaggaattgattacgagattgaagaagttacaaatgctgcagccgatgaatatatcaaagcaggtgaaggcaaacgcttaaagatcgtagcaaaatcaggaagtaactatacaggaacgaaagagatcacctatacaattgcaccgcgtccgatagccgatgcggcaggaaaggcagcatcagatatagaagtacaaggcttggatggtttagaagaactttatacaggttctccgatcaccgtcagcggaatcaaagttcttagaaatgcagcagaactgacagagattacagattatgtcattacatatggaaacaacacaaatgcaggaaccgcaaatgtgtacattaccggaaaaggtaattacaccggaatgatccaggaaagttttgacatcaaatatgatttcagcaaggtaacaggaaagaccatgctcgacggtcaggaagagacagaatttgagtatgacggtggacagcagatccgcccgaccatgaagctgacttatgatgatctggcaaaccagatctccaatgaactttcaagcagtgattatgtagtcacaggctatagtggcaatatcaatgcgggcgcagagaatgcagcttctgttacattagagggaagaggattgtacaaaggtacattgactctgaactttactgttattccaaaatatattgattcggaagatatcttagtagcagatgcgatcaacacaccggtttatgatggagaaagccataagatcaacaatctgaccatctatttccgacaggcattggagttaggaaccgattacaacctgacaaaatatgtggattcaggagacaatgacccgagcaatacaaatagtgactgtatcaatgcaggaaccattaccattacggtagaaggtgtcggtaactatcagggaaccagagaagtgaccagatatatcgcacaaaagagcattgaagacagtgatattgaagtaacacagatggcagacatcgtgtacgatggacagccacacaaactgacagcagaccagatcacagcagtttataacagatacaattcaacaccattgaacttaaccagtgcagattatacggttacatcatggaagaacaccggagacgatccggatgaagaagacagcgaatgtattaatgccggaacagttacgatcacgttagaagcaaaaggcaattataccggaacaagaaccattgtatatcggatcattccgaagtca

SEQ ID NO: 505 - DNA, 1209 bp, Unknown
  Unknown gut bacteria
atgtttcaatttaacacagtagaagaagcactggaggacttaaagaaaggaaagctgattctggtaacagatgatgaagaccgcgaaaatgagggcgatttaatctgtgcggcagagtttgccacaacggaaaacgtcaattttatggcaacgcatgccaaaggtctgatctgtatgccgatgggagaagaaattataaaaaaattgcagataccgcagatggtcagcaacaacaccgataaccatgagacggcgtttaccgtatctattgaccatgtcgatacaaccaccggaatttcagcagcggagcgttcgatcacagcaatgaagtgtgtggatgaggatgcgaagccggaggacttccgcagaccgggacatatgtttccactgctggcaaaagcaaacggagtcttagaaagaaacggccacacagaggcaacggtggacttaatgaagttggcaggattaaaggagtgcggactttgctgcgagatcatgcgtgacgatggaacgatgatgagaacgccggaattaaaggagatggcacaaaaatataatctgaaatttattaccatccgtgctttgcaggaataccggaaagttcacgacaaactggtagagcaggtggcagcagttaaaatgccaaccaaatatggaaacttccgcgcatacggatacatcaacaaattaaacggggaacatcatgtggcactggtcaaaggcgatatcggagatggaaaagatgtgctgtgtcgtgtgcattcggaatgtctgaccggagatgtatttggctccgagcgctgtgactgcggagagcagtttgcaaaagccatggaagcaatcgagagagaaggacgggggattttactctatcttcgtcaggaaggacgaggtatcggactgatcaataaattaaaagcctatgaacttcaggaaaaaggaatggacaccgtagaggcaaatctggcgctcggttttgatgatgatgagagagaatactacataggcgcacagatcttacgggatttaggagcgaaatccttaagactgttaaccaacaatccgttaaaaatcgaaggactggaagattttggactggagatcaaggagcgggtgccgattcagattgcattgacaccgtatgacaaattttatctgatcaccaagaaaaacaagatgggacatatcctggattatcaggagaaatag

SEQ ID NO: 506 - DNA, 1929 bp, Unknown
  Unknown gut bacteria
atgtcccagaaagaagaggaaaaggcagaactgtcagccgagaaaaatgctcaggagatagagacatggctgaatggatatgcgacatatttagaggtgacggcgggaacgatggaggctcagaagatggcggagccggaaaacattgcccaatatctgcaggaacttttgcagaaccagaatgaagacggcatcatctatgacatctattttacgtcggaagataaccggatgacggcgggaagcggatatgaagcggacggcagcgtggattttacaaagcgcggctggtatcttgcggcaaaagaaaaggacggagtgcactacgaatctccatataaagatgctgattccggcagatatgtcattacactttcaaaaaaagtggagtgggatggaaaagttgtcggagttttagcagaggacattttcatcgatcaggttgtagagatcgtaaacaaatgcgaattagaaggaaacagctatgcgatgctggtggatcagaatgatggtctgatggtacatccgaatgaaaaatacggatatgtggatgatgaaccggtcaggttaaatgatttagcaggaaatccttataaaaaattatccgaaaaactggaagcagatggaaaaaaggcgcagaacatctggctgaaagattacgatggagtcacaagaggattttttgttggaaaagtaaaaagctgtgactggcatgtggtgatcgcattagaaaaaaaagtgctgtatcaggatgtcaattccatgttgcagggctttgtaattgcaatggcaatttcactggtggtaggaatcgtgatcattacgatcatgacgaaaaaaatcgtagatccgatccggcatttagagcataccgtaacttcaaatgatctgaacgaaagtatacaggtggagtccaaagatgaggtgggcagactggcaaaaggctttaataaaatgctgggtaacttgcgcggacttctttctacatcagaagaagcggccgggaacatcgaagaatcttccatgcagctgcaaaatatcacggacacgatcgtacagggggcaaaacgtgtaaaacaggaaatggaaaatatcaacgatacgatgaatgttcaatatgaaaatgtgcatcagagcgaagaagtactgagtaattttgaacgggaaatcagtcgttttgaagggcagttttccgatatgggaagtactattgtattagccaatgccaaattaacggaaaacatagaagtagtagaaaaacttggaagtgcgacaatggcaaatatggaaaatattaacaccctgcaggaaagtgttaaggttctggagcagaaatcagaaaatatcaccaatattatttccacgatcacaggaatttcaggacagaccaatctgctcgcactcaatgcatcgatcgaagcagcaagagccggagaagcaggaaaaggatttgcagtagtcgcagatgagatacgacagctttccgagcagacaaaagatgccacagaggaaatccgcgatttagtaaccgaaatacaggagcggattgaaaaaacagtatcacagatacaggagtatggacagtccttccgtgtaaatgcagaaatcgcaacacaggtgcaggaggcattttctgccattgaaagtgcaattaagacactgggcgaaatgaatacggatatgtctgaagaattgcaggcatttacgaatgcccagaatgcgatccgaacatcgtttgacagtgtagatgcgaatacctcatcctgtgtggaaaataccagagcggcattaaaagtttccaaagagcaggcacaggtgaccggtgacttagcacaatgggcaaagcagctgcaggagcaggcggatgagctgaaagaaaagacgcagaattttaagaaagtccaggaatacaaagcaagtataagttag

SEQ ID NO: 507 - DNA, 1299 bp, Unknown
  Unknown gut bacteria
atgtcattacaatttgtatttggaccgtccgggggcggaaagtcctattatttatatgaaaaaattatagaagaggcaaaaaaagaccggacaaaggactttttactgatcgtaccggaacagttcacgatgcagacgcaaaaagaactggtagaacgcagtaaaaatcacgcgatcatgaatattgacgtgttaagttttgaacgtctggcatttcgtgtttttgatgaattgggaatgtatcagatacggattttagaagagaccggaaaaaatctgatcttacgccgtttaacggaagaatatggggacagcatgagcgtccttggaagtaatttaaaaaagatggggtatgtcagtgaaataaaatcattgatctcggagtttatgcagtatcagatcacaccggaggatatagaggcatggtgtgaggatgaggataatgcatggtctttccgcctgaagatgaaggatattttagtgatctaccgaaagtttttagagtatttagagggcagttatatcacttcggaagaagtgttagaggaatgtgcaaagacagcaggacgttcggtcatgttaaaggactgcaatctgatttttgacggatttacaggatttacaccggtacaggtcaatctgttaaaaacactgtttccgatgacagaccgggtgtgggcggctgtcacgttagataaaagggtagaccctttttgtgtgaccggaatacaggaacttttccatatgagccagaaaatggtcagaacgctgttagaacttgccgatgaggcaaagtgcgaagtgttagagccgatatgggtagaagacggcagacaataccgttatgggaacgcaaaagcattgctgcatttagaggaaaatctgttccgcagcagtttaaaagcctatccgaaagaacaggaagagatacagatccaaagctgtcagaaccggaaggaagagttagaatttgcggcagcgacgatcagccggatggtaagggaagaagattaccgttaccgtgattttgccattgtatcgggggcagcggcggaatatgccaattatgtcaaagaaatctttgaagcctatgggattccttattttattgatgagaaaaagaccatcctgtttcatccgtttattgaatttttacgggcatcgttagaaatggtagaagaggatttctcgtatgagagcgtgatgcggtatttccgcagcggactcagcaggcagagcactgaggaaatagatcggttagagaactacatacttgcaacgggcatccgggggtatcgg

SEQ ID NO: 508 - DNA, 1821 bp, Unknown
  Unknown gut bacteria
atgtattataataaaggcaatatatataagagaaagtgtacgcataaaggaggaattagtatgtttggaaataaaaatgccggttcaaaagcgcatacgggttctggaaatacaggggaagcgttagaaaagtaccaaaagatctatggtgaaatgggacatatgatggagacaattggttttgatacccagcagctctcctggcttgcaaagaagaacaaagaagcctttgcaacactcgtaacgaaaaaccataagattgcagaattttcaaatgagaatctgacgaaagtagaagaagtagagaacggcatccgtcaggttagcagtagcagtgaagagatcaacagcagtattaccaaggttgaggcagaggctgacaagacactggatcaggtaaatggcggacgtaataccgtcatggagacttatgagatcttaaaagaattagataatacttttaaggtaacacaggagaccaatgaaaatctgttagaatcctctaagagcatccagaagattgtagagtacataaaaaatatttcagagcagaccaacctgttatccttaaatgcaagcattgaagcagcccgcgcaggtgagcatggaaaaggatttgccattgtagcaggtgaggtaggaaaacttgcaaatgagacagacagctttatcggagagatcgagcagatcgtcaagaaattagaagaaaatgtcagcagtgcacatcagtccatcgaacattcaggagattccatcaatcgtctgaatgatatgatgagcaagaccgtagaggttttaaaccagacacagggctctgttgataatatgaaagagagcatggcacagcttaccaatgtttctaacagaaacgtaagtgtgtccgcagatatggaaaatgcactgaatgatttagtggatcacatctcatccagtgataatgagacaagagaatccattgcgatgatcgagagccatcaggcaaagaatgattccttattagaaggctgtgataacttgaacaacatgtgcgagaaactgcagtatctgatgtgtgagatcaaggataaagatgagatcacgatcggaatcaatccgtttacttctccggaagacattaaacagatgtatgctccgatcttagagagaatttttaaatccattggcaagaaagcaaaagttatgattgttaaggactacgattccctcggtgttcatatcaaagacggtattttagatggtggatggttctcaccaatggcatatacaactgcatgtgagattgcagacattacaccggtagcaacaccaaaagtaaacggtaaagattattacaacggatatattattacaagagcagattccggaattaattccatcagtgatctggaaggaaagcatttcggatatgtagataaaggaagtgcatcaggatatctttatgcaagatacagcatccagcaggatggtcatgatccggagaacttcctcggcgaagttacatttgcaggaagccatgatcaggttatcgcaggtgtattgagcggagagtacgatgcaggtgcaacttacaacgaggcttatgagaaagcagagaaaaatggtgccgatatgtctaagatcagaattatttctaagaccggtaacattcagaaggatgcaattgcattctcgaacaagatagatcctgaactgatgaagacgatcaaagatgcatttgtgaacttccacgacttcaacggtctgaccactccggtaaccggattcgtagaaggtaaggattctaactatgatttgattcgtgatgtgcagaaaagtaaataa

SEQ ID NO: 509 - DNA, 1575 bp, Unknown
  Unknown gut bacteria
atgaataaaaagaaagtcgtaattcttgtcctggtcattgttctggcagcaggagctgtaggtggcggaatttttgccttcaaaaagcaaaaggataaaaagacaaaggtggacgtttatccggtatctttaatggatatgggtggcggagatggtaacggagagtcctacagcagtggaacggttacagatgataagtcacaggtgatctatcttgaagacagtgataaagtggcggaggtctatgtcaaagaaggcgataaggtcaaagaaggcgatccattgatgcggtatgatatggaagaagcaaatctcaatgtcgatatgaagaccttagatgtggaaaatgccgaaaatgatctggtgatcgcacagcgtgagttagaaaaactgaaaaatatgactccggtggcagagacaccaaccgtaccggacgaaccggaagagccggcaccaaaaccggaagttccggaaaaagacggagatgcctataacatcatcggaaaatccgcgaagtcctacgaaggaaaaggaacacaggagaaaccataccgttttttatgtacagagaaagcgtatgtaaccggagaatatttgaattacctgaaaaaacattcctatacggcagtctttgaaatccatgaggataacaaaaaggatggagatgtcctgaatgcatggctggtaaacggaagcagtataaaagaagaatacgatgcggaatcaaaatggtctgttgcaagccgacaggaagtaacggatgaagataccacagaaccggataccacggatgacagtgcggatgatgagagtgatagtggtgatgatgaaagcagtatgggatataccgcatcagaacttgcagaaaagatccgtgaaaaagaaaaggagatccgtgaactggatattacaaagcgaaaagcagccttagagttagaggaagcaaaaaaagtatcaggagacggcatattaaaagccagtgtcaatggaaccgtagacacagcatgtgatccgagtgatccgccaaatgacggttctccgttcttagaagtaagaggacaggacagcctctatgtgaccggaacactgagcgagttgatgctaggagaaatccagacaggtcagaaggttcagatcagttcctgggagagcggcaagacctatgaaggagagatcacggagatttccactacaccggtagatggcagcaactacatgggcgatggcaatccaaatgcatcttattatacttataaagccttggtaaaagacagcaaggggctgcataatggagaaggcgtagatttaaatatcagtcaggatgcaaattcgggaagttccgtactgtgtattgaaaaagcatatgtgcgtaccgtagacggtacatcgtatgtgatgaaagaagataagaacggaagattgaaaaagcagaaagtaaagaccggaaagacttactacggtcaggcagtggagattttatcgggcttagacggaactgaatacattgcatttccatatggtaaaaatgtcaaagagggcgtgagagtccgcgagacagatgaattggcatattag

SEQ ID NO: 510 - DNA, 1023 bp, Unknown
  Unknown gut bacteria
atcgttaagacagcattctgcggaccatgcttcggagcaggtgataccccaagcaacaacggactttccattcgtcattccaccagaaacttcccgaaccgcgaaggttctaagttacagaatggccagatcgcatccgtagcattaatggatgcacgttccattgcagcaacagcagcaaacaaaggatatctgacttctgcagcagatatggatacagaatatacaaaaccggcatatcactttgataagaccatctacgagaaccgcgtatttgacagcaagggtgttgcagatccaagcgtagagatcaagtttggtccaaacatcaaagactggccgcagatgagtgctttaccacagaacatggtattaaaagtagtatctgagatccatgatccggttacaacaaccgatgagctgatcccatccggagagacttcatcctaccgttcgaacccacttggattagcagagtttacattatccagaaaagaccctgcttatgttggaaaagcaaaagaagtacagaaagcacagaaagccattgaagaaggcaactgtccgttagaggcacttccggaattaaaaccggtgatggataccgtacggaaaactttcccggatgcaggcgaaggcaatcttggtgtaggaagtacgattttcgcagtaaaaccgggtgacggttctgcccgtgagcaggcagcatcctgccagaaagtacttggcggctgggcaaatattgcaaatgagtatgcaacaaaacgttatcgttccaacctcattaactggggtatgcttccattcttaattgaagagggagaccttccgtttgcaaatggagattatctttttattccggagatcagaaaagccgtagaggaaaaggcatctgatattaccgcttatgtcgtaaaaggagatcacttagaagagttcaacttaaagatgggtgagcttaccgatgatgaaagagagatcatcttaaagggatgcctgatcaattataaccgcgtaaattaa

SEQ ID NO: 511 - DNA, 1260 bp, Unknown
  Unknown gut bacteria
atgccttttgcttactcaaaacatggagggaaagaaatgaagaaatttgcagcattactgcttgcaggggctatggcattttccatgatggcatgcggaagcagcagtgacaagaaagcagacgacaaatcatctgacagcaaaaaggcagagtctgcaaagagcacgtcagcgtcagacatcaaagtcggagtaatttacatcggcgatgagaacgaaggttacacagaggcacacatgaagggtatcaaagagatgaaagaagagttaggattatctgatgatcagatcatcgagaagactctgatccctgaagatgagacatgctatgatgcagcagtggatttagctgagcagggatgcaacattatctttggaacaagttttggacatgagtcctatctgcttcaggcagcagcagaatatccggatgtacagttctgtcacgcaacaggatatcaggcagcaagcagcggacttgacaatatgcacaactactttacagcagtttacgaatcccgttatgtatccggtgttgtagctggtttaaaattaaacgagatgatcgaaaatggtgatatcaaagaagaccagacaaagatcggttatgttggagcttacccatacgcagaggtaaaatccggttatacagcattcttcttaggagtaagaagcgtatgcccatccgcaaccatgaaagttatctacacaaacagctgggcaagtattgaccttgagaaagaagcagcagagtccttaatcgcagacggatgcgtattaatttctcagcatgcagatacaacaggtgcttctaccgcttgtgaaaaagcaggtgttccaatcgtaggatataacgtatccatgatcgcaacagctcctacacaggcattaacatctgcatccatcgactggggcccatactacacatatgcagtaaagagcgttattgatggaacaaagatcgatacagactggtgcaaaggctatgacgatggcgctgataagatcacagagctgaacgacaaagcaattgcaaagggaacaaaagagaaagtaaaagaagtagaggatgcgatcaaagatggctctttacatgtatttgatacttctacatttacagtagatggaaaagaacttgattcctggaaagatgacaacggaaatgagtacatcaaagacggttacttccacgagtcagagttacattctgcacctgcatttgctatcaacattgatggtattgagagcgtagagaaataa

SEQ ID NO: 512 - DNA, 1917 bp, Unknown
  Unknown gut bacteria
atgatactatccgttcagaatgtcagcaaatcatttggaacagacgaaattctaaaaaatgtgtcttttcatattgaagatcatgaaaaggcagccgtggtcggcatcaatggtgccggaaagtccacgcttttaaaaattatagtaggggaactgactcctgacaccggagaggttatcactgcaaaaggtaaatccttaggctatttagcacagcatcaggatttagagggtgacaggaccattgaagaagaattgctttccgtaaagagtgatgtgatcgcaatggagcaaaagatccgtgcgatggaaaaacagatgcatcatgtagagggagcagaattagaaaaacttttagaggactataaccgtatgcatcatcagtttgaattagagggcggttacagttaccggagcgaggtctacggtgtcttaaacggactcggtttttctcaggaagattatcagaagaagatcagccagctctcaggaggacaaaagaccagagttgcgcttggaagactgcttgttacaaagccggacatcatcctgttagatgagccgacgaaccatctggatatgaactccattacatggttagaaacctttttgatgaactacaagggtgcggtagtcatcgtgtcccatgaccgttattttttagaccgtgtcgtgacaaaagtcattgaagtgtcgctgcatcaggcgcaggtctatgaaggcaattattctgaatatgccgtaaaaaaagaaaaagtccgcgaggcacagctaaaagcctattacaatcagcagcgggagatcaaacatcaggaagaagtcattaccaagctgaaatcctttaaccgtgaaaaatccataaagcgggcagagagccgtgaaaagctgttagataagattgaccgtttagaaaaaccggtggaagaacataccgatatcaagatcatattagagccgaatatattaagcggtaatgatgtcttaagtgtcgagggtttagcaaaatcttttggcagccagaaactgtttgaaaatctggattttgagatcaagcgtggagagcatgttgccctgatcggaaacaacggaaccggaaaaacaacgatcttaaagatcttaaacggaatggtcaaagaggatgcgggagtcatccggcttggaagcaatgtctatatcggatattatgaccaggagcatcaggtactccatatggaaaaaacactgtttgaagagatcagtgatgcatatccggaactgaacaatacacaggtgcgaaataccttagcggcatttttgtttaccaatgatgatgtctttaaaagaatcggtgatctgagtggtggagagcgtggacgtgtgtctttggcaaagctgatgcttggcaaggcgaattttttaattctcgatgagccgacgaatcatttggatattttttcaaaagaaatattggaatcggcattgaaccactatacgggaaccgtctttttcgtgtcccatgaccgttattttatcaataagacggcacaccggatactggatctgtctaacggagtgctgacaaattatctgggaaattatgactattatatagaaaaacgtacagagcaggaaacgttaacgccgtcagatgcagaaaccgtttcaaaagaaaaagcagagacagagaacaaacaggactggcagaaacaaaagcaggaacaggcacgccgcagaaaaattgccaatgaactgcaaaaagtagaagccgagatcgaaatgtgcgagcagaaaatcgccgagatcgatgagcagtgtcaggatcctgcgattgcagtaaattccgcaaaattaaatgaacttggaagcgaacgagccgttttatctgaaaaactagaagcactgtatgagcagtgggaagtgctgtcagaagatagttaa

SEQ ID NO: 513 - DNA, 1605 bp, Unknown
  Unknown gut bacteria
atgaataaaggaatgtatacaaaacttgcgatcaccaatatcaaaaataacaggcagttttatttcccatatctgctgaccgggatcataaccgtagccatgttttacatcatgtgcgcattagaaagcaatccggggatacagagcatgccgggagcaaaggatttgggactgatcctccgtctgggaatcggtgtgatcggaatctttgcagtcatcttcctgttttatacaaacagtttcatcataaaacgcaggaaaaaagaactcgggatctataacattctgggaatggaaaaaagacatattgcaaaaattttatcaaaagaagcattttttacagcaataatagcaattggcggaggactggtaacaggcgtattatttcataagttagcgtgtatgctcctctaccgcatgataggatttaacggaggcatcacattttccttttcaaaaaaaggtgttatgataacagccattctgtttgcgatcgtctatctgttaacgtacatttatgatctgtttcaggtgcagcttgccaatccgatagagcttttacagtcaggaaataaaggtgagcgggagccaaagaccaaagcgatcatggcagtgcttggagttctctgccttggcacgggatatttcatagcaattacaactaagaatccgatcaaagcactgaccctgttttttgtagcagtcatccttgtaattatcggaacctatctgctgtttacggcaggaagcatcgctttgttaaaaattttacgccgcaacaaaggatactattatcagaccaagcattttacatccgtatcgggaatgatctaccggatgaaacaaaacgcagtgggacttgcaaacatctgcatcttatccaccatggtattggtagccgtatcgacaacagtcagtctctatgtaggtgttgaggatatcatgaaagaacgatatccaaatgagatcaatatcagagcctattatgatacaggagcaccggcagaagagagtatcgcaccgatcgtggaaaaaagtgtcaaagagagtggaagaaagatccgacatgaggaagactatcttgaattatattttgcggcgatcaaagaccagggacagtattctttagataaagaaaaagtaaaaacagccggcgaccgcgtcagcggatttgtggtattgaccagagaagattgtaaaaaaaagtataacgaagaaataccggagctggcagaaaacgaagttgctctgttcacgatcaagaagacagacatggacacactcgtattagaaaacagaagttaccatgtaaaagagatcaaacagtttcaaaacacagaagatttcgagaccatagccgatatgatggatgagtattactatgttattgtaaatgatgtgcaggacatggaacgcctgtggcagttacaaaaagacatctatcaggaaaattccagctccatctcaagacaagtccgactggatatagatggggacagggagcagaaaaaagaatgttttgaaaacatcaagaccgcactgggaccggaacaggcaaaagcaaggatattgatcgacagccgccagtcaaatctggatgaattt

SEQ ID NO: 514 - DNA, 1299 bp, Unknown
  Unknown gut bacteria
tgtaagacagagagagaatgtacgagcttttttgaggcaaaagcaaaagaagcaggctatcagttattagaggatgccatcaaagaaaagaagagcctgaagccgggagataaagtttatgtaaatcagatgggaaaatccattgccatgttcatcatcggtaaagagtcgctggaaaaaggcatgaacatcttaggtgcacatattgattctccaagattggacttaaaacaggtaccgctttacgaagatacggaaatggcaatgtttgatacacattactatggtggtgtcaagaaatatcagtgggtaacactcccgcttgcacttcacggagtagtggcaaagaaagacggaaccgtggtcaacatcagcattggtgataaggaaaatgatccggtattcggagtcagcgacttactgatccacttagcaggcgaccagttagagaaaaaagcatccaaggtcatcgagggggagaatctggatgtcctgatcggaagcattccggcagacgtagaagaaaaagacaaagtaaaagagactgtcaaagcaaatgtactgaatatcctgctgaaagaatatgatatagaagaggaagatttcttatctgcagagattgaagtcgtaccggcaggcgctgccagagattatggatttgaccgttccatggtcatgggttacggacatgatgaccgtgtgtgtgcttatccgtctttccgtgcaatgctggaggtagatacaccggaagtgaccagtgtgtgcctgttagtcgataaagaagagatcggaagtgtcggtgcaaccggtatgcagtcacgtttctttgaaaatgcagtagcagaagtgatggagctttgcggtcagtattccgagttggcactgcgccgtgcattaagcaattcacaggtgctttcttccgatgtcagtgcagcatttgacccgaattacccatccgtatccgaaaagaaaaatgcagcatatttcggaaaagggctggtatttaataaatacaccggagcaagaggaaaatccggctctaacgatgcaaatgcagagtacatggcacatttaagagccgtattagataaagaagaagtcgcataccagacttcagagcttggaaaagtagaccagggcggcggtggaaccattgcctatattcttgcaaactatggaatgcaggtcatcgacagtggtgtggcagtattaaatatgcatgcaccttgggagattatcagcaaagtggatttatatgaagcattccgtggatatgtagtattcttaaaggaagcatag

SEQ ID NO: 515 - DNA, 1371 bp, Unknown
  Unknown gut bacteria
atggggaaagctatgggtaactttacagaactggatgcgtacctctttggacagggaacgcattacgacatctataagaagttaggagcacatctgtctgtagacggaaagaaaaaaggtgtgcggtttgctgtctgggcaccaaatgcaaagagagtatttgtcattggagaattcaatggctgggatgagacagcgaacgagatggagcgtgtagaaccggagagtatcggtgtgttcgagacgttcgttccgaatatcggaacgggcgttctctacaaatatctgatagagaccgcggacggtactctgctgtataaggcagatccttatgcaaacgaggcagagcttcgtccgggaaccgcctcaaaagtagcagatatcgagcattttaaatggacagacagcaagtggatgaaagaccgtgccgcatgtaaggatccatatgaaaaaccgatggcgatctatgaagtacatccgggttcctggatgcgtcatccgggacgagaggatgagggattttatacataccgtcagcttgcacatgcgttagcggactatgtaaaagagatgggatatacgcatgtagaattgatgggaattttggaatatccgtttgatggctcctggggctatcaggtaaccggctactatgcaccaacttcccgctatggtacaccggaggattttgcatattttgtggactatctgcataaaaaaggcattggtgttatcttagactgggttccggcacattttccaaaagacgcgcatgggctggcagacttcgatggaacaccgatctatgagtatgctgacccgcggatgggagaacatccggattggggaacaaagatttttgactatggaaaaagcgaagttaagaatttcctgatcggaagtgcactgctttggatcgaacactaccatattgacggactgcgtgtggacgcggtagcttccatgctctatttagattacggaaaaaatgacggagaatggataccgaataaatacggcgagaacaagaatttagaagcgatcgaatttttccgccatatcaacacactgatcttaggcagaaatccgggaaccgtgatgatcgcggaggaatctacggcatggccgcaggtaaccggcgaggcgcagaacggcggactgaattttacttacaaatggaatatgggctggatgcatgactttttggattatatgaagctcgacccatattttagaaaagataaccatcacaagatgacctttgcaatgagttacaatggaagtgagcattatattttagtgctttcacatgatgaagtagtgcatttaaaatgctctatgatcaacaagatgccgggtgaagaagcagat

SEQ ID NO: 516 - DNA, 1941 bp, Unknown
  Unknown gut bacteria
atgaggaaggaaagagacatggcaggaaaagagaaatatgatgccggcagtattgcagttctggaagggttagaggcagttcgtaaaagacccggaatgtatatcggaagtgtaacaagaaaaggcttaaatcatttaatatatgaaattgtagacaatgcggtagatgagcatttagcaggcaactgtgacacgattcatgtcaccttagaggcagatggttcctgtaccgtagaagataacggacggggagtgccggttggaatgcatgaaaaaggaattccggcagcacgtctggtatttaccacactgcatgcgggaggaaaattcgacgattccgcatacaagacaagtggtggtctgcatggagtcggttcttcggtagtcaatgctctttctgaatatatggatgtacagatcagcagggagggtgcgatccaccatgaccgttacgagcgtggaatccctgtgttagagttagagaacggacttcttccggtaatcggaaagacaaaagcgaccggaacgaagattaattttcttccggatgcggagatttttgaaaagacgaggtttaaagaggatgaggtcaaaagcagattacatgagacagcatatctgaatccggcactgaccattatctatgaggacaagcggttagaagaaccggaaaagatcgtattccatgaggaggatgggatcatcgggtttgtcagagatctgaataaaaaatgtgaaacacttcacgaggtggtctattttaaaggcgaaaatgaaggtattaccgtggaggctgcatttcagtatacaacggaattccatgaaaacattttcggattctgtaacaatatctataatgcagagggcggaacgcatattacaggctttaaaaccgtctttacgagtgtcatcaaccagtatgcgagagagcttgggatattaaaagaaaaggatgcaaactttacgggggcagatgtccgaaacggtatgccagccgttgtatccatcaagcatccggatactcgatttgaaggtcagaccaagacaaagttagacaatcaggatgcctccagggcaaccgcaaagattaccggagatgagatacagctttattttgataaaaatttagaggatttaaaggcggtcatttcctgtgcggaacgtgcggcaaaaatccgtaagacagaggaaaaagctaagaccaaccttttgacaaagcagaagttttcctttgattctaacggaaagttagcgaactgtgaaagcagggatgcctctcagtgtgaaatctttattgtcgagggagattccgcgggcggttcggcaaagacagccagaaaccgtaattttcaggcaattcttccaatccgtggaaaaatcttaaatgtggaaaaggcaacgatcgacaaagtacttgccaatgcagagatcaagacgatgatcaatgctttcggttgtggattttcggaaggtttcggaaacgattttgatatttctaagctgcgttatgacaagatcatcattatggcagatgccgatgtggatggagcgcatatctccaccttgctgttaacactgttttatcgttttatgccggaactgatctcagagggacatgtttatatcgcgatgccgcctctctataaagctattccatcgaaagggcaggaagaatatctctatgatgatgctgcattagcgaagtatcgtaagagacaaaaaggcaattttaccctgcaaagatacaaaggtttaggagagatggatgccgaacagctttgggagactacgttagacccaaagaccaggatgttaaaacaggtggtcattgaagatggaaagatggcatcggatgtaaccgagatgttaatgggctcggatgttccgccaagacgtgcttttatctatgagcatgcaaatgacgcggaactggatgtatag

SEQ ID NO: 517 - DNA, 1227 bp, Unknown
  Unknown gut bacteria
atgctttctgcatttttctcatcggcagagacagcactgaccaccgtcaacaaaatacgaatgagaaaactgagcgatgagggcaatgaaagggcaaagacagtattaaagattacggagaactcaggaaagatgctgagtgcaatcctgatcggaaacaacgtagtaaacctttccgcttcttctattgcaactacactggcaattgatatgttaggcagtaagggagcaggaattgcaaccggaattgtaacactgctgatcctggtatttggtgagatttcaccgaaaacaatcgcaacgatccatgcagtgccgatttcaatggcatatgcgaatatcatctattggctgatgaaactgcttacaccggtcatttttgccgtaaaccagattgcaatgttcttcttaaagattttgcgtgtagacccgaatacggatcagaacaagctgacagaggaagaattgcgtaccatcgtggatgtttcccatgagacaggtgtcatcgaaacagaagaaaaagacatgatcaataatttgtttgattttggtgatgcggaggcaaaagaggttatggtaccgcgtatcgatatgacttttgcagacatcaacaatacctatgaggagctgatcgaactgttccgaaaggataagtttacaagacttccggtttatgaggacagtaccgataatgtcatcggtattatcaatatgaaggatctgctgctctatgatgacaaggagacattccatatcagggatattttaagagagccgtattatacttatgagcataaaaataccgcagagctgtttatggatatgagaagctcatcgatcagtattgcgatcgtattagatgaatacggggcaaccgcaggaattatcacactagaggatttattagaagagattgtcggagagatccgtgatgaatatgatatagatgaggtagactcgatcgtatggcttggtgaccgcgagtatgaggtgcttggttcacagaatttagaagatttatgcgaggaattaggactgaagtttgaatcggaagattatgattccattggcggatatgtggtcggcttactggatcattttccaaagccgggtgagagcatcacaacggaggatggagtcaaactgatcgtcgaggcaatggataaaaaccgtgtggaaaagatacgcttgatcctcccggaaccggagaaagaaaaagatttgtaa

SEQ ID NO: 518 - DNA, 1464 bp, Unknown
  Unknown gut bacteria
atcctgataccgacaatttacacggcaatttttgtgggagccatgtgggacccgtatggaagggtggaacatcttccggttgcagttgtaaataaggacgtaccggtaacttacaaagacaaagaactgagtgttggagaagacctggtcaaaaatctgaaagaaaacaactctttggattttaactttgtagatgcagatacggcagcggcagggcttgcgaacggtacctattacatggtgctgaccataccaaaggatttctcaaaaaatgcaacgactctgacagagaagaatgcaaaaaagatgatgctgtactatgaaaccaatccgggacagaactacatcgcatccaaaatgagtgagacagcggtaagcaagattcagacaaacattcgtgaaaagatcacaacgcagtatacggaaactgtatttgaacagttaggaaccatcggagatggttttgtagaagcggcagatggagcattacagatcacagacggtacagaccagctgttagacggaaacggacagcttcaggatggtatcgaaaccttaaaggacggaaccgttgctttagaagatggaagcaccagtctccagacaggaatcagtgcgtatacacagggtgttggaacactgaaagccggagcagatacgttaaatggcaagagttcagatttgaacgggggtgtcacaagcgtttctgaaggagttacctctttaaagagcggaagcggagcaattttagccggtatgaatacaatgtctgatgagcttgcaaagagcctttccaaagaaaacatgaaaaacatggaagcattgcggggcggtcttacaagcatcaacaaagggatccagacattaaataccgaacttcagaaaatggatgtagaaggtcagttgaatacgacagtgagtgcagtaacaggcggtcttacttccatacagggaagccttttaaattcccagacacatatgggtgagctgcagacagccattggaacgttaaaaatgcagttattggcatccggaaaaacagaggatgaagtaaatgcaatgttgttaccgctgatgcagtccgcacaggcggtcggaggagatgtcagcgcgatcgcaacgacaacatccggtctggcagattccttaaagaacagcaatctatcggaagttacacaaaaagtagatacgttaaagagcaatgtcagcacactggcagaaaattctgatgtggtattaccgaacagtagcacaacgattgaaaagctgacatccggtttacagggagtgcagtccgcattggataagaccggagaaacggcagaccagatgggactcatccaggcaatgggtgcagtgaataccggactcggacagttagataccgggatcaatggtgaaaaaggcttaaaagcaggcgtgaaagcatatacagatggtgtatcccagcttgcaggtggagca

SEQ ID NO: 519 - DNA, 1005 bp, Unknown
  Unknown gut bacteria
gagaaaggaaaggataacagtatgcaggaattcagtcaatgggatggttttgaaggaagacgctggaaagagggcgtaaatgtcagagattttatccagaacaactatacaccatatgaaggtgatgagtctttcttagaaggagccaccgaggcaacagacaagttatggggcagattacaggagttacagaaggaagagcgtaaaaaaggcggcgttctcgatatggagaccgaagtagtatcttccttaaccgcttatggtcccggttacattgatgaaggattaaaagatttagagcaggtagtcggtttacagaccgataaaccgttaaaacgtgcttttatgccatatggcggaatcaagatggcagagcagtcctgccgtatgtatggctatgagccaagtgaaaaattacatgaaatttttacaaaataccataaaacacataacgatgcagtgtttgatatctacacaccggagatgaagcgtgcacgtcacagccacattttaacaggacttcctgatacatacggccgtggaaggatcgtaggcgattaccgccgtgtggcactttacggtattgactttttgatcgagtctaagaaaaaagactttgccaaaacagagcgtcacggaatgagaagaaaagacttccagatccgtgaggagattgcagagcagatccgtgcattaaacggcatgaaagaaatggcacagatctacggatttgatatttccgtaccggcaaaaaatgcaaaagaagctgtacagtggctttattttggatatcttgcagccattaagacacagaacggtgcagcaatgagcgtaggccgtatctccacattcttagatatttatatcgaaagagatatcaaagcaggaatcttaacagagagcgaagcacaggaactgatcgaccatatgaccatgaaattccgtatggtaaaattcgcaagaatcgagtcctataatcagttattttccggtgacccggtatgg

SEQ ID NO: 520 - DNA, 1734 bp, Unknown
  Unknown gut bacteria
atcctgctcgcaggaattagtgggatcccaagaaaagcgggaacagatcagcagacatatggtacgaagtcacagacgaaggacacggctgctcatacaacctatcacaacatatatcagcagttttccgaactttggcagggagaatatgtacagggagaggtacaggaatatgccatcggaacgctggatacagccgatatggcaagaacgacagcgggtaacgaagaaagttcagatgctgttcggagtgagacaaaaaaagaaagcagtgatcagacagagcatggagttactaatacacaggaaaaaaatgtggatgaaggagatgttataaaaaacgatggaagatacctctatcaggtgatttcagaagaaacgaagactgccacctcggggaattatgccattcagatcacagatactcaaaacggattgaagcgaaagagcaagattcgtggctttgaaagtatttctgatttttatatatggaaagaccggctgatcgtcatagaatcctgtgaattaaataacagtgacaccagtacgacagaagatattgctttgttaaataaacagatgtatacaggaactgcttattgtaagattcatatctatgatacgaagaatcgcaacaaaccaaagaaaatccatacttttacggtaaaaggcagctatgaggattccagaatttccgatggatatttctacttttttgcgcagaacatgacgcagaaaccggataaagaggagaattatgaggagtatatcccggtggtagatggaaaattgttgagtgaaaaagatatttttctgccggaggactgtttaagcacttcctatctggtcatggcatcgattgatctaaaacagccggagaagtttcaagataccaaggcagtagtgaccggggcagagctattttatgtaagtgaaaaaaatatctatgtgacagacagcagttatccggactgggaagaagcaggaacgcagagcgacagtacgaaggtcagcaggatttcttatcgggatggaaaaatgaaattagaggcatccggaagtgttgaaggagttttgacggatgatatggcaatgagtgaatatcagggaaatcttcggatcgcaaccacaaagacggcatacgggatcgagaaagtgacggacgatatcgatggagagatcatcggatatgatacgcaggaaagcacaacgtataaccagctttatattttaggaaaaaatctgaagatcaaaggaaaaatagagaatctcgcaaaaggcgaagagatttatgcagtccgttttttgggaaataccggatatgtggtgacatttcgacaaacagatccgcttttttccatagacttgtctgacccgaaaaaaccgaaggttttaggaaaattgaagattagtggtttttccgaatatctgcatggatacggcgaaggaatgctgttaggacttggaatggaagcggatgaaaaagatggagcggtagaaggaatgaaactgtccatgtttgatatttcagatccttccgatgtaaaagaaacggcaaaagaagatctgacagagtatggctacgcaggagcactgtatgattataaagaggtcttagcggatcaggaaaaaaatctgataggctttttagcaagcggatatgacaaaaccgataaataccgctgtgactatctgctgtattcttatgagaacggaaagtttgtacagcggatg

SEQ ID NO: 521 - DNA, 1089 bp, Unknown
  Unknown gut bacteria
ccgttgcggctgaatactcacataggaataggtattccgtgggatttagaccggaacaatggtggagtaaccgtacttcctccatatgaaaagagcaataacagtgaatggtatacaggaacagcgaatgccatttaccagaatatgaattacattgatacctatgatccggaatatgtcctgatcttatccggtgaccatatttataagatggattatgaggttatgttggatttccataaggaaaataatgcggatgtaaccattgcagcaatgccggtaccgatcgaagaggcaagccgttttggaatcgttattacagatgaagaaagacgtattacggaatttgaggaaaaaccggagaagccgagaagtaatctggcatccatgggaatttacatcttcacatggaaagttttaaaggaagccctgatctctatgaaggatcagagcaactgtgacttcggaaagcatgtaattccgtattgccacagcaagcagcagagactgtttgcttatgaatacaacggatactggaaagatgttggaaccttaggctcttattgggaagccaatatggaactgatcgatctgatcccggaattcaatctctacgaggaatactggagaatctataccaagagtgagatttttgaaccacagtatttatcagaagatgccgtagtggaaaagagtatcatcggggaaggcagcgagatttacggagaagtacatagttccgtgatcggagcaaatgtacggatcggcaaaggcagtgttgtccgtgattccattattatggcaaataccacgatcggcgagaatgtcattatcgataaatccatcgtggcagagaataccgagattgcagaccgtgtggttttaggtgaaggcgaagaagcaccgagcaaattaaatgagagtatttatgcattcggacttgttacggtaggagagaattcctatataccggaaggagtaaagattggtaagaatacggcaatttccggtgtaacagaactttccgattatacagaaggagagttgaaggcaggcgaatacatcattaaggcaggtgagatacaatga

SEQ ID NO: 522 - DNA, 924 bp, Unknown
  Unknown gut bacteria
agaaaggaagtgagctgggtgcagaacctgatagcagtgtttgctgcattttgggacaaatatatgttttggatcaatcgtccggatgtgacagttacagatattgtagagatcctcattatcgcatttttactgtatcatatcctggtatggtttaagacaaccagagcatggacactgttcaagggaatccttgtgattctggtctttattttgttggcagcgattttccagatgaatacgatactctggattgcggataagacgatcaatgtgggaattatcgcaatcttagttatttttcagccggaaatgcgaaaagcacttgaacagttaggaagaaagcgttttatttcgacattgttttcttttgacaatggaaaaaatacggtggagcgttatagcgagcgtaccgtaaacgagatggtaaaagcatgttatgagatgggtaaggtaaagacaggagccctgatcgttatcgagaacgatgtccagcttggcgaatatgagcgaaccggaattgagttagattccattctttcaagccagcttttgatcaatatttttgaaaaaaacacaccattgcacgatggtgcgattattgtacggggaaatcgtgtggtagcagcaacctgttatctgccgctttccgataaccttgcactgagcaaagatttaggaacaagacatcgtgcagcagtgggaatcagtgaagtcagtgattctatgacgatcgtagtatcggaagagaccggtaaagtgtccctggcagtagaaggagaactctatcgaaacatagatgaggaatttttgaagaaaaaactttccgaaggacatctgaaagatgtggaaaacggaaagctcatagattggaagaggaggttgcagaatgttaaaaaagctaaagaaccttctgacaaataa

SEQ ID NO: 523 - DNA, 1938 bp, Unknown
  Unknown gut bacteria
gtagtacaggatgtggattccgtatttgatattgatacgatgaaagcaatccgtgatagaatttgcgagatttcccataagacctatcagacagatgctttagatgacgtatcgatccgtctgattacggatcatatccgttccgcaacctttatgatctccgatggaattatgccatcaaacgagggaagaggatatgtactgcgcaggattatccgccgtgcagcaagacatggcagactgctgggtatcgaaggacagttcttggcagaactgagcaagactgtcattgcagagagtaaagacggatatccggaattagaggaaaagaaagactttatcttaaaagtattaagtcaggaagaagaaaaattcaataagacgatcgatcagggacttggtattttagaagacatgcaaaaagaaatggaagcagcaggtatgaaggtgctttccggcgagcatgcatttaaattatatgatacctatggattcccgatggatctgacacaggagatcttagaggaaaaaggctttaccattgacgaagagggcttcaaaaaatgcatggaagagcagagagaaaaagcccgcagttccagaaaagagacaaactatatgggagtagatgcaaccgtatatgatgagattgacacttctattaccagtgagtttgtcggctatgacagattagtacatgagtcaaagatcacggttcttaccacagaaagagagatcgtagaagcactttccgatggtgatatgggaactgtgatcgtagagcagacgccattttatgcaactatgggtggacagtgtgcagaccacggatttatcacaacaaaggatggaaaattccaggtagaagatgtgatcaagctgcgtggtggaaggatcggtcatgtcggaaaaatggtcagcggtatgttaaagaccggtgatgtggctacattagaagttgaggagaagagacgctccctgacaagaagaaaccacagtgcgacccatttattacaaagagcgctgcgtgaagtcttgggtacccatgtagaacagcatggttcctatgtagatgataagagacttcgttttgacttctcacattttgcagcaatgactccggaagaaatcgcaaagacagaagctctggtaaatgaaaagattgccgaggcacttcctgttgaaacgaagatcatgtccttagacgaagcgaaaaagactggtgcaatggcactctttggagaaaaatacggtgagagtgtacgcgtagtcagcatgggagatttttctacagagctttgtgcaggaacacatgtcgacaatacaagcaatatcagtgcatttaagattgtatcggaatccggtgtcgcagccggtgtacgccgtattgaagcactgacttccgagggagtattccattactacgacaccttagaggacactttagagcaggcttctaaattagtaaagacaaacccacagggtctggtagaaaaattagagcacttgatggcagagatgaaagcacttcagagcgagaatgaatccttaaagagtaaggcagcgaaagaagcacttggcgatgtcatggatcaggtggaagaagtgaagggcactaagcttttagcagtccgtgcagacggtgtggatatgaacggcttaagagatctaggcgaccagttaaaggaaaagctgggtgaaggtgttatcgtattagcatccgaatgtgacggaagagtcaaccttgttgccatggcaaccgatgcagcaatgaagtccggtgctcatgcaggtaatctgatcaaagctattgcaaaaaccgttggtggcggtggcggcggtcgtccgaatatggcacaggcaggcggaaagaatccggcaggaatcgcagatgcattagcacaggcaaagagtgcattagaagagcagttaaaataa

SEQ ID NO: 524 - DNA, 1293 bp, Unknown
  Unknown gut bacteria
acgaaagatctgagcaagagtgtgcaggcacagaaaatggcagcagagaaattagaccctgcttatgatcaagtgtatgacaatatgaaagatttattagaccttaaggaaaaagaaggtaatgccttaaagagtttattgttaaaagcaatcaatatcgcagtgatcatattaattgttgtattaatcatcagtatcagcatttctaatgttttagcaagaaccgtatcaaacgcgatcgcaacaccattgcaggagcttgcagagcggctgaaagcatttgcaaaaggagatttaagcagcgagttcccggttattgatacacaggatgaggttgcggatattgaaaacgttgctcgtgagatggcgcagaatctggacgtgatcatcgaagacatcaaatattgtatgggtgaaatgggaaatggtaactataccgtaagaaccagtgcagaagaaaagtatacaggagattttgaggcacttttattatccattcgtcagatgcatagaaatatgaacgataccttacaccagatagatgattcttccgttcaggtacttgcaggttccgagaatttagcacaggcggcacagaatcttgcagaaggtgcaacggaacaggcgggagcagtagaagaattgttagcaacctttagtgatattacatccggtgtggaaaagacggtgcagcatgtaggcgaagcaggaagcatgtcacgccagtatgcggaagatgcgaaaaagagcagtgaagaaatgaaagacatgatggcggtcatggcacatatgagtgagacatcacaaaaaattggcagcatcatagatgagatagaagagatcgcatcccagacaaacctgctttcactgaatgcaagtattgaggcagcaagagcaggcgaagcaggaaaaggctttgcggttgtagcgagccagatcggaaaacttgcagacgagagcgctcagtcagcagtcaacaccagaaatatgatcatgaccgtcattaatgaggtagagagcggaacaaatacggcacaaagaacagcagagacactggaagaagtagtacagggagtcggacagatcgcagacgtaacagaagaggcagaagagctggcaaagactcaggcagaagcaatgcggcaggcagaagcagcattgaatcagatatccgaggtcgtacagtcgaactcagcgacagcagaagaatcctcagcaacaagcgaagagctttccgcacagtccgaaggattgaaagatttagttggtaagttccagctggatgcagtataa

SEQ ID NO: 525 - DNA, 1245 bp, Unknown
  Unknown gut bacteria
atgacggtagcagtggctgcctgtgggaaatcagggaataaagaatcatccaaaaataaaaacggagaagagacagagaccgaagaagcaaaaccggtatatcagtttacgatttggggaagcaaagcagatctgtcagatgaaaagggaagctggttaaagaccagatgtgatatgtttgcggcaaaacatcaggatgcagaattagaatttaagtatgcagcctatacagaagaaaaagcggcaaagaagatggaaaaaaaccgcgagaaggcaccggatatttttatttttaacagtgcacagaccgcagaacttgtcgagagccgtcttttgacaagactttggggagagaccgaagattatgtactttcctcgaatgcaacgagcattggtgatctgtcgaaatatgcgcagaaagtatatggaatcccggtagaggcaaacccatatgttttatattatgataagagaacattatcccaagaggatgtgcagaatttagatacgattcttgcaaaaggagtgctggcatatccattagacgatgagaactatcgaaacgcgttttatcaggcacagaatgtcgtagaggtgccggagcaggatgaaaacggaacagacggtacagaagacggcacaaaagataatactcagacagatgacgcagcacaggacaacacacaaacggatgcagcgcagccggaagaatccacacaggataacacacagtcagaaaatggcgagcagaaggaatccgagccattagcaaaggaaacagtagatgcatggcttgcaacattccgttccaatccgcaggtattaaacgataccgatggaaatgcggggatcacaggactgaaagacggaaccgtacaggcagcagtacaggatgcgtcagcttatgacaagatgaaagaagccttaggagaaaatctcggagtggcagcacttcctgtttttactatagatggaatgacaaagcagatgaagtgtgtgacaaaagcaaaatgtatcggagtcaatccggactgtgagaattttgaaatgacgatcgcattagcaacctatcttggaagtgccgattcccagcagatgcattatgacatgagtggtgttataccggtcaatctgtccgcagtacagacgttgagaagtgatgtggagttagcagacgtgatcgcccagatcgcagacaaagagaatccgggttgggatttgccggaagaggaagaagaggaatag

SEQ ID NO: 526 - DNA, 1854 bp, Unknown
  Unknown gut bacteria
atgacgatcagagaagaaataggaaaaagaatactgttttttgatggaggaatgggaacacttcttcaggaacagggattacaggcaggagaacttccggaaacatggaatctgaagaatccggagccgatcatacagatacataaagcgtatttagcggcaggggcagacatcatattggcgaacacttttggcgccaaccgctttaaatacggagaagatttagaaaaaatcgtaacggcgggagtagcaaatgcaaaaaaagccgtagcagagagtggaaaaaaagcatatgtagccttagacatcggctccaccggaaaactcttaaagccgatgggaaccctggattttgaagcggcagtcggggtatttgcagagatcatccgagtgggagaaaaagcaggagcggatctcatcctgatagagaccatgagcgatacctatgaactgaaagcagcagtattagcggcaaaagagaattccgcattgccgatcatggcaacggtcatctttgacgaaagcaaaaagatgttgacgggagccagtccgcaggtagtagtgtcactgttagaaggacttggggtagacgcactggggatcaactgcggccttggaccaaaacagatgaaagagatcgtaaaagaactgctgaaatatgcctccataccggtgatcgtcaatccaaatgcgggacttccgcgttcggaaaacggaaagaccgtcttcgacgtaggagcagaggaatttgccgaagacatggaagagatcgtaaccatgggagcctggttcgccggaggctgttgcggaaccacgcctgcgcatatacaggcaatggtagaaaaatgcaaagaaatcacaccggtgccgatcacaccgaagaactatacctttgttacctcctactctacggcagttgaattaggcggcataccggtcatcatcggagagcgtatcaatcctaccggaaagtccaaatttaaacaggcactcagggatcacaacatcgactacatcttagaagaaggggtcaaacaggaagactccggtgcacatatcttagatgtcaacgtaggactgccggaaattgacgaagcagccatgatggaaacgatcgtttacgaactgcagagcatcatgccgatcccgcttcagatcgataccacgaatatggaagcaatggaacgggcgctcaggatatataacggaaaaccgatgatcaactccgtcaatggaaaagcagagatcatggaacaggtatttccgcttgtaaaaaaatatggaggagtcgtagtcggactggcgttagatgaagatggcattccggacaccaccgagggcagacttgcgatagccgaaaaaatatatcagacaggtgaaaaatacgggatcagcagaaaagatatcgtcatcgatgccttagttatgaccatgagtacaaataacgagtccgcaaagatcacgttagataccgtaaaagagatcacggcaagaggtggaaaaaccgtgcttggcgtgtcgaatatatcctttggactgccgcagcgtgagctgatcaatgcagcattttttacaatggcaatgaacaacggactctcggcagggatcatcaatccgaatgcaaaagccatgcggcaggcatacgacaccttctgtgtacttggcggctatgatgcccagtgcatgaattatatcgaaaactatgccgtaaccgatgccccgaatgcagcggcaaaatcggcagcagcgaagctcaacctgaccgacagcatcatcaaaggcttaaaagatcaggcgtatcgggcaacggaagaagaactaaagacaaaagaaccgatggagatcatcaatggg

SEQ ID NO: 527 - DNA, 918 bp, Unknown
  Unknown gut bacteria
atgacgacaaataaaggcgtaaaccgcacatttctcattacttttctgatctatgtgggcggcagttttttatggtcgctgataggaaaacgttttgtggactcattttatgtagatattgctgtttcacagctcctcgtatgtgtcccgccgtttgtctatctgaaaatatcggggacgaagacaggggaattgatcccctataaaaaaatcaggatttccgatgcccttttagcggtggttatgacgtatctattttacccgctgatgctggtcatgaatctgctgacgatgttttttgtggacaatacctcagcagagcttgcgacaacaatgggacaggagaatctgttcctcaatatcctgtttgtggcattgctgccagcctttgtggaggagtttgtgttccgcggagtcttttatcagacctaccggaagagcagcatgaaggcagcactggtgctcagcggacttctgttcggctgtatgcacatgaactttaaccagttcttatatacctttgtctttggcatgatcttagtctttatgatggaagcaaccggaagcattgtgacttccatgatctgtcattttttactgaatctgaacggagtattgctctcaggactcaatggaagtatcaggaatgcgagcgtgagtgatgccgtacagcagagcagtaatttagcaagccagccaaagatcttattagcagggcttcttgtatggggagtgatcgctgtgtttacgaccgcaggcggctgtgccatctgggttcatctggcaagaaaaaatggaagactggaactcatccaacagaagatgaatgaggcaaagcgtgaaagaatcgtaacaccgacccttgtgatcggaatggtattagcagtcgcatttatggtagtctttgagattttttaa

SEQ ID NO: 528 - DNA, 1203 bp, Unknown
  Unknown gut bacteria
gataccgcaaaagaaatacaaaagatcacagatgaacaagtggacaaactgatgtttacaagtaagcgtgatgtagtttccgctattatttttattatcatattcaatttaatcggcatcgcatccgcagtagtagttggaaaacatattattgcatctattttgataccattagctgcattggaggagacaacgaaagaattgtcccaaggaaatcttcacagcactttggattatcaggcagatgatgagctgggttcattagcagacagcttaagatcttctatagcaaccttatcttcttatgtagacgatatcggtgcttcaatgcaggaatttgaaaaagggaactttgttgtcaatccatccgtagaatggaagggagatttcaaaggaatcttaacatcctttaaagcatttgagcacagtatggcagatatgatcacaaacgttcaaagcgttgcagatcaggtaaccaacggagcagaacaggtagcagcaggttccatggatttagcagaaggtgcaactgagcaggcaggtgttacagaagagcttacggcaacgattgacgaagtcagcgagcgcgtatccggtaatgcaaagaatgcaaaagatatcagcaaggaagtagaatcttccgaagaagctgttatgatcagtaaccagaagatgcaggaaatggtcgaagccatggatgagatcagtaatacctctcaggagatcggcaacattattgcagcgatcaatgacattgcttcacagaccaatctgttagcactgaatgcttccatcgaggcagcaagagcaggagaagcaggaaaaggatttgccgtggtagcagatcaggtatcccttcttgcagcacagagtgcggaagcagccaaagagtcccgtgatctgatcgagacctccgtatccgcggttgagagaggtaaagtcattgcagatgagactgcaaaacagttagagcaggttgtagaaagctctaaagcagcgactgcagaagtatacaagatcgcggtagcattagaggcagatgcagcaacgatggcacagatcaatcagggagttgagcagatcaacagtgttgttcagacaaattccgcaacttcacagcagtgtgcggcagcaagtcaggaaatgagcgatcaggcaggaacgttagagaagttgatcaagagcttcaagatccgcaaatag

SEQ ID NO: 529 - DNA, 1431 bp, Unknown
  Unknown gut bacteria
gaaccggcaacagaagcagaagaaaatgcggcagaggcagcacaggcagaactcggaatttcaccggaggcagtgtcagatccgcttgcttacattttagaatatgcttcttatgatgcggaaaagattgaagaaatccgtaagcagattgctacatatcttgatcttccggatatttattctacagatgaccatgtgcgaaaactcagaagatccattgcaccggtatattatgaagtttataaggcagcgatcaaacgggcattgcaggaacaggcaatttctccgatcttaagaatgttttttgatttcggatttatggacagtggtctgttaggggaggaatatacggagcagttgtatgcggtagcagaaagactttccgagtgcaattccgaacatgtatatacaatgtatgagtggctgaagagtatttatataggaaaaaatgagccttctaaaaatgagtttgatctggattatccggcgtacttagcagatctgcgtcggaacggaacgattacaaagaaagaacaggaagagtggaaggatgaccagtggaagaaggtagagtatgagattgagaatatgtttacctcttctaacagagcagtttatggtaagatttctacatttattccgattttatgtgaatatgatattgtaaatagtgtagaaacgatgctggtgacagccgcacggatcaatgaagccttagacaagatccgcagtgtggatttctctattttttaccgcgatacgacattctcagatccggcacatgacattacaagagaatttttgaaaaaagaagtacttccggatgtgatcctgatgccaaatgccggtacaaaggcgatgatgtggcaggaaacagcaggaggaagacgcgatacatctgcaagatttttattcccggttatgactgccggaaatctggatgagttgatgttagagactgccggaagattccggtgggagatgtgccgtaaggagcagggcgcacgttggaatgatatccgtgaaatgtcattgacctcagaatactatgattatgttcagtattacaaaaagaatcacgacctttcaccggaggcaaaagaaaaattaaagaatgcgctctggaaagctaaaaataattatcgtgaagtctttgtaaaggattatcaggtatggattaaatatgaagcaaaaggcagctttagaatgaaccgggtagcgagaggaatcctcttccgttattgtccgtttgtcaaagagatcagggacagtctgaaggtaagcccgatgtaccaggagatgatccagaagtacgatatcattattggcagggaaaaacgtcatgtggctctttttgaggacaaataccggaaggctggcggtgaactgaccgaggaaatgatcgtaaacaaagaattttatgaaatgtag

SEQ ID NO: 530 - DNA, 1023 bp, Unknown
  Unknown gut bacteria
atgagcgaagaagtaaagaatacagattatgtgctggaagtcgaaaatctccatacatgtttccatacagagtcaggagatgtcaatgccgtaaacggattgcccatgaccttagaagcaggaaagacgttaggaatcgttggagagtccggttcaggaaaatccgtaaccgcatattctatcatgcagattttagcagagacaggagagattacggagggttccgtgaaatataagggtgaggatattacaaagtggagtgaaagagaactgcataatttccgcggttctaagtgttctattattttccaggacccgatgaccagtctgaaccctgtatttactgtaggaaatcagttgtgtgaggcaattctgcttcatacggataaaaataaaaaagaagcaaaagaaagagcaatcgaaatgctcacactcgtaggagtgaatgagccggaaagccgtatgaaacaatatccgcatgagttatccggtggtatgcgtcagcgtgtgatgatcgcaatggcattagcctgtgagccggatattctgatcgcagatgaaccgaccacagcacttgacgtaaccattcaggcacagatattagaactgatgcaggatttacagaaaaaacttggaatggcgatcatcatggtaacacatgacctcggtgtcatcgcaagtatgtgtgatgagatcatcgttatgtatggtggtcgtgtctgtgaacgtggaacggcagatgatattttctatcgtccatgtcatgagtacaccaagggactgttacgttccattccgagaaaagacaacatgaatgaacgattggttccgattggcggtacgccgatcaaccttttaaatatgccgaaaggctgtgcattctgcccgcgttgtgaggcagcaatgaagatctgtttagatgaagtaccacaggagattcgcatgagtgacacacatttggcgagctgctggatgaatgtaaagaaaatgtatgaagcacaggaggaaaataagaatgagtga

SEQ ID NO: 531 - DNA, 1125 bp, Unknown
  Unknown gut bacteria
atgttaaaacagtacaaactcaaagattatgattttcgtctggtcgcctatgtggtggtgttgaccatcatcggaatactggtgatcggaagtgcaaacagctcggtacaggggaaacagatccttggtctggtcttaggactgattaccatggtggtggtctcgctgatggactatgagtttcttctgcggttttcgtggatattttattttattaatatagtccttttgacactggtattgattatgggtgacaaatcaaaaggtgctacccgttgggtggagatcgcgggaatccgctttcagccgtcggagttaggtaagattcttttgatcctgttttttgcatacttctttgcaaaatatcaggagagtgtcaatcgtccgaaggttctgatcggttcttttatcttagcgggaattccactggcactgataaaaaaagagccggatctgtccacaacgatcgtgacagcactgatctttcttgtactgttatttatggcaggactcagctacaaatttattgcgacagtccttgctgtttccgttccttcggcagcaatctttttagcgttgatcctgcagccggatcagaagattttaaggggttatcagtataaaaggatcatgggatggcttcagccggaaaaatatgcagatgatgcttaccagcagcagaactccattatggcgatcggttccgggcagttgttgggaaaaggactctataataccgatgtcaattccgtaaaaaacggtaattttatttcagaaccacagacagacttcatttttgcggtagttggagaggaaatgggctttttaggaagtgcattgatcataattttactcttactaattaccatagaatgtattataatagctaaaagggcaaaagatttatcgggaagactgctttgctgtggagtcgcagcattgattggatttcagagttttgtaaacatctgtgtagtaaccggactgatgccaaataccggtcttccacttccttttgtaagctatggactgacttctttagtatcatcatttattggtatcgggttagtcttaaatgtcgggttacaacctagaaaatatggatcgggggaacgtacttcatga

SEQ ID NO: 532 - DNA, 1386 bp, Unknown
  Unknown gut bacteria
atgcagacatcgaatgcatattataatcaggcactttcacgggcaggtgtcagggatctgtcgggagcagtggagagcctgaaaaagagtctgcgttttaacaaaaagaatatccaggcaagaaacctgttaggactggtatattttgagatgggagagaccgtatctgcgcttagtgagtgggtcatcagtaagaattttaaaccggagaataatattgccggggagtacttagatgagattcaaaagaacagagccagattagaatcgatcaaccagacgatcaagaaatataatcaggcattgctgtactgtcatcaagacagcagggatatggcgatcatccagttgaaaaaggtgctttccatgaaccctaagatggtacagggacatcagttgttaggtctgctctatttagaggaaggcaattacgagcaggcagccaaggcattagaaaaagcacatgccattgatacgaacaataccacaacacttcgttatatgaaggagttagatgaccgtgcaaaagcatcgggaacgacgttaaaggacaaaaataaaaagacggtttcctatcagagtggaaacgatacgatcatccgtccggtttctaattttaaggagagcagttccggttctacggtattaaatattgcgatcggtctgatcgtaggagtgctgatcacctgctttttagtagttccgggagttagacagagtgcgaaatccaatgcaaagaacgaggtgttacaggcaaatgattccctttcatcaaagaatcaggaaatcaagacactgcaggcaaaagtggatgaactgaatggaaagatttcagacgagcagaacagtgcggacagtgccgatggaaaagtggcaacttatcaacagcttttaactgcctatgcagcatatcgtgatggcaataagacagcggcaggagatgcccttggcaatgtaaaggcggaatatttagatgacgagtcaaagaagatttacgatgcagttaacagtgaagtgaacagcgagtatttagcttctacctatcaggatgcttaccagaaatacagcagcctgaactatgcagaagcggcagcaggcttccagaagatcatcgatatggatgagaactatcatgacggttatgcactgtattaccttgcacagtcctatcgcaagaataacgatattgacaatgcaagaacttactaccagaaggtggtggaattatatccgaatacggagcgttcctcaagagcacagaaatatttagatgaatttggtacagcggaagcggacacagcaaatccggatgatgcagcggatgaaaatacaagagatacaacaactggagataccggtaatacggatattccgggaattgaatag

SEQ ID NO: 533 - DNA, 1401 bp, Unknown
  Unknown gut bacteria
ttgctgtttgcgctgttatcgctgttagtgatcggtgtatttattatagagatttttgaaaaaacctatttagagcaggcgatcaactatgtaaaattacaggatcattccgtagaactggtagattttttggatgaatatcaattttcggaggatgagatcggaacactcggaaaaaagatccggagctatggtcacaacttttatattgcaaaagacaggcaaagagtcagtacggatttttctacaaaacagcttcgggagatgcagtatttagattcctatgttaccatcaatgagccggcagatgtatttgtctggcggacggcaacgatgatctttaaaagttatgagacagagaccggaacctatcaggtggtagcgctccgcaatgatgagaacaccagacagatcaatccgaacagggagacatatcggtggctgatacctatctttacggcgatcggtgttctggcgatcgtgatcattgtggggatcagcagatatttcagccggaagttagaaaacaggatcatggagccgatcgaaaagctgatcgatgcggcaaaccgtgttgaggatggaaattttgaagagcatgtggaatatgagggagaggaagaatttgaaaaactctgccattcctttaataccatgcaggacagtctggcggcgggcgtggaccgggcagaagaatatgataaggcaaagacagagatgatcgccggaatgtctcacgaccttcggacaccgctgacctcgattaaaggttatatcaaaggagtcaaagacggagttgccaatacaccacagaagcaggagcagtatttagacattgcctatcagaaggcatgtgccatggatgtgctgctacgaaaactttcggatttttcaaagttagagaccggaaatatgccgatggagccggtggcgaccgattttggagcatttttacaggagatgctggatgataatgaacaatacctgagagaaaaagatgtgaatgtcatattttttgtaccggaggaaaaagtgatcacctgcatcgaccatgagcagaccaaacgcgttctccgcaatatcatggaaaacagcatgaaataccgttgcagggaacaggtgttgatccgcatgaacctgatcccgaataaagagtcggtcattttaaagatcacggatgacggagaaggagtaccggaggaaaaactgccgcatttatttgaacagttctatcgtggagatgagacaagaaacagcaggattgacggagacggactcggactgtacatagcaaaacgcattatagaacagcagggcggaagtatcagtgcttcaaaccatggcgggttctgtattacgatcatacttccgagagtgggagaagaacaggagcagatatga

SEQ ID NO: 534 - DNA, 1137 bp, Unknown
  Unknown gut bacteria
ttatatatacatatccctttttgtataaaaaaatgcgactattgcgactttttatcaggggaagcaagtgcatttgagaaaaaggaatatatcagggcattattaaatgaaattaaatatcaggcatatgactgcgaggattatgaggtatcgacgatctattttggaggaggaacaccatccacgttaaaagcacaggtaatcgattctattttacaggaaatctataaatatttgcatgtaaaaaaagatgcggaaattacgattgagtgcaatccgggaacggtcgagagagaaaagctggcactttaccggttgagtgggatcaatcgtttgagttttggattgcagtctgcaaataatcaggaattaaaaatgttaggcaggatccacagctatgaagatttcttagagagctatgatgcggcaagaaaagcaggatttgaaaatatcaacgtagatgtgatgtcagcacttcctgcgcagaccgttatttcctatgagattaccttaaaaaatgtgcttcgcttaaaaccggaacacatttctgcctacagtctgatgatagaaaaagatacgccgttttatgagcgttattctgaggatgaatatatccgtgctgccggtggaaaaccgaaatatcttccaagtgaggaagaggaacgcaggatgtacaagctgacaaaggaactgttagcagagcatggttataaccgatatgaaatctcaaattacgcaagagagggttacgaatgtaaacataatgtaggttattggcgaagagagaactatatcggaatgggaattggagcaagctccctgtttgaaaataccagattccataatacagatatcatgtttgaatatcgtaaatgcaattttgagcgtgaagatgaagaagtcttaacgaaaaaagcacagatggaagagttcatgtttttaggactccgcatgacgaatggaatttcaagggcagattttaaagaagcttttggaatggagattgaaggtgcctacggaccggcacttgcaaagctgacatctgaaggttatttagagaaacgtgagggcaggattttcttcacggaagcaggcattgatgtcagcaacacacttttgacggagttcttgctgtaa

SEQ ID NO: 535 - DNA, 1215 bp, Unknown
  Unknown gut bacteria
cttggacctcgtattggaaaattcagtaaagataaagatggaaaaattacaaaggttaacgcaattccgggacacaacctggttatcggttcccttggtgtatttatcctctggcttggctggtatggattaaatggtgcagcagctaccgatgttccgacactgggatctatctttttaacaacaaccgtagctccggcagtagcaactgtcgtatgtatggcatttacatggatcaaatatggaaaaccggatgtatcgatgtgtctgaacgcatctttagcaggactggtagcaattaccgcaccttgtgatgtaacagattgtgtaggagcagcaattattggagcagtagcaggaattttagtagtctttggtgtatggtttgtcgataatgtacttcatgtcgatgacccggttggagcagtcgcagtacatatgtttaacggtatctggggaacgattgcagtaggtttatttgcaacatcttcagcaccgggctttgaattagcaggtattaaagaaggtctcttctatggaggcggcttcaaacagttaggtttacagtttgtaggtatgttcattaccgcagcttggacaattgttacaattacgatcgtatttatcgtattaaaaaagaccatcggtcttcgtgtttccgaagaggaagaaattacaggtctggatgcaacagagcatggacttccatcagcatacgcaggatttgcaattatggatatctctggttctacaatggatgtcaatgaaaataccgaccttggtgtggctgattatgaaagtgcatcagaaactttgcggaatgcagcagttccggttgcagcaatgccacatgagccgacaggcatctataaagtggttattatttcaaaactgtcacgttatgacaagttaaagaaagccatgaatgaacttggtgttaccggtatgacctgtacacaggttatgggctgtggtgtgcagaaaggttccggagaccgttaccttggtgcagagttggatgcaacactccttccaaagatgaaggtcgaagtggtggtcagcaagatcccggtagaggatgtcatcgaatccgcaaagaaagtactttatacaggacatataggagctggaaagatattcgtatacaatgtagaacaggtagttaaagttcgtacaggagaagctggaacggctgctttacaggatgtagagtaa

SEQ ID NO: 536 - DNA, 801 bp, Unknown
  Unknown gut bacteria
ccggctcatacgagaaataagatcctgaaattctgttttgagaaatctatccgtatctatgtaacaccaaaactttcggacatcatcatttcaggttccgaatcaatacatctgtttgatacgccgctttatctgtgtcgcaataacggattcagcatggatcagcggattttcaaaagagccatggatattatcggttccctgatcggaattatcatcctgtcaccatttatgcttctgacagcggtagcgatcaaagcctatgacagaggccctgtattttttaaacaggcaagactgacacaggatggcagggagtttggaattatcaaattccgcagtatgtgtatagaatcggaaaaaaatggtgcacagcttgcgaaaaagcatgacgacaggatcacaccggtcggcagactgatccgtaagattcattttgacgagataccacagttatttaatattttaaaaggcgatatgtcgatcgtcggtccaagaccggagcggcaggagatcgcaagccagtacgaagagatcataccggaattccgctatcgtttgaaagtaaaagcgggactgaccggatatgcacaggtgtatggaaaatacaatacgacaccatatgataaattaaagttagacatgctgtatattgaaaattacagcttctggctggacatcaagatactgttgatgacatttaaggttatcctgcaaaaagaaaattccgagggaatcgatgaaaatcagattacagccttaaagcgggagattgaaagcaagaccacaacaaagtattaa

SEQ ID NO: 537 - DNA, 1005 bp, Unknown
  Unknown gut bacteria
atgattcgatttgaagatgtcagcaaagaatttcataccaaagcaggaaatgtccagggattgaatcatgtgaatctgcatatttcaaagggagatattttcgggatcatcggaatgtccggtgcaggaaaaagcaccttcatacgatgtatcaactatttagaacatccaacttccggagatgtccggatagacggatgccgaatgtccgggctgtcggaacgacagctgcgtgagatgcgaaaagaaatcggaatgatttttcagcacttcaatcttctgatgcagaagaacgtactggaaaatatctgtttttcgttaaaaatagcaggagttaaggatgcagaagcgaagaagagagcgagagaattattaaaagtcgtaggacttgcagataaggaaaaagcttatccttcacagctttccggtggacagaagcaaagagttgcaatcgcaagagccattgcaaataatccgaaaatcttgctctgtgatgaggcaaccagtgcacttgacccgcagaccacaaaatccgtcttagagctgttaaagcagatcaacagagattatggcattacgatcgtggtagttacccatgagatgtccgtagtgcaggagatctgtaatcaggtagccattttaaatgaaggaaatgtggtagaaacaggaagtgtttcagagatatttaccgctccgaaatcaccggaggcaaagagcctgatcatcggaagcggaagcaccgcaaaagagatgcgtggaagacactgtatccgaattgtgttcaaggagaattcctcttatgagccggttgttggaaacatgaccttacagtttaagactccggtcaatattttatacgcaaatacaaaggatttgaacggaaccgcagcaggggaaatgatcctgcagcttccggaagatacagagattgccggaaagatggtagagtatctgaaagaaaaaaatctgtatgtaggggaggtggaacaggatgttttcatctga

SEQ ID NO: 538 - DNA, 1221 bp, Unknown
  Unknown gut bacteria
atgaaagcatatgacgtgattatcattggtggtggtcctgcaggtttagcagcagcagcatcagcaagaagaaatggtatcgagagcattctgattttagagcgtgaccgtgagttaggtggtatcttaaatcagtgtatccataatggtttcggtcttcataccttcaaagaggagttaacaggaccggagtatgctagacgtttcattgatcaggtagaagaacttggaatcgagtacaagttaaatactatggttatggacatcagcgcagataaagtaattactgcaatgaaccgtgaagaaggaatgttcgaacttcaggcaaaagcagttatcttagctatgggatgtagagagcgttcaaaaggtgcattaaacattcctggttacagaccggcaggtatctattctgcaggtactgcacagagattagtaaatatcgaaggcttcatgccaggtcgtgaagttgttatcttaggatccggtgatatcggacttatcatggctagacgtatgacatttgaaggtgcaaaagttaaagttgtagctgagttaatgccatactcaggtggattaaaacgtaacattgttcagtgtctgaatgactacgatatcccgctgaaattgagccataccgtaatcgatatcaaaggtaaagagagagtagaaggaatcacaatcgcagaggttggtcctgacagaagacctatccctggaacagaagagtactatccatgtgatacattacttctttcctgtggtcttatcccagagaacgatatctccagaggagcaggcatcgaaatgagcccaatcacttccggagctgttgtaaatgagagcttagagacaaatatcgaaggtgtatttgcttgtggtaacgtacttcatgtacatgacttagtagacttcgtatctgaagaggctgctatggctggtaaatctgctgctgattatgttcagggcaagattaacagagatactaagacaccagacgttaagatcgttgcaacagatggtgttcgttacacagtacctagtgtagtaaatgttgaccgtatggatggcgattctatcgtaagattccgtgttggtgatgtttacaaaaaccactatgtaagcgtttacttaaatgatgagcgtatcttacatagaaagaaacaggttatggcaccaggtgagatggagaacgttgttcttaagaaagatcagttggct

SEQ ID NO: 539 - DNA, 1101 bp, Unknown
  Unknown gut bacteria
gcgaaaaaagcaggtaactgccagacgatcgcaagagtgagaaatccggaatattacgatgaaattggatatataagagaagaacttggactgtctatgtccattaacccggaatgggaggctgcaaacgagatggcacgtctgatacagtatccgtctgcccttgcagtagagaaattccgtggtggaatgaccctgcttcgtgtagtcattccggaaaaatccgtattaaacggaatgagtgttgcagaatttgccgttaagatcagcagacagatcctggtttgtattgtaaaacgtggaaaagagatccggattccggatggtaattttgtactgatggctggtgatgcaatttccgtcagccttccgatccgcgaggcaactccgttttttaaaaagatcggtgtaccggcgaacccaatcaaatccgtcatggtagcaggaggaggaatgatttctttctatcttgcaaaaatccttcaggataccggagtggaagtaaagatcattgaagaaaataaaaagcgttgtgaagaactgagtgaagcattgccacatgctatgatcattcagggggaagcaattgacaaagagcttttattagaagaagaaatccgtgagacagatgcatttgcggcaatgaccgatatcgatgaggaaaatatcatgctttctctttatgcgaaaaaagtgtcacatgcaaagaccatgacaaagatagataagattgaattccccgaagtcgtcgatgatctggggtttgacatcctgatcgtgccaaaggtcattaccggtgtgtccattatccgttatgtgcgtgcaatgcaaaacaccatgggaagtaatgtacagacactttatcgtatgatcgatggacgggtagaagcattagagttcattgtcagcaagacagcaaaagtcactaacaaaccaatctgtgaattgaagattaagaaaaatctgctgatctgctcaatacagagaaaggggaaactgatcacaccaagcggaaatgatatgctgcagagtggagacagtgtcatcatcgtaaccaccaatctgggtctggacgatattgatgatatattagaaggttag

SEQ ID NO: 540 - DNA, 1833 bp, Unknown
  Unknown gut bacteria
atgaaaccgttaaaggtagagatgtctgcctttggctcgtatgccggattggtagaggtggattttacaaaagcaggaagcggactctttctgatcaccggagataccggagcaggaaagacgacgatttttgatgggattgcctatgcgctctatgatgagaccagcggcggggaacgaagcggcagtatgatgcgcagtcagtttgcagatgcaaagacagagacctatgtgaaactgacgtttttaagccacggaaagatctatcaggtgagaagaaatccggagcataagatacaaaaggaattgaaaaacggcaataccacactgcggaatattccaaagaatgttgagctgatcctgccggacggacaggtgttcccggagaaaaagcaggggacagaccgcgaaatcgtgaatttagtggggctggatgtcaaccagttcacccagaccgctatgctggcacagggcgattttctaaagctgttgtatacaaaatccgatgatcgaaaggcaatcttttctaagatctttcagaccggttactgtgcgaagatccaggactacttccgccagcaggcttctatcttaaaggatgagttagaaaaacaggagcaggcattgcggcaggaggcctccggtgtccggttggatgaagccggaaagctcaagatgcaggaactgttagagcatgacttatttccatgtgaagaggtacaaagcctgttacaggaaaatatcgaagcctgtaaaaaagaaaccacggacgtacagaaaataaaagatgaaaaagcaaaagccgtagaacaactgacgaaagacatcagcgtgcaggagcaggtgaaccgtcagtttgaacacttaaacgtggtgacggaacaactgaaagatttacaatacaaagtagaaactgcaaaacaggcacatgaagctgcaaagcaggaaattgaaaaaaaaggagagagcatccaaaaagagatcgctgacattgaacattccctaccgctctatgaacaggcagaacaggcaaaggaaaaagagaaaagcggaaagaaacgtttagcggatttagaaaaggatcagggagttcttgggaccttaaagcagcgtatggaaacgtcacaaaaggagtggaacatctgggttacgaaggcaaaagaagccgtagcagagtatgagcgtgtttatgaggcatttttccatgagcaggcagggattttagcaaaggacttagaagaagggatgccatgtccggtctgcggctccacacatcatccgtctctggcaaaaatggctgaggatgtaccatccgaagaagaagtgaaaaaggcaaggaagaaacggacagaggcagaagaacaccgggagcagagcgagagacaatatatggaagcaaaaagtgcctacgatacgaaaaggcagcaggaagagacggagatccgggtactcttagcggaggcggcaaaagagctagagcttacttctaagaatctggtctattcgggaaaagaagaagccatggcaatcttagaaaagaacaggcagttaaagcagcagttagaatcttccgtaaaaaagacacaggaagagttatcgcagacacaggagcaggaagcagtctacaaaggtcagaaagaacagctgttacaggagaccgagggtcgcaagccactggaacttacggagaaaaaacagcagcaaagagagctgtcggaggaggttcaaaacgcagaggacagactgcggcagcttcataccacacaggagatcaatgagcgtatccgtcagaacctgcaaaagtatgatgcgaaacgggagcagttcaaagag

SEQ ID NO: 541 - DNA, 1215 bp, Unknown
  Unknown gut bacteria
ttgtctgagcggatcatcattacgaaagcacctttaaaagaaggatgggggcaggaatttttccttgcggcggcctttgatgaaaagcgcatgacgcagattcaggcagaagccgtctcaaagtcctcgatccttggaaatatctacatcgcaaaagtagaaaatattgcacaaaacattcaggcagcctttgtggatattgcaaagggtgtctcctgttttttgcccttagaagaagcaaaaaatgcagtttttacgaaaaagaacggaaaaaaagacttatgcatcggcgatgaacttctcgtggaagtaaccagagaaaagcaaaagaacaagcctgcttcggtctctgcaaatctgaacttttccgggaaatacctgatactgacgaccggaaaccatcttttgggtatttctaaaaaactgcatgcgacagaaagggaacgtttgcaggcattgttaaaagatcagatcaccgatacctttgggatcgtcgcgcgtaccgccacaaaagatgcttccgatgaagagattttaaaggaattagaaatgttaacaaagcagtgtcatgcctgcctgcaaggggcaatgcaccggactgcttttacacggttgcgggaagccccgcctttttatctgcaatttttaaagaaccgtaatctcacggaagtgcaaaagatcacgactgatattcccagtgtacatgaagtgcttttacaacaccttcaagatacgaaagaggctgaaaaactacacctttataccgatacacaggtatccctttttgcactttacagtctgacacatgaactggaacgggcattacacagacaggtctggctgccgtccggtgcctatttagtcattgacccgaccgaagcattgacggtcattgatgtgaacagcggaaaaaacatcaaaaagaaagcaagagaggaactggtcttttccgtgaacgttgaagcagcccatgagatagcaagacagcttattttaaggaatatttccggcatctgtatcattgattttattgatatgaaagaaaaagaacaccgggaagagttaatgcatatcctgcggatggacttaaaaaaagacaaagttcccgccacactggttgacattacacgcttaggcttggtagaattaacaaggaaaaaagtacagaaaagcctaaaagaacaattacaaggagatgtctctgatgaaaagtaa

SEQ ID NO: 542 - DNA, 1428 bp, Unknown
  Unknown gut bacteria
atgccatctacattttatggattgaccattgcgggttcgggattaaattcctttcagactgcagtgaatacaaccgcaaataatatcgcaaatgtgcagacggaaggatatacccgtcaggtagcaaatcgtaaacaggcagaatctctccgtgtatatgcacgatatggaacaaccggaagtggtgttaccacaacttccataacacagatcagagatgcttattacgatgtgaaatattgggaaaataattccagccttggtctgtatgagaaaaagttatattatatgaaccaggtagaggaatattttaaagatgatgacagctcgaaaggttttacaacgattttaaacagtatgtttaataatttagagtctcttgcaggtgcaccgggagatttagacagaagaaaaacctttatcagcagttgccaggattttgcaacctacttcaacagtgtatccatcggattgaatcagattcagaccgatgcaaacttagaagttaagagcacagtggataatatcaatgcgatcgcacaaaaaatcgcactcctgaacaatcagatcaatgtgatcgagatgcagggtggtcatgcaaatgagctgcgcgatgaacgtgcattgttgatcgatgagttgtccaatattgttcctacggaaacacaggaaacagaagtaatgaaccccaatgacgagtattatacaggttgtaccgaattcagagtaaagatcaacggacagcttttagtagacaccagagaataccgtacactggaatgtaaaacaagagatacaaaagtaaatcagtcagatgtggatgggctttatgatattgtctggtcagataccggcaatacctttaacgcaacatcaaagtacatgtcaggaaccttgaaagcactgttagatacgcgtgacggaaataacgaggagaactttaagggaaccgtggactacctctatggaacgaagctggtgattacgaacacgacacagaacagcatggaaaaaatgaccatggcagaagaaggagtcatcacgatcgataataagaaatttgaatacagcagctttaccgtagactatgatgcggcaggcaatgcaacctatacctttgcattgaaggagccggcgggagacggagcggatctgcttgcaggacatcaggcacagatcggaaccggcattgatgcgatgggagttccgtattatcaggcacagatgaatgagtttttaagagcattctgtatgaagtttaacgatatagagatgcagggacaggatttgaatggagatcctatgaaagcattctttgtggcaagagatctggttacaggagagcaggaagatttaaataaatccgatacctatacacagatcacatctgcaatgtccagttattataagctgacggcgggaagtttt

SEQ ID NO: 543 - DNA, 1170 bp, Unknown
  Unknown gut bacteria
gccgacaaagaaagaattctcaatgttgcagagagatgtgtagaagagtataaaaagggcaatgatgttgtcgtagtactttctgcaatgggcaaaacaacagaccatctgattgctatggcacatgatatcaatccaaatccgtccaaaagagagatggatatgcttttagcaaccggagaacagacatccgtagcactgatgtctatggcgatggcaacccttggagttccatctgtttctctgaatgcatttcaggtagcaatgcatacctcatccagttatggaaatgcaagatttaaaagaatcgattccgacaggatccgtcatgaattagacaataagaaaattgtcattgttacaggattccagggagtcaacaaatatgatgacattaccacattaggtcggggcggtcccgatacaccagccgttgcacttgccgcagcactgcatgcagatgcctgtgagatctatacagacgtagaaggtgtttacacagcagacccaagagttgtgccaaatgcaaagaaaatgaaagagatcacatacgacgagatgttagaacttgcaaccctcggagcaaaagtattgcataaccgttccgtggagatggcaaaaaaatatggagtacagttagttgttcgttccagtctcaacagagcagaaggaacagtggtgaaggaggacgtagacgtggaaagtatgcttgttagcggagtagctgtagataaaaatgcagccagagttgcattaatcggattaaaggatgagccgggaattgcatttaaagtatttgatttattaggaaagaaaaacatcaatgtagacgtaattttacagtccatcggacgtgatggtacaaaggatatttcctttaccgttgcaagagatgatgtagcagaagtagaaaaaatcttagaggcaaacagaaccagactgacttttgaaaaattagagacagacacaacggttgccaaagtatccgtggtcggtgcaggaatgcagtctaatgcaggagttgcaggaatgatgtttgaggcactttataatgtcggagtcaatatccgcatgattgctacttcagagatcagaatcaccgtattaatcgatgaggcagatgtagatactgcaacaaaagcagtacatgacaaatttatcgaggactaa

SEQ ID NO: 544 - DNA, 1602 bp, Unknown
  Unknown gut bacteria
atgaaactggaatttttgggggcagatcatgaggtaacaggaagctgtcattatctgaaagtggggcagacgcatgtcctgatcgactgtggaatggagcagggagcagatctatatgtcaatcaggagatacccgtcaatgcttcagaggtcgattatgtgttagtaacacatgcacacatcgatcattccggcttgctgccgctgctttataaccatggatttcgcggaaagatctatgcgacaaatgcgacaacggaactctgcgagatcatgttaaaagacagtgcgcatatccagcagtttgaagcagaatggaagaaccggaaagcaagacgtgccggaagaccggaagtggtaccgctttatgatatcaatgatgcaatgggagttatggagcattttgtaccatgtccatatgcacaaaaaattgagatcgaaccgggacttaccatccgttttgtggacgcaggacacctgttaggctcggcatccatcgaggtatgggcagaggacgaagacggaaagacaaaaattgtcttttccggtgacattggcaatggcaacaaaccattgatcaaagatccgcattttatcgaggatgccgattatgtagtcatggaatccacctatggagaccgtctgcatgaggtgtctgtcgactatgcaaaagaactggcagaagtgatcaccgaaacctttcaccggggtggaaatgtcgtgatcccggcattttctgtaggaaggacacaggaattactctattttttaagaaggatcaagaccgaaaatctgatgaaagagtatcaggattttgaagtctatattgacagtccgcttgctgtggaggcaaccgggattttccataaaaatgtagcagaatgtttcgacgaagaggcattagaattagtcggaaaaggcatcaatccgattcgttttgacggtttgaagatggcgattacaagtgatgaatcgaagatgatcaactttaatgaaaaatccaaggtaatcatatctgcttccggtatgtgtgaggcaggccgtatccgccatcatttaaaacataatttgtggagagcggattccacgatcgtctttgtcggattccaggtgccgggaacgttaggacattcactgcttaatggtgtcaaagaagtaaaactgtttggcgagcagattgaagttcacgcgaagatcatgaaccttccgggattgagcggtcatgcggataagagaatgttgacagaatggatcaaagcctataagacaccgttaaaacgggtctttatcgtgcatggtgatgatgaggtctgcgatggctttgctgcatatctgcgagaagaattaggactcgatgccgtagcaccatacagtggggatacgtttgatctggtgctgaaccagcagactgcacagggttcaagagatcttgtgaagaaaaagacaaagagcagcaaggcttcttcgatcgtctttccaaggctgttagcagccggtgagagactcttagcagtcatccagaaaaatgaaggaactgcaaataaagatatggcaaaatttgcagaccagatcaatgcactgtgtgaaaaatgggatcgttaa

SEQ ID NO: 545 - DNA, 1905 bp, Unknown
  Unknown gut bacteria
atggagaataaagaaatgcaggcagcaccgaaaaaaggtgttatcagaaggatcatccgtacgttgttttcgttttatccgggtttgatgccggtcgtattattctgtattttatttaatgctattgtcagtgcgatcccggcagtatttatgcagaatattattgcagtgatcgagcagagctatcagagcggagactgggaggcagttgcaggaaaaatcctcgggatggcggcaatcttggcaatcctctatgccgtttccctgatcgcatcctttacttactgccgtttgttggcagtgatcacacagggttctttgaaaaaactgcgtgaaaaaatgtttaacgggatgcagaaccttccaattaaatactttgacacacacagccacggagatatcatgagttattatacgaatgatattgatacactccgccagttgatctcgcagagtatgccgcaacttttaagttccggggtcatggtcattacggtatttgggatcatgctgtattacagtctttggatgtcgcttgtcattgtggcgggtgttatcattatgctgcgtgtcattaaaaaagttggtggcaactcggcgaaatactttatacgtcagcaggaatcaatcggtaaggtagaaggatatattgaagagatgatgaatgggcagaaggttgtaaaagtcttttgccatgaagaagagagcaaggcagattttgatgctttaaatgaggaactgtttggagtatcggaaagagcaaataaatatgccaatacactcggcccgatcttaaataatatcggaaatctgttatatgttgcagtgacacttgcaggcggattgtttttaatactgaaagtgccaaacgtcagtatttcaggactgccgtttgcgatcagcatcgtagtgccgtttttaaatatgaccaaacagtttgcgggaaatatcaatcaggtttcccagcaggtcaatgcggtggttatgggtatggcgggagcaagcaggatatttgatctgatcgatgaagaaccggaagcagatgagggatatgtaaccttagtccgtgcaaaagaagaaaatggagtcattcaggaatgtaaggaacgtaccggaatgtgggcatggaaacatccgcaccgcgaagaaggaacggttacttatacgaagctgaccggagatgtacgcttttttgatgtggactttgcctatgaagagggcaagaccgtgcttcacaatgtgacgctttatgcgaaaccgggacagaaggttgcatttgtcggttcgaccggagcgggaaagacgacgattacgaatctgatcaaccgtttttatgatattgccgatggaaagatccgttatgacggtatcaatatcaataagatcaaaaaatcggatttacgtcgttcccttggcatggtattgcaggatacgaatctttttaccggaaccgtgatggaaaatattcgttacggtaatttagaggcatcggatgaagcgtgtatcgaggcagcaaaattagccggagcagatgattttatcaccaggctgccggatggctatgatacgatgctgaccggaaatggagaaaatctttcacaggggcagagacagcttttatcgatcgcccgtgcagcagtagctgatccgccggttatgatccttgatgaagcaacctcttcaatcgatacgagaactgaggcaatcgtacagaaaggtatggatgcactgatggaaggcagaaccgtgtttgtcattgcacacagactttcgacggtacgcaattcggatgtcattatggtgttagaacacggcaggattatggaacgtggaacacatgaggatctgatcgcacaaaaaggcagatactatcagctctataccggagcatttgaattagagtaa

SEQ ID NO: 546 - DNA, 1293 bp, Unknown
  Unknown gut bacteria
atgtttgaagaggaattattagaaaaaacagcagtctgtacagagatattacaggatgcgaaaaatgaattatatctgaatatgagatttttagatgtggcattgaacagtctttccctgcagccgacgtttgaggtgtcggattatgcagtggatggagcagtcttttattatgaaatcccacatctgatcgaacagtataaaataggaaatgtcatggtgaaccgtgcgtatctgcacagtatgttccactgcctgtttgcccatgtctttaaggaaaaacgggaagagaaaatgctttgggatttagcatgtgacattgcagtggaatccgtcattgacagcctgccggggcggtgtttgagaatgccctcaagaccttactgcagggcagtttataatggattacaggaaaaaatccgtgttcttaccgcagaggggatttataaattgttagcagaaaacgatattgacccccgcatgatcgcgcggctggtattggaatttcgtgtggatgaccaccgatactggaaaagcgacagcgaaaaaaagcgaaacggaatgccaaatgaaaaccgttggcaggacattcgggaaaagatggagaccgaattatcgacattttcaaaagaggcggcagaagattccaaaggattgtgtgaacagcttgccgtagagaacagggagcggtacgattaccgcagttttttgaaaaaattctgtgtcttaaaagaagagatgcaggtggacatcgacagttttgattacatattttatcattacgggatggaaatgtatggcaatatgccgctgatcgagccgcaggagacaaaagaggtcaaccggatcgaaaattttgtcatagcgatcgatacgtccatgtcctgtaaaagagaactggtacagaagtttttagaagagacctattccgtcctcagtcagtccgaatcattttaccggaaattccgcgtacatatcatccagtgtgatgaacgtgtacaatcagatgtagtggttacgaatgccaaagaactgcaggactatatggatcattttacgatccgtggtctgggtggaacggacttccgtccggtgtttaattatgtcaaccgtcttttggcagaaaagaagtttacaaagttaaaaggactgctttattttacagacggatatggacgctatccattgaaaaaaacgccttatgataccgcatttgtatttttaaaagaggattatctggatgtggatgtcccgccgtgggcgatcaaactggtcttaggagaagaagattta

SEQ ID NO: 547 - DNA, 1161 bp, Unknown
  Unknown gut bacteria
atggcatttgacggtattaccatcgcaaatattgtatatgatttaaaccggaccattttaaacggacgcattgcaaagatcgcacagccggaaaaggatgagctgatcttaacgatcaagggaggaaacgtcggacaggcacgtcttctgctctccgcttccgcatctcttccgttaatatatctgacagacacaaataaaccaagtccgatgaatgcaccgaatttttgtatgcttttacgcaaacatattgcaaacggacggatcacgaagattttccaaccggaaatggagcgtattgtacgctttgagatagagcatttagatgatttaggggatttatgtaaaaaatctctgatcattgaggtaatgggaaaacacagtaacattattttctgtgatgaaaatgacaagatcatcgacagtatcaaacatatttccgcgcaggtcagttctgtgcgtgaggtgctgccgggcagggagtatttcattccaaagaccagtgaaaaattcaatccgctgacggaaaaccgtgaacattttctttttgagatcatggaaaaaccgacaactatccgaaaggcaatctattcctcttatacggggatcagtccgttagcagccggagaaatctgctatcgcgcatctttagatgccgatgcatcgacttctgccctgtcggaagatgaaaaactgcatctgtcgaataatttcttctggtatatggaagatgtaaaagaagggaattttacaccgaatattgtgatgcgcggcaaagagccggtggaatattcggcatttttgttaaaacagtatgcagatttagagacaatttcctacgattccatctcacaggtgcttgaacagttctatgcggcaaaaaatgtttacactcacatgcggcaaaaatccgcagatctacgaaggatcgtaaccactgccctagagcgcagccggaaaaaatatgatctgcagttaaagcagttaaaagatacggaaaaacgcaaaaaatataaagtctacggcgaactgctcaatgcttatggctataccgccccggaaggagcaaaaagcctagaggcattgaattattataccaatgagatgatcacgatcccattagacagcgatctgtcggctttagagaatgcaaaaaaatat

SEQ ID NO: 548 - DNA, 1158 bp, Unknown
  Unknown gut bacteria
aaggtgattaccggcatccggcgttgtggtaaatccacattgctcttacagtatcaggagcatttaaaagaacaggggattgacgactcccagattatttctgttaattttgaagatttacaatatgaagaattgttagattataaaaccttatatgattatattcaaaaaagactttgtaaagacaaaatgacttatatctttttagatgagatccagaaagtagacagctttgaaaaagtcgtggacagtctgcatattaaagaacacacggatatttatcttaccggttctaatgcctatatgctttccagtgaccttgcgaccctactgaccggacgttatgtggaactttccatgctcccgctgtcctttaaagaatatgcccagcttacaaacgatacttctgaacatgctttttctgactatatgcgctatggaggacttccctatgtagctgcaatggataaaacagatgaaaaagcagatatgtatttagaaggaatctataataccgtcattgtcagagatattgaagaacgtcaaagccggccaaagggcaattcctccaagcggaaaattaatgatatctcgcttttaaaaacgattgctaaatatttatccagcgtcgtcggcagccctgtgtctgtcaaaagtgtcacagattatttaagttccaacggaagaaaaatctccgctaacactgttgatgactatatggatgcattagcagaagcctttattttctatccggtagaacgttttgacttagtcggtaagcaaattctgaaatcgaataaaaaatggtacatcgttgacaccggattacgaaattatattttaccacgcagacactatgacttaggttttattcttgaaaatattgtatatttagagttgctccgacgcagataccgcgtcaatattggaaaatatgaaaatacagagatcgactttgtcgcccaaaagcagggagaaatcacctattttcaggtcactgcagatatgacttccgaagagactttccagcgtgaaatgcgtccttttacaaatatccgggacaattatccgaaaatcgtcctgactttagaccatttttcttccggaaactacgatggtatccaggtcgtcaatgtgatggactggttattagactga

SEQ ID NO: 549 - DNA, 756 bp, Unknown
  Unknown gut bacteria
atggcaggatttgcggagattataggacatgaacagataattgaacatttacagaatgcgatcttatcgcagaaggtttcacatgcctatattttaaacggaccggatgattccgggaaaaaaatgatagcggaagcatttgcaatggcacttcaatgcgaaaagcatgggacagagggctgtatggaatgtcattcctgcaaacaggcgatcagcaaaaaccagccggatattatttatgtgacacatgagaagccaaacacgatttccgtggatgatatccgtagacaggtaaaggacgatgtggatatcaagccgtatgcaagtccgtacaagatctatatcatcgatgaagcggaaaaaatgaatgtacaggcgcagaatgcattgttaaaaacgatcgaagagccgccggcatatgtggtcattctcttattgacaaccaatgcagattcgtttctgccaacgataaattcccgctgcatcacactggatttaaaagcagtgccaaatgaaaagatcaaaagttatctgatggagcattgccagatccctgattatcaggcagaagtgtgtacggcgtttgcacagggaaatgtaggaaaagcgatcaaattagcatcctcagaatcctttaacgagattaaaaactcggcattacaactgatccgcagattaaaagagatcgacctctacgaaatgatggaggcagtaaagcagatcagtgaatacaaactggaaataaacgactatttt

SEQ ID NO: 550 - DNA, 1344 bp, Unknown
  Unknown gut bacteria
atgtttgaaaataagacagaacagcaggcaaaagaagaaattttaaaaatggtagaggaatactgtaacacctaccataatcagaaaaaagcatttcaggaaggcgacagaattccttatgcatcccgtgtatatgacagtgcagagatggtaaatcttgtagacagttctttagagttctggttaacagcaggaagatataccgcacagtttgaaaaagcatttgcagaatatttaggagtaagatactgctctttagtaaactccggttcttctgcaaacttgaatgcatttatggcactgacatccccattattaggcgagcgtcaggtaaaaccgggggatgaaatgatcacagtagcagcaggtttccctacaacggtaacaccggcgatccagtacggtgttgttccggtattcgtagacgtaaccatcccacagtacaacatcgatgttacacagttagaagctgcattatccgataagacaaaagtagttatggcagctcatacattaggaaatccgtttgatctatccgcagttaagacattttgtgacaagcacaatctctggctgatcgaggacaactgtgatgcacttggttctaaatatgtgatcgatggagaagagaaattcacaggaaccattggtgatatcggaacttccagtttttatccgccacatcatatgaccatgggcgaaggtggagccgtttataccaatgatccgttattaaataaatgtatccgttctatgagagactggggacgtgactgcgtatgtgcatccggacaggacaacctttgcggacatcgttttgacaaacagtatggcgaacttccgttaggatatgaccacaaatatgtatattcacattttggatataacttaaaggcaaccgatatgcaggcagcagtcggatgtgcacagatcgtaaaattcccgaaattcgtagagagaagaagagaaaattttgaccgcttaaaagcaggtcttgcaggaacagaggataagctgatccttccggtaccatgtgagaattcccgcccaagctggtttggattcttgatcacctgtaaagagggcgtagacagaaacaaagtcgtacagtatgtggaaaatcatggtgtacagacccgtatgctctttgccggaaacctgacaaaacatccatgctttgaccagatgagagcaaccggagagggttaccgcattgtcggagaactgacaaacacagacagaattatgaatgacacgttctgggtaggtgtatatccgggaatgaccgatgaaatgatcgattatatggcaaagaccattaaagaggctgtagatcagcagtaa

SEQ ID NO: 551 - DNA, 813 bp, Unknown
  Unknown gut bacteria
atgttaaagatcggagaattttccaagctgtcccgcgtcagcgtccggatgctgcgccattatgacgccatcggcctgctgacccccgcctacatcgaccacttcaccgactaccgctattacagcgagtcccagctgcccaccgtctgccgcatcaccgccctgaaggacatgggcttccgtctggcggatatctgccggatgctgtccttctacgatgaccggcagcggctggacgaatgccttgccgcccagcaggcggcgctggaggcccaggcggaggacgtggcccggaagctgcggctgttggacagcgcccggaaacgactaagaaaggaagataccatggcttacaatgttaccgtcaagaccctgccccagcgttacgccgcctgtgtgcggatgaccattccctgctacgagcaggaggggacggtgtggggtgtcctctgcgccgagactgaccatatgaacctgatccccgacgatccctgctattgcagcgtgacctttttggacgccgagtataaggaaaaggacgtggaggtagaagctcagaaaaccgtcaagggtcagtatccggacaccgagcatgtgaagttccgcactctgcccgccgtcacctacgccggctgcacctatcagggcggctacgagcatatcggtgaggtcaacgccgccgtggccgcgtggatcgaggccaacggctaccgctatgccggccccatgttcaacatctaccacgtcagcccccacgagacccggaaccccgacgaattcgtcaccgaggtatgctaccccatcacgaaataa

SEQ ID NO: 552 - DNA, 1185 bp, Unknown
  Unknown gut bacteria
agggaaaaggagcatgaagccgtggagcggatctatctggacaacgccagcaccagctttcccaaggcggaaggcgtagcggaggcggtctatcagtatataaaggagtgcggctgtaacatcaaccgcggcggctatgacgaggcgtatcaggcggaggagctggtgctggagacccggcagaggctgacagcgctgttccacggcccggactgccggaacgtggcatttacccgcaatattacggagagcctgaacgtgctgctgaagggctttttgcgccccggagaccatgtgctggtgtccgccatggagcacaacgccgtcatgcggccgctgacccaactgcaaagccggggcgtgtcctttgaccgtatcccttgcgctggggacggtacgctggatacgtctgccatggcggctctgctgcgggataacacgcgggctgttgtgatgctgcatgccagcaacgtctgcggcacggtgctgcctgcggcggaggttggggctttctgtcatgcccacggcctgaaattcatattggataccgcccagacggcgggcgtgctgcccatcgacatggcggccatgcatattgacgcgctggcctttaccggccacaagggccttctgggcccgcaaggggtggggggattccttctccagccggacatggtgccactggtcacgccgctgatcgccggcggaaccggcagcgtcagccatgaggagcagatgccgtcattcctaccggataagttcgaggcaggtaccctgaacctgccgggaatcatgggcctgcatgccgcgctatgctggctggagcgggagaccatcgacaaggtgcgcagccacgaattggcgctgacagagcgctttcttataggggcggaggagatcccgaacctgcgcgtgatcggacgcaaggggacggaggggcgcgtcggcgtggtgtccgtcctgccggagaacgtggatcctgccctgatggccgacgcgctggggcaggaatacggtatcatggtgcgggtggggctgcactgcgcccccaacgcccacaagacgctgggcacatttcctacaggcactatccgcttttccttcgggcatcagaacacgacccggcaggtggacgcggcgctgctggcgctgcggaaattatgcgggaggaccacatggaactga

SEQ ID NO: 553 - DNA, 1566 bp, Unknown
  Unknown gut bacteria
atgaagctgaactacaaacgcaccattctggtgggctttgcctttttcctgatctgcgccttctggcaggcctatgacaacaccattcccctgatcctgaccaacaagttcggcatgagccagacctggtcgggcatcatcatggcggcggacaatgtgctggcgttgtttatgctgccgctgttcggcgccatctccgataaatgcagccacaaaaagggacggcgtacgccctttatcgtgatgggtacgctgatcgccgccgtggcgctgatctgtctcagctttatcgacaacgcccagctgaagcatctgggcgacgccgcgcggatcgacgatcccgccgccctgtccgccatctatgaaagtcaggcggacgagcagctgatcacgccccacggcgagaagttcgtgctgtcggagcggttcacggaggcggaattcgccgccatccgcagccagctcaccgacgagagcggcaagaccgtcaccaatcccgactacaccaactacgtgacccccgcccggcaggcctacgcctggcatgtgacggcggcgcatcccgccacgctggtgttcttcatcgctgtgctgctggtgattctggtggccatggccaccttccgctctccggcggtggcgctgatgccggacgtgaccatgaagccgctgcgctccaaggccaacgccgtcatcaacctgatgggcagcgccggcggtattctggtgctggcgctgggcatggcgttcgccaccgcgtcggtacacaacgcactgatgagctacaccgcctatttcgcggtgatcgccgccattatgctggcggcgctggtgatcttcattctcaccgtgcgcgaggtggagtgggcccagcagatgcagtgcgacagcgtggaatacggtgtggaggacacggcggaggacggcgcgtccccgcaggaggagcggaagctgacccgcggcgaggtgaagtccctgattttcattctgctgagtatcgtgctgtggttcttcggctataatgccgtcaccagcaagtactccgtgtacgccagcaacatcctgcataaagactataacctgaccctcatcatcgctcaggcggcggccatcgtggcctatctgccggtgggtgtgatctccagcagggtgggccgcaagcgggccattcaggcgggcgttatcctactgaccgtggccttcggcgtggcgggcttcctccacgcggagagccccacgctgctgatgaacgccatgttcgccctggcgggcatcgcgtgggccaccatcaacgtgaactccttccccatggtggtggagctgtccagcggcggcagcgtgggcaagtacaccggcttttactacaccgcctccatggcggcgcaggtggccacccccatgctgtccggccttttgatggacaagtggggtatgcgggtgctgttcccctatgccacggtgttcgtggcgctggcctttgccaccatgctgatggtgcaccacggcgacagcaagccccagatgaagctgggactggaagcattacaagattcggagatggattga

SEQ ID NO: 554 - DNA, 1773 bp, Unknown
  Unknown gut bacteria
atgttttcacagagctttttggacgagctgatcgcccgcaacgacattgtggacgtggtgggctcctacgtggcgctgacgccgaagggcggcagctattggggctgctgtcccttccacaatgagaaaacgccctccttccacgttttgcaggacaagcagttctatcactgcttcggctgcaaaaagggcggcggcgtcatcaatttcatcatggagatcgagaacctctcctatcccgacgccatccgctttctggccaagcgggtcaacatggaggtgccggaggatcgggaatccgccgacgccgaccggctgcgtaagcgactgctggcgctgaaccgtgacgcggcccggtggtactacgacgtgctgcaaagccccgacggcgcggcggtgcgggcatacctcgacaagcgcgccatctcccggaagattgctgtgcggttcggtatgggcgcgtcgccggacagctgggacgcgctgctgcgcaccatgaccggcaggggctacaccaagcaggagttgctgaccgccggactgatcgtggccaacaagagcggcggcttttacgataagttccgcaaccggctgatgctgccggtcatcgatgtgcggggcgatgtggtgggcttcggcagccgcgtcatcgacaagtcggagccgaaatacatgaacagcacggagacgccggtatacagcaagcgccgggtgctgtacggcctgaatctggcgaaaaagaccaagcgtcccaacatgatcctgtgcgaaggcaaccttgatgtggtgacgctgcatcaggcgggcttcgacaacgcggtggcctccatgggcacggcgctgacgacggagcagattcgattgctgggacggtacaccaaggagctggtgctgtgctacgacaacgacaacgccggtcagctggccacccagcgggcgctggagatgctgaacaacaccgagttcaccgtccgggtactgaagctgccccggcggctggtggacggcgaatatgtgaagcaggatgccgacgatttcatcaagtttcagggcgctcccgccttcgagcggctgctgtccggcagcgagaacggcgtggagttccgtatgtcgcaggtggccgccaagtacgacctgcgcagcgatcagggccgcatcgactacaccgccgagatcagtcaggtgcttgccgagctggacaacgccgtggagcgggaggtatacgccaatcgtgccgccgagacggcaggactttcgcccgacgccatgcggcaggaggtggagcgggccacccgcaagcgccgctatagcgaccgcaaaaagcgggagcggcaggagctgaaccccgccctgaccgtacagcccgcccagcggggcagccgctataccaatctccgcagcgccatggcggaggagggcgtgatccggctgctgcaccttgaccccacgctgttcggggacacgccgcccctgacgccggaggagttctcctcgccgctgttgggaaaaatttacggcgccatgtggcaccagcgcggcaaccgcagcggcctgtcggcgctgacgggggagctgtccggcgacgagatgagccacctgaccacgctgctgcaaaaaccggaatccaccgccaacgcgtctcaggcgctggcggactacatacgggtgatccgcgaagagcagaccaaacgggacgactccggggtggatcccctgctgttggcaatggaaacatttaaagataagaaacgatatggaggaaagcgcacatga

SEQ ID NO: 555 - DNA, 1332 bp, Unknown
  Unknown gut bacteria
atgttaaaagtagcaaaattcggcggctcttccatggccgacgccgtgcaatttgccaaagtcaaggccattgtagaggccgacgacgcccgccgcgtcatcgtcgtgtccgcccccggcaaacggtacaaggacgatcacaaggtgacggatctcttatatttgtgcagcgcccacctgaaatacggcgtcagctgcgagaaaattttcgccctgatccgccagcggtatcagcagatcgccgacgactgcggcctgtccctcgatctggcggcggagttcgacgctctgtggcagcggatgtgcagcggtgaagcggacgaggagtatctggcctctcgcggcgaatatttcgccgcccggctgatggcggagtatctgggctatacctttttggacgcggcgctgtggctgcggttcaagtttgacggcacggtggatcaggaagccagctatgaggcgctgcggaaggcggcggacggtcagcgggtggtgatccccggcttctacggggctatgcccgacggccgggtggtgaccctgacccgcggcggcagcgacatcaccggcgcggtggcagcggcggcgctggacgccgccgtatatgagaactggacggacgtgtccggtatcctgatggccgatccccgcatcgtggagaaccccgaacccatccgccgcgtcacctacagcgagctgcgtgagctgagttacctgggcgcgcaggtgctgcacgagggcacggtgttccccttccgggagaaaaatatccccctgaacatccgcaacaccaacgatcccgcccacgacggcaccatgatcctcagcagcatcgacgacgaggagcaggacgaaagcttcatcaccggcatcgccggcaaaaagggcttctccatcatcaccatcgccaagagcggcatgtcctcggagcccggctctctgctgaagctgctatccattctggccaagcatcaggtaaacgtggagtacgcgccctccggtatcgacaccgtgtcgctggtggtggaggccgccaaggccgccccgtgcctgtacagtatgctgggcgagatccagcaggaggtgcagcccgacaccatcaaagtgacggagcacatcgccgtggtggcggcggtaggccggaagatggcgtaccgtctgggcgtgtccggtaagatcttcagcaagctgggcgagcacggcgtcaacattcgtatgataacgcagggcccggaggaattgaacattatcgtgggcgtagaggaaagggattttgagcaggccattcgtgtcctgtatgacagctttgtaaaggaggaagttgcaaaatga

SEQ ID NO: 556 - DNA, 1317 bp, Unknown
  Unknown gut bacteria
atgggcggcgtggttgtctgcttcgccctgtttctggcggcgatggcggtctgccttgtcatgggctggtcgttcctgtgggcgctgctgctgggtctggcgctgttcacgctccacggccgcaagcagggccacagcctgcaaaccatgtggggcatggcctggtcagagggccgcaaggtgctgatcgtactgcgaatctttgtgttcatcggagccatcaccgccctgtggcgcagcggcggcaccatcgtgtttttcatctactacggcgtacaggccatctctcccaagctgttcgtactggtggcctttctgctgacggcgctgatcgcctacgcactgggcacgtccttcggcgttatcggcacggcgggtatcgtgctgatggctctggcccgatccggcggcgtcagcgaggcggtggcggcaggcgcgatcctgtccggcgcgtatttcggcgaccggtgctctcccgcgtcctcctctgccgcgctggtggcggcggagacggggacgaagctctatgacaacctgcggaacatgctgcgcaccggcgcgctgccggtggtgctgacggtgatcgtctacgctgtgctgtccgtccgccaccccatcacggcggtggacgagagcctgctgcaagccctgtgggacagcgctgtcatctccctgtgggcgctgctgccggcggcggtgatgctggtgctgccgctggtgaaggtgccggtgctgatcagcattgccctcagtgtggcggcggcgggactggtcagcgtgttcgtgcagggcatgacggtgtgggacatgctgaaaacggcggtggtaggctactatcccgccacgggacagctgaaggatatcctctccggcggcggtatcgtctccatggtgaagccggcggcgctggtgtttaccacggggctgctggcaggtttgctggacggtatcggcgtgctgaactgcgcggtgggactggtggaaaagctggcccggcgctggggccgctttgccgcttcggcggcggtgagtctgggcgcgggtatgatcttctgcaaccagtcggtggtgatcgtcatgggcaatcagctgctgcaccgctgctataccgaccacaatgagcaggcggtggacatggaaaacagcggcatcgtcctgtcggcgctgatcccgtggaacatcgcgtgcagcatcccattggtgatgctgggggtggatcagcgggccattccttacgccgtgctgctgtacatgatcccgctgatctacggcctgacaaaacgatatgtgtatccccataaggagaaatgtgtatga

SEQ ID NO: 557 - DNA, 981 bp, Unknown
  Unknown gut bacteria
atgataccgtattttgacgctcactgcgataccatttaccgctgtctggagaccggcgagacttccgcactggagtatggcgaggatcgggaggagcagcgccgttattacgccgcgtccacccatctgcgaaaaaacggcggccatatcgatctggaacggggactgaagttccggcgctgtgcccagtttttcgccctgttccacgacgcggcggaggctccggctgacggcatgtgggcacaatgtcaacggatgcacgatttcttcctgcgggagatggcggacaacgccgatatcgtccgccattgccgcaccggcggggaagtggatgtcacggtggtggagggtaaggtggccgcgttgctgagcatcgagggcgccgacctgatcgactgcgacgtacataagatcgaaacggtgtccggttggggcgtgtggctgctgaacccggtatggaaccgtgccaatgtgctgtccggcaccaatgccgaggaaccggagcggggactgtccgccgaaggccgggactttattcacgtgctggaggagcacgagatctatcccgacgtgtcccacctgtccgacgctggcttctgggatcttgtccgcatggcgaagcggcccatcgtggcgtcccactctaacgcacgggccgtctgtccccaccgccgcaacctgacggacgaccagttccgggccatccgcgatctgggcggcgtggtgggcctgaacctgtatcttgattttgtgggccagcccacgatggatgcgctggcggcccatgtggagcacttcctgaacctgaacggcgaaaaaacggtgtgtctgggcggcgatctggacggctgcgaagcgctggccgccggtatgaccggcatgcaggatgcgccgaagctgtacgacgcgctgaaagcccgcggctacagcgaggcgctgctggaggatatcttctggaacaacctccgccgcctgatctga

SEQ ID NO: 558 - DNA, 624 bp, Unknown
  Unknown gut bacteria
atggtaaatagcaaagaggctagttttgcctatttggagacattgagcgacgagcagctatgcgccgcctgccaattggggaaccgcaacgccgaggaggttctggcggcgcggtatcaccggctggtgcgtagcatcgcccgaccctactttcttgccggcggagacaacgaggatctgctgcaggaggggatggtggggctgatcaaggccatgcgggaatacgacccccatcaggccgcgtccttctgcacctttgccgaggtatgtatccggcggcggctgtattcggtgctcaaatccgcttcctcaggcaagcatcagcctctcaatcaagcgatccccctgaatccctcattctttgacgtcagtctcgcttttgcacaggtcgaccccgaggtcctgctgattgacagggaaaaaaccgccggtctgctggagtacacatgcaaacagttatccgccttcgaagctgagattttagggtactatttggacggttttacatgtcgtgagatcgcagagactgtgggcaagccgccaaaatcggtggaaaatgctgtgcagcgcatacgccgcaagatcgggcggcaacttcaatctggcgatatcagcaaaggctga

SEQ ID NO: 559 - DNA, 915 bp, Unknown
  Unknown gut bacteria
atgaccttgcagcagctgaaatacgtatccatggtggaaaaatgtggctccttcagccgggccgcccaaaagctgtacgtctcccagcccagcatcagcaatctggtgaacgcgctggaggaggagctgggcatcaccattttcacccgctcctccaccggcattgccatcaccaacgaggggcgggagctgctgaagctcagcaaccgcctgctgcgggacgccgactacatcagcgagtatttccacagcgacacggagcaagaaaagccctccttcttcctcagcagccagcactacgacttcgtggtcagcgcctttgaggaatttgtgggcggcatcgacgccgaccgctatacgctggggctgaaccagacccagaccgccgccgtcatcgaggacgtgcgcaagcagtacagcgacatgggcgtgatcttcctgtcggacgtgaaccgccgccacatgctgaaggtgctggaggacaacaacctggaattccacagcgtatcccgcgccgcgccccacgcctttctgtcggtggagcatccgctggccaagcgggagagcgtgacgccggaggagctgatggactacccctgcattgtctatgagcaggacggcgactcccccggcttcttctcggaggagatgatgctgcccaatttctacccccggaaggtggtctacatcagcgacctgtacgtgagtacggcgctgatgcggggctgcaacgcctacgacatcggcaccggcgtgatctcaaagcggctgtcccgcgaggtggcctgcgtgcctatcgccaccgacgaccgggtggatatcggccggatcggcattcgggacagggcgctgcggcccattgagcgctcatttctggactgcatgacccggcagctccacgccgcacaggggtaa

SEQ ID NO: 560 - DNA, 1350 bp, Unknown
  Unknown gut bacteria
atggcatacgaagaatttctgggtatgtatcaatccaagctgaccacggcagaggaagccgtaaaagtgatcaaatccggcgactgggtggattatggcttctgcaacacccacccccatgttctggacgaagcgctggctcgccgcgctcccgagctggaggacgtgaaggttcgtggcggtatcgccctgtggaagcccgcgatcttcgatatcgaggagcctgccaagcatatcatctacaattcccaccacaccggtggctttgagcgtaagcacatcgataccggggcctgcttctatgagcctatgcgctattccgagctgccccgttactattatgaccatatcaatccgccggatgttgccctgatccaggttggccccatggataagcacggctacttcaacttcggcgtttccgcttcccacatgaaggccatctgcgacacggccaagatcctgatcgtggaggtcaaccagaacatgccccgctgtctgggcggctttggcgagagcgtacatatcaccgacgtggatatgatcgtggaaggccgcaacgaccccatgggtcagatgctgtccgcacctcccacggagatcgacaaggccgtggccaagcaggtggtggagcgcattcccaacggcgcctgcctgcagctgggtatcggcggtatgcctaacgctgtgggtatgctgctgtgcgagtctgatctgaaggacatgagcgtccataccgagatgtacgtggaggccttcgtagatctgtccctgtgcggcaagatcagcggcgccaacaagagcatcgaccatggccgccagacctattccttcgctgccggcagccagcgggtctatgacttcctggatgacaaccgcatgtgcatggctgctcccgtcagctatgtcaacgatatccgcaccatcgcttccatcgataacttcatgtccattaacaacgcggtggatatcgacctgtacggtcaggtcagcagcgagacctccggcatccgccacatttccggcgccggcggccagcaggacttcgggctgggcgcatacctgtccaacggcggcaagagctttatctgcctgtcctccaccttcaagaagaaggacggcacgctggcttcccgcattcgtcccacgctggcagagggcagcatcgtcaccgatacccgcgtcaacaccatgtatgtggtcacggagtatggctgcgtcaacctgaagggcctgtccagctgggagcgggccgaggcgctgatctccatcgctcaccctgatttccgcgaggagctgatccaggctgcccagaagcagaagatctggtatcacagcaacaagcgctga

SEQ ID NO: 561 - DNA, 627 bp, Unknown
  Unknown gut bacteria
gtgattttttataccgccgatcttcactttctctatgaggcgctgctgtcctcccggccctttgccacagtggaggagatggacgagacgctgatccgcaattggaacgaaacggtatcgccggaggacaccgtgtatctggtgggtgatatcgggtataacgaggggcaggttccccaccagctgctctcccgcctgacgggacacaagcacctgatccggggcaaccacgacaccgggtacgaggacgccgcctccctctaccgctatttcgagaccatcaccgacttcaatgagatcgacgacggtgagacccatattctgctgtgccactaccccatcatttaccgcaagcggggctatatgatccacggccacattcatcagagccggggacaggagtaccaactgctgaaggagctgccccgtgtgctgaacgccggggtggatatcaatttctaccgccccgtgacgctggaggagctgatcgaaaacaaccgcgccttctacagcggtgagtgggatgacctgatccctccgccgccccgcacgccccggggcgataagggctggcttccggccacgccggacttccgccccatcccggagcggccaaacggccaatga

SEQ ID NO: 562 - DNA, 828 bp, Unknown
  Unknown gut bacteria
atgtcctttggagagcagctacaggaggtgcggcggagcaacggcatgacgcaggagcagtttgccgaggcgttacaggtgtcccgtcaggcggtgagccggtgggagtcgggccgcagctacccggaggtggataagatcctctatatctgcaaccgctacggcgtgtccatcggcacgctgtttgccgaggagaatcccactcccgacagcggcagaccccagccgcctcagacggcggcccagccgcccaaggacagcctgttcacctcgctggattctttcatcaccaacttatcccctaagagcaagtggatcggcatgggtattctggtgggcgtggcgctgctggcgctgctgattggcctgtgcctgaaaggaggaagcggagacatgtcaacgatcatatggatcgccgccatcgtcatcttcggcgtggtggaggcggccacggtaggactggtgtccatctggttcgtcatcggcagtgcggcaggcctgatcgccgccgtgctggacgcgcccatctggcttcaggtggtggcgttcttcatcgtgtccattgcggcgctgatcgccacgcggccgctggtgaggaagctgggcagcaagggcggcaccgctaccaacgccgaccgggtgctgggcggcaccgcccgcgttaccgagaccatcgacaacaccatcccctccggcgaggtgtacatcgacggcaaaacatggacggcccgcagcgaatccggtgcggtcatcgccccggagacgctggtaaaggtcatccgcctggagggcgtgaagctgtatgtggacgttccccataacgtgtaa

SEQ ID NO: 563 - DNA, 786 bp, Unknown
  Unknown gut bacteria
atggacaaacagcgctgcatcgccgcggcggcggaaacggaggaggaccggctgctgctggcccggctctacgataagctgaaccacggggcggagcgggagatcttcagctgcacggcgtttctctcgccccgtgagcaggccatggtgaagaagctgctgccccatgtgccgctggtgtttttcggcggctgcgacggggcggagcgctgcatggcctgctacgtgccggagtatctgccggaggactatctgacctcggaggacggcccggcggctgccgtgcgggccgtgtactatgagaaggacgcactgacccaccgggattttctgggcagccttatgggtgcgggcatcaagcgggaaacggtgggggatatctatgtctctgccggacagtgcgacattctggtgacgcggcagatcttgccctacctgctggagcagtgggacagcgcgggccggacgaagctgcacctgtcggtgatcccgctggcggaggtacagcgcccggcggtggaaaagcgggagatcagggacacggtgccctcgctgcggttggactgtctggtggggtcggccttttcgctggcgcgagggcctgccggacagctgatcgccgccggaagggtggccgtcaacgatctggtgtgtctcaagggcgaccggcaattacagcagggcgaccgcatcgccgtgcggggactgggcaaggcagcgctggcacaggtgggcggcaccacccgaaagggacggctgtccgtcacgctggagcgctggatataa

SEQ ID NO: 564 - DNA, 1527 bp, Unknown
  Unknown gut bacteria
ttgaccagtcgtaaaatcatcaacagtaaactgaaggaagcggtggattccgtattgcccatcaccctgatcgtggcggtgctgtgtttcttcttcgttcccgtgggcagcggactgatgctggcctttctggtgggcgcggtcatgctgattttgggcatgggcctgttcacgctgggcgcggagctgtccatgacccagatgggcaatctggtgggcgcgaagatgaccaaatcccgccgcctgtggctcattctggtgctggccttcgttctgggcgtggtcattaccattgccgagcctgacctgcaagtcctggcccagaacgtgccgggcatcgacaagaccatgctgatcctcacggtgtccgtgggcgtgggcatcttcctgaccatctgcatgctgcgtatcctgctgggtatctccttgcggacgctgctgctgatcttctatgccattgtgtttattctggccgccctgtccgacccggacttcctgtccgtggcctttgactccggcggcgtgaccaccggccccatgacggtgcccttcatcatggcgctgggcgtgggcgttgcctccatccgaagcgacgaaaaggccaagtccgacagcttcggtctggtggcgctgtgctccatcggccccattctggcggtgctgctgctgggcttcctgtacccggaaaacaccgcctctgcctcggaaacggtggtcaacagctttgaaaataccctcaccgtgggctacagctatttggaggagctgcccgccatgatgggcgaggtggccatcgccctgctgcccatctgcgtgttcttcctgctgttccagatcttctcgctgcatctgcggaagctgcccctgctgcgcatcctcatcggcgtgggctatacatatgtaggtctggtgctgttcctgacgggcgtcaacgtgggcttctcgtcgctgggctacgtgctgggcggcgtcatcgtggaggagggtcttggccttctgatgatcccgctggccaccctgatgggctggttcatcatcaacgccgagcctgccgtccacgtgctgaacaagcaggtggaggagctgagcgccggcgctatttcctccaaggccatgggcatgagcctgtccatcgccgtggccgccgccatgggacttgccatggtgcgcgtcctgaccggcatctccattctgtggttcgtgctgccgggctatatcatcgcgctgggtctcagctttttcgtccccagcatcttcaccgccatcgccttcgactccggcggcgtggcttccggcccgctgaccgccaccttcatgctgccctttgccatgggcgctaccacggcgctgggcggcaatgtgatgaccgacgccttcggccttgtggcgctggtggccatgatgcccctgatcgtggtgcaggtcatgggcgccatctacgtggtcaagacccgccgcaacagtgcgcaggaatccgcgcccgtattcagcaacgagggcgttatcgaactgtgggaggtggcctga

SEQ ID NO: 565 - DNA, 1332 bp, Unknown
  Unknown gut bacteria
atgaagatacagttatccgatcactttacctataaaatgctgctgcagttcgtgctgccgtccatcatcatgatggtgttcacctccatctacggcgtggtggacgggctgtttgtgtccaatttcgtgggcaagacccccttcgccgccgtgaatctggtgatgcccttcatcatggtctttggcggcatcggcttcatgttcggcaccggcggcagcgcactggtggccaaaaccatgggcgagggcgacaagcaccgcgccaatcagtacttcaccatgataatcgccgccaccctcatctgcggcgtcatcatctccacgctgggcgtgatctttatggagcctatctccgtctttctgggtgcggacgcggaaatgctgccggattgcgtgctgtatggccgcatcgtgctggccttcaacacggcgtatatgctgcaaaacgtgttccagagcttcctgatcgcggcggaaaagcccaagctgggcctgtgggtcacggtggcggcgggcgttaccaatatggcgctggacgccctgttcatggcggtgttccactggggcgtggcgggcgctgccatcgccactggcatcagccagatcgtgggcggcgtgctgccgctggtgtacttcctgcggcccaacagcagcctgctgcagctgacaaagacaaagctggagctgcggcctatcttgcaggccagcggcaacggcgcgtcggagctggtcagcaacgtgaccgcctcggtggtgggcatgctgtataacttccagctgctgcggctggcggggcagaacggcgtggcggctttcggcgtgctgatgtacgtggagttcatcttcgccgccgtgttcatcggctatgccatcggctgcgcgcccatcgtcagctatcatttcggcgcgggcaaccggggcgagctgcagaacctgctgcggaaaagtattctgctgatgggcgtgggcggccttgccatggtgggcgtggcccagggactggccggacctatggcacggctgttcgtggggtatgacaataccctgtgccggatgacggtgcatgccttccgcatcgccacattgtccttcgtgctggtggggttcaacatcttcgcctcgtccttcttcacggcgctgaacgacggcgtggtgtcggccatcatttccttcctgcgcaccttcatgttcaagctgtcggcggtactgctgctgcccctgatctgggagctggacggcatctggtgggccgaggtggcggcggagatctgcgctttcggtcttggcatggcgttcctgctgggcaaacggaaaaagtacgggtatatgtga

SEQ ID NO: 566 - DNA, 1134 bp, Unknown
  Unknown gut bacteria
atgatttatctggatcacgccgccaccacccccattcctcaggctgttgccgacgagatgtaccgcgtgctgacgcagcagttcggcaatccctcctcccagtacccgctgggacaggatgccaagaagatggtggagggctatcgggccgctatcgccggggcggtgggctgccagcccaaggaactgcatttcacctcctgcggcacggagagcgacaactgggccattcaggctgccctgtggcagaaccgccatgtgggcaagcacatcatcaccaccaccgtggagcacagcgccgtgctggagacctgccgtgcgctggagcagcaggggtacgaggtgacgtatctcaagcccgacaagaccggccacatcaccgcccaacaggtgggcgacgcattgcgggaggatacggcggtggtcagcgtgatgctggtgaataacgagaccggctgcgtgttccggctggcggagatcgccgccattttgaaggcacgcaaaagccgcgccctgctacataccgacgcggtgcagggttttatgaaggtgccctgcgaccccaaaacgctgggggtggatatgatgagcctttccgcccataagatcggcggccccaagggtatcggtgcgctgtatgtgggccccaacgtccgcaacatccggccgctgctccacggcggcggacaggaggagggcacccgctccggccccgaggccaccgcccagatcgcgggctttgccaaggcggcggagctgcgcgctgacggtctggcggacaagctggcccacatggcggaggtcaaggcctgctgtaaagagaagctcctttccatcgacggcgtagtggccgtgggtcagggagaagcgccccatatcctgatggtgtcgctggtgggctaccccagcgccaacgtggtcaccgatctggggagccagggcatctgtctgtcggcgggcagcgcttgccaccggggcaagctgagccacgtggtgacggcgctggggctggacaaacgcaccgccaacggcgtgctgcggatcagcttcggcccggaaaccacctttgccgagatcaacgccctgtacgaggcgcttttgcggcacaaaaacacccgatttcctatgctatga

SEQ ID NO: 567 - DNA, 1632 bp, Unknown
  Unknown gut bacteria
atgtacgaaaacggcaagatctatatgggtctggcggacggacagcgggtggagctggctctgaacatgtgcaaccgtcacggcctgatcgccggcgccagcggcaccggcaagaccatcaccatgaaggtgatggccgagtccttttccgatgcgggcgtgcccgtgttcctgtgcgacgtaaagggcgatgtggcgggtatctgctcgcccggcgtcagcaacgagggcatggaaaagcgcatcgacaaattcggtgtccgcgatacctttacctataaagcataccccaccaccttctgggatatctatcaggagggcggacatgccgtccgcgccaccgtcagcgacatgggcccggagcttttgagccgcattctggggctgactccggcgcaggaggggatcctgcacatcgtgttccgcattgccgacgacaagggcctgctgctgatcgacctgaaggatctgcgggccatgctgacctacgtgaacgagcaccgctcggagtacatgatgacctacggcaacatcacctcccagtccgtggcggcgatcctccgggcgctgctgccgctggagcagcagggcggcgacctgttcttcggcgaaccggcgctggacatccgggactggatgcgcaccgacgccgatggacacggcatgatcaacgtgctggactgcgtcaagctggtgcagaaccccaccctgtacgccggtttcctgctgtggatgctgtcggagctgttcgagaatctgccggaggccggtgatctggacaagcccaagctggtgttcttcttcgatgaggctcatatgctgttccgggacgcgcctgccgtgctgctgcagaagatcgagcagacggtgaagctgatccgctctcgcggcgtgggtgtgttcttcgtcacccagagtcccagcgatattcccaacgccgtgctggcccagctctccaatcgggtgcagcatgctctgcgggcctatacccccgccgagctgaaggccgtccgggtggcggcgcaggccttccgggccaacccggccttccaggcggaggacgccatcatggagctgggcgtgggcgaggcgctgccctccttcctggacgagggcggcgtacccgccatggtgcagcgtaccaagatcatctgtccccagagcctgatggccgcaccggagcccatggtccgcgccaaggtgctgatgcgggacggcatggagaaatatgacgactacgtggacaatctgtccgcctatgaggtgctgacggaggaggccaaaaaggctgagaccgccaagcaggaggaggccgaccgcaaggcccgtgagaaggcggaggccgaggcggaaaaaaagcgtctgaaggaggaagaagccgacaagaagcggcagcagaagttggaggacgaggcgcgcaagcgcccgcagaagctggacgatgaagcacgccgccgccagcacaagctggaggatgaggagcgccgcaaggccgagcgccagcaggaaaaggcggaagccgaggccaagcgtaaggcggagcgccgtgcagccaagattgaaacgcagctgatctccgccggagggcagatcctcaagcggggtctgctgggcgtgttgaaaaagagataa

SEQ ID NO: 568 - DNA, 1347 bp, Unknown
  Unknown gut bacteria
atgaaaaagctactggctctgctactggctctgctgatgcttctgtcccttgccgggtgcggcaagcaggcgcaggaggacgaggagcccgccgtgatcgagctgacgctgtggacgttccccgcaggcgactggggcgatccggccgccgtggagacgctgctgacccagttcaacagcgtataccccgacattcacgtgacggtacagtgtctggacgaggccaccggcgacgacaagctcagcaccgccgtggacggcggcgtgtcccccgacattctgctggcccagccggatcgtctcatcaaagcatggggcgcagagggcatgctggccgatctgtccgacatgtgggacgacgccgacaagcaggaggtcaacgccgcctgccagagcgtctgcttcacccgggacggcaagtgctacgcctatccctttgccatgaacgtgcagtgcatggccatcaactatgacgccttcgtcaccgcaggcgccgaccagtacatcgatctggagacacgcacctggaccaccgagcagttcacccaggccgtcaaggcgctgcaaagcaagtacggcgaggcggtggccgccgtgtactgctccggccagaacggcgatcagggtacccgcgcgctggtgacgaacctgtacggcggccagttcgccaacgactcctacaccggctacgtcgccaactccgaggccaaccagcaggcgctgaccctgctgcgggacaccaagggcattgaatttgacgacgccatcaatgggcaggaggaggccgcgctgttctatcacgaatccctgaaaatgtccttctgctggagtcttgcccagcagctggccgagacggtggacgagcccaccgaggagggcggcgagccggtggtgcatccggcgggcaagaccgtcaacggccagaccatcgagttcatggccttccccaccgatcccgagatcagccagccccggcttcagggcgatatctggggcttcggcgtgtttgacaacggcgatcaagagcggatcgaggccgccaagctgctgatccgtttcttcgccgacgggcagggcgccagcgccgccgtgaaggccgccgggtgcttccccgtccgcgacacggtggacggcgccgacctgcggaacatctgggcgggcagcgacgtgatgacggaatacgccaagctgacggacttcctgtccggctatgacgcgctgacgcccggctgggccaccgcccgtactgagtggtggaacatgctccagcgggtgggcaacggcggcgacgcggtgctggaaaccgacaccctcgtggaaaacgccaacgccgcagcgaaggagtaa

SEQ ID NO: 569 - DNA, 822 bp, Unknown
  Unknown gut bacteria
atgcgtcctgacggcaagcgggtcaaagaccttccgcccattgtggcggctattccctatatcatgcccaagcggtatgacgcccagaacaccattaccgagtatattgacgaggagctgatcaagtcctacatccgggaaaagcgccgtaccggcgtccggatcaaccatatggccgtcatcatcgccgcctactaccgggccgtgatgtataaccccaagctgaactacttcatcatgaacagcaaggtatacaagcggaaccacttctgcgtgtccttcgtgatcctgaagaagctggcggacggacggcctgacgaaacgtccctgaaaattttcctgacgccggaggacaccgtgttctccatccagcagaagatcaccgacgccgtgtccgccaacgccgccaccgagcagaagaacaataccgacaagttcgcccggatgatgttctccatcccgttgctgcccaagatcgtcatctggctggcctaccatctggataagctgggtctgctgccccggaagatcatcgacctcagccccttccataccagcatgttcatcaccaatctggcctccatcaagaccagctatatccaccaccattgctacgagttcggcaccaccagcgtgtttgtctgcatgggcaagcctgtgccggattacatgagcggcaatctcaacaagaagatcatgccgctgggtgtggtgatggacgagcggatctgcaccggctatgaatacgccgccttctgcaacgatttccgcaagttcctccgcaagccggaggagctggaaacgccctatcaggcggaataa

SEQ ID NO: 570 - DNA, 921 bp, Unknown
  Unknown gut bacteria
atgcggatcttatttatgggcacgccggaatttgcggtggcctccctaaaagcactggtggaggccggtcacgagatctgcggcgtctttacccagccggataagccgaaaaaccgcggccacaagctgacattctcacctgtgaaggaatatgccttgtcacagaatctgccggtgtatcagccgctgaagctgcgggacggcacggcgttggcactggtgcaggagctgcacccggagctgatcgtggtggctgcctatggccgcattctgccggaggatattctgaacatgccgccctacggctctatcaatgtgcattcctccatcctgcccaaataccgcggctcggccccgatcaactgggcggttctcaacggcgaaaaggtcaccggcgtgaccatcatgtatatggccgccgagctggacgcgggcgatatcatccgcgttgcagagactcccattgatccagacgaggatgcccagaccctgacggctcgtctggctctgctgggtgctgacgcgctggtgcagacggtgcacgacctgacggccggtacggccacccgtacaccgcaggagcacgacaagcacacctatgcccctatgctggataagagcatgagccccatggactttacgaagcccgcccagcagctgcacaatcaggtgcgtgggttgattccctggccctgcgcgacaatggagttgaacggcgctagcgtgaaggtctaccgtaccgcagtgggcgaggagaccgccgccgctcccggcgcagtcgtggaagccaacaagaaaggcattgctgttgcctgcggcgacggtaagctgctgcggattttggagctgcaagcacagggcggcaagcgcatgtccgccgccgcctatctggcaggccatccgatcccggtctgcctatga

SEQ ID NO: 571 - DNA, 1269 bp, Unknown
  Unknown gut bacteria
atggagcttctggagaagctgacgatcctctcggacgccgccaagtatgacgccgcctgcacatccagcggcgtcaagcgcagctttcagccggggaaaatcggcaacacgtcctcctccatcgccgggtgctgtcacagcttttccgccgacgggcggtgcattacgctgctgaaggtgctgatgacaaactgttgcgtctatgactgcaagtactgcgtcaaccggcgctccaacgacgtgcagcgcaccgcattcacgccccgggagttggctgagctgaccatcggcttttatcggcggaattatattgagggactgtttctctcctccggtgtgctgcgcaatgccgactataccaccgaacagatgatccgcgccctgcgcattctgcggcaggactatggcttcaacggctatattcacgccaaggccatccccggcacgtcgccggagctggtgcagcagctgggactgttggccgaccgcatgagcgtcaatatcgagctgccctctcagcagggattgcaaacgctggcgccggataaatcgcgggaagcgatcctgcggcccatggggttgatccgggacaaggcgttcgagagccgtcaggagctggtcaagtacaagcacgcgccccgctttgccccggcgggacagagcacccagctgatcgtaggcgctacgcaggacaacgaccggcatatcctgcgcttgacggaggcgctctatcagaaataccggctcaagcgggtgttctattccgcctatgttccggtggtggaaaacagccttcttcccgctctggataccaagccgccgctgctgcgggagcatcggctttatcaggcggactggctgctgcggttctatgggtttcaggcctccgagctgctggacgaggcgcacccgaattttgatccgcagctggatcccaagtgcagctgggcggtaacgcatctggagcagtttccggtggaggtcatgcgggcggattatgaaacgcttctgcgtgtgccgggcgtcggccccaccagcgccaagcgcatcgtctccgcccgccgcacggcgcaccttcgatttgaagatctgaaaaagctgggggtggtgctcaagcgggcgcagtttttcctgctttgcgatggccgcgccgcgccgggactccatttttcacccgctaccctcgtgcagcagctgaaggccgtggagcgcggcgcgctcccctccggggaaatggaacagctatcgctgttcgacgcagttggataa

SEQ ID NO: 572 - DNA, 480 bp, Unknown
  Unknown gut bacteria
ttggaacccatcattcgtgtcgatcatctgacacatacctatagcgccggaacgccctttcagcgcagcgccgtcaaggatatgtcgctggacattctgccaggcgagtttctgggcgtcatcggccataccggcagcggcaaatccaccctcatccagcacctcaacggccttttgaagcctacggacggccacatctacctgaacgggcaggatatctgggccgaccccaagcagatccgtcaggtgcgcttccatgtggggctggtgttccagtatccggagtatcagcttttcgaggagacggtctataaggacgtggccttcggccccaaaaacatggggcttgacgacggggagatcgaccgccgtgtccgccagtcggtgcaggccgtaggtctcagcgccgacgtgctggagaagtcccccttcgccctgtccggcggccagaagcgccgcgtggccatcgccggcgtcatg

SEQ ID NO: 573 - DNA, 867 bp, Unknown
  Unknown gut bacteria
atgaaacagaacgtattacatacgatacgtgccagccgagacagcttctccaagggacagaagcggatcgctgactatatcctgaacaactatgacaaggccgcgttcatgcccgccgcccgtctgggacagacggcgcaggtcagcgagtccacggtggtacgctttgtcgccgagctgggctacagcggctatcccgccatgcaaaaggccttgcaggagatcatccggggcaagctgacctcggtgcagcggatccaggcgtctcaggatcagatgaccggcaacgacattctggccacagtgatgcagcgggatatggacagcatccacaacgccatcgagcaggtggatcgcggcgagttccagcatgtggtggaactgttgctgcatgcccagcacatctatattctgggggtacgctccagctcatttctggcgggctatctgaatttctatttccacctgctgttcaaaaacgtgatctatgtgcagaacacggcggcgggcgagatctatgagcagatgatccacatcggccccggcgacgtgatggtgggcatcagcttcccacggtactccaatatgggcattcacgccattcagctggctcatgaccgtggcgcggatgtggtggccattaccgacagtcagctgtcgcccctgtatccattggcgacggcggcgctgctggtgcggtgcgaggcgctgtcctatgtggattcgctggcggcgccgctgagcctcatcaacgcgctgatcctggcggtaggccagcggaagcgggacgaggtggcgcaggtgttcgccgacatggagcaggtgtggtcaaaatacagtatttttggaaaagcggaagatgaataa

SEQ ID NO: 574 - DNA, 1632 bp, Unknown
  Unknown gut bacteria
atgagcctgtacgcacgtctggcgtgggacggcatccggaaaaataagcgactgtacctgccctatatcctcacctgcgtgggcatggtgatgacgcattatatgatgagcgagctgtgcgccagcgacctgctgcggtacatgaagggcggcggcgcgtcccatattattctggggctgggcagctgggtcattgcggtgttctcggcgctgtttctgttctacacctattcctttttgatccggcggcggcagcgggagttcggcctgtaccacgtgctgggtctgggcaagcggcatctcgcgctgctgtgcgccattgagacgctgataacggcggccgtcgcgctggtggcgggattgattctgggcgtggcgttgtcctttgcggtggagatgggcctgcgctccaccgttcaggcggagatggacttcacctttgcggtgaggggcagcgttgtggcgcagacggcgctggtctatctggccatctttctgctgacgctgatcagcacactgataaaggtggggcgggggagcgccgtctccctgctgcacagcgagaattgcggcgaaaagccgcctaaaggcaacctgtttgtggcgctgctgggtgcggtgctgctgggaatcgcctactttatggcggtgtccattcaggagccgatgaaggcgctggcgctgttttttattgcggtgatcctggtgattttggccacctatctgctgttcatcgccggaagcgtggcgctgtgccgggtactgcaaaggaaccggaattactactatcagcctcggcatttcgtgtccgtgtcctctatggcctaccgcatgaagcgcaacggcgcgggactgccctccaccagcattctggccaccatggtgctggtgatgctgtcctcctctgcctgtctgtacttcggcgcggaggacagtctaaaggccacgtacccccacgagtttgcactggaggtgtggctggagaacagcgctgacatgccgaaattgcaggaggctctgaccaaagcgggcgcggcctatggcgtgaacgtctgggagaagggcactgtggaaccggggagcggcaatacgtggagcgccgcctttgacaccggcctttcccaagagcagcagctggcgttgagccgcgccattgacgaggcgctgggtgacacggacattacgtggaactacttccgctcctaccgggcggaagctgctgatgatttttacggcacctacggcagcctgttctttatcggcatcgtgctgagcgtgctgttcatctgcgcggcggtgcttatcatctactacaagcagctatgcgagggatacgaggatcaaccccgtttcgccatcatgcagaaggtgggcatgacggcggcggatatccgcaggagcgtcaattcccagctgctgacggtgttcttcctgccgctggcgggcgcggcgctgcacatggcgttcgcattccccatgatccggcggatgctgctgctctttgagctacacaacacgggactgttcatcgccacggcgctggtcagcttcgcggtactggcggtggtgtacacgctggtgtacaaggccacgtccaacgcgtattaccggatcgtgaagggtagcgtgtga

SEQ ID NO: 575 - DNA, 1332 bp, Unknown
  Unknown gut bacteria
atgcgtatttgcaaggagagcgtcactatgagcaccgtcatcacgtctatcgacccccattccccggcggaaaaggccggaatcgttgtgggggagcagctgctggagatcaacggccaccacatcgtggacgtgctggactaccggttttatggctatgaccctgtggcggtgttgcgtctcagcaaggacggccacacccgcaccgtcaccatccgcaaggaggagggccgtgacctgggcctgaacttcaacacctatctgatggacgagatgcaccagtgcgccaaccactgcctgttctgcttcgtggatcagatgccgcccaacatgcggccgtccctgtacatcaaggacgacgacgagcggctcagcttcctgctgggcaactacaccaccctgaccaacctctcggagcgggaggcacagcggatcatcgacctgcacatcagccccatcaacgtgtccgtccacgccacggagccgcagctccactgtacgctgctgggcaacaagggagcggagcggtcgctggaatacatccggcgattctgcaaggcgggcatcgtcatgaacggccagatcgtggtgtgccccggctggaacgacggcgacgctctgcgtcgcacgctgcgtgacctgacggactggcagttttccagctgctcgctggtgccggtaggcatcaccaagtaccgtaagggccttgccaagctgcggcctgtggacagcgaatgcgcgcgggagatcatcgccattgccgaggagtacgggcaggagaacctgcggcgctacggcacccggcggttcttctgcgccgacgagctgttcctgcgggcgggactgcccctgccggaggaggactactacgagggctaccgccaaatcgaaaacggcgtgggcatgctgcggtcgctggagcaggagttcctgtccgccatgaagctggaggagccggacgccgcgcccagccccttcaccatcgccaccggcgtggccgccgcgccctttatgcagacgctggtggacgccgccaaagcgtacttccccaagcttgacgcggaggtggtggccgtggagaacgacttcttcggccgcaccatcgacgtggcggggctgctgacggggcaggacatcgccaagcagctgcaaggccgggtcactggccgccgggtgctgctgacggtgcatatgctgcgccacggcgaaacggtatttttagatgactatacggtggacaggctttctcaggaactgggcagccccgtccagatcgtggacgacgacggcggctcgctgctggacgccatgctggaagccaccgtgggataa

SEQ ID NO: 576 - DNA, 999 bp, Unknown
  Unknown gut bacteria
atgaaaaagatcttcgcaccggtgctggccgccctgatgctgctgccgctgctctgcggctgcggcacggggacggcagaagcggaactgaccacggtacgcctgaacgaagtgacccattctgtgttctacgcgccgcagtatgtggccatggagctgggcttcttcgccgaggagggccttgccattgagctgaccaacggcggcggggccgacaaggtgatgaccgccgtggtctccggacagagcgacatcggtctggcggggccggagagctgcatctacatttacaatcagggcaaggacgatcatccggtggtgttcggccagctgacagcctgcgacggcgcgttcctgatgggccgggaggacgtttcctttaactgggaggatctgcggggcaagaccatcatcggcggccggaagggcggcgtgccggagatgacgctggaatacgtgctgcgccagcacggtctggagccgcagaaggacgtgatcgtggacaccagcgtgcagttcaacatgatggccggggcctttaccggcgggcagggagactatgtgacgctgtttgagcctgccgccacgcaggtggtcacctccggcgagggctatatcctctgctccatcggtgcggagagcggcgcgatcccctataccgcctatttcgcgtcccagagctacacggcggagcatgacgacgtgatcgccgccttctgccgcgccattgccaaggcgctggattgggtggattcccacaccgaccgtgaggtggccgaggccatcatcggccagttccccgacaccagccttgacacgctggaggccgtcaccgcccgccaccgggagatcggcgcgtggaacacgcccctgaccatggagaaggcggcgctggagcggctggagacggtcatgacccaggcgggcgagctgactgatgaccagtgggtggatttcgataagctggtggataaccactgggcggcagcggcaagatga

SEQ ID NO: 577 - DNA, 1962 bp, Unknown
  Unknown gut bacteria
gtgacaacatttgctctgctggccgttgtgctgctgccggtgctgtcggcgctggtcatcgctctgctgccggatcgccatgacgacggaaagcggctgggttcgctgtccatcgtgttcacgctgctgacgctgctggctatggtatacgtagccgccacagcggacggcagtactgtcaccgttccggtgatgcgcctgagcttctgggccggtgggttccagaagctgtacgggctggtggtgtgcttcatgtggttcgtctcggcgctgctgagtccccagtatttccacggacaccaccacctgaagcggtactatttcttcttcctcatctgtctggggttcacggcgggggtgttcctgtccgccgacctgtacaccaccttcctgttcttcgagctgatgtccctcagctcctatgtgtgggtggtgcaggaggagacccccgacgccatggacgccggtaagacctacctgaccatcgcggtgctgggcggtctggtgacgctgatgggtctgttcctgctgtacaccgccaccggcacactggtgatcgcggagctgcacgaggccgtggccaccatggagcgcggacgtctatgggccgccgcgctgtgcatcctgttcggcttcgccgccaaggcgggtctgttctcggtgcatatctggctgcccaaggcccacccggtggctccggctccggcttcggcgctgctgagcggcgtgctgaccaaggccggtatcttcggcgttctgctgctgacggcgcaggtgctgacgggcgaccacgactggggcatgctgcttctggtgctgggcgctatcaccatggtgctgggcgcggtgctggcggtgttctccaccaatctgaagtacattctggcctgctcgtccctgtcccagatcggttttatcaccgtgggcgcgtccatgatctgcctgctgggcgagcataacgcgctggccgccaacggcacggtgctgtacatgatgaaccactcgctggtgaagctggcgctgttcctgttcgccggtgtggtgtactacaacacccacgcgctggatctcaacgatatcaagggcttcggccggggcaagccgctgctgcacgtgctgttcctgtgcggcgcctgttcgctggcgggtattccgggctttctggggtacctgagcaagacgctggtacacgaggcgctagtggaatacgcccacatgagcggcatgaccatcatcacggtggtggagtggctgttcctgttctccggcggattgacggcggcgtatctgacgaaaatctacgtggccatcttctggcagaagggcagggagaccggcaagcagtggggcaagccactgtctgtcatcgccctgtgccttgccgccgtggcgctgccggtgctggggttgacaccccacgccatcgccgagaggatcagcggcgcgacgctggacttcaccggcggacacgccttcgaccacgccatccactacttcgcgtggacgaatctcaagggcgtggtgatctcgctggccatcggcatggtggtgtacttcctgttcatccgcacggtactgatgcggaaggacggcttctatctcagccgctggcccaagtggctgagtctggaggacagcgtgtacaagcccttcttccgcgccctgttcgcggtggtgggcgtggtgtgccgcgtggcctgcgacgccttcgacgtggtggtgctggcggtgcagcgggtgctgctgcggcctagcaaggaaaaggagccccagtcctactccccgctggtgcaggccatcgcgcggcagagcggcgacaaggccgcccgggaagccgccgaccgtctggacacccggcgggacatgcgggaccgtatggcccacagcctgtccttcggtctgctgatgacgtgtctgggattgtgcgtgattttgacggtcgtgatctgccacgtgttctaa

SEQ ID NO: 578 - DNA, 564 bp, Unknown
  Unknown gut bacteria
atggcgaactttacgaagcaggcgatcaaggcctcgtttttgaagctgctgaaccagcagcccctgaacaagatcagcgtgcgggacattgtggaggactgcggcatcaaccgcaactccttttactatcacttccgcgatatcccctccctgctgggcgagatcgtcaccgagcagacggagcagctgatccgcgcctacccctccatctcctcgctggacgagtgcttccacgtggccttccggttcgcgctggagaataagcgggcggtgatgcacatttatcattcggtaaaccgggatgtgttcacccagagcatgctgaagctgtgcgaatacgtggtgacgacctacattaccaccgcgttccccgacgatctcatcaacgagagcgaccgcagcgttgtgatccggttcatgaagtgccagctgctgggcatgtgcttcgactggatcgaccggggtatgaccaacgccgcctatgacgacctgcaccggatgctgcagctgagtcagggcgtgccggagcttatcatccgccgcagccaggaaaccaacgggtaa

SEQ ID NO: 579 - DNA, 963 bp, Unknown
  Unknown gut bacteria
cgtctgctggtgggcatccccggcaagtccaatgccttcgccatctcccggcggctgggactggacgagagcgttatcgccgacgccaaggcccagatggacagcgaatccctccggtttgaggacgtgctggcccagctggaggagaagcggcaacggctggaaaaggcccagaccgaggccaaccgcctggggcagcagcgtgaggaggacgcccgcaaggcacgtatcttccgggagcagatggaaaaggccaaggagaacgcccgggccaagggcgaggccgaggccaagcgcatcgtgcgggaggctcagcagaaaacggaggagatctttgcccagctggaggaactgcggaagcagcagacccgcgccgccaactttcagcaagtgaacgacgccaaggccgccatccgccacgacttgaaggaagcggaggcggtgctgcacagccgggatcaggaaccggaaacacctgcgcccagccgccccatcgccgtgggcgatctggtggagctcgcgggagtgaaaaccgccgccacggtgctgaacgtcaacggcgacggctctatgctgctgcaggccggaaagatgaaaatgaccgtgaaggccggacaggtgcggctgctggaatccgccgaggagatcgaaaagcggaagaagcaggtggctgccgcccagcgaaaaaacgtgtcgccgcaaattcaactggcggcccgcgccgcatcggagctggacatccggggcatggagacgctggaggccgagagcgtggtggagaactacatcgacgccgccgtcatggccaagctgggcaccgtgaccatcatccacggcaagggtaccggcgcgctgcgcaaggcggtgcacgagatgctgaagcggaaccgggcggtgaagtccttccggctgggccgctatggcgagggcgaggccggcgtcacggtggtggagctgaaataa

SEQ ID NO: 580 - DNA, 1182 bp, Unknown
  Unknown gut bacteria
ttgggggatactgccttggaactgaacaaaaaaaccatacgaaacattctgctgatggcggcagccgtcatcgccgtgtggtggctggtgaaccactttgacctgctgctgcgcattctcaacgccattctcagcatcctctcccccatcctgatcggcttgatcctggccttcatcctgaacctgctgctgaatccgctggagcggctgtggaacagactgttcctcaaggagggcagcaagcccattgtaaagaagctgcgccgccccgtctgcctgctgctgagctttctcattgtgctgggcgtgatcttcgccgtgtgcttcgtggtgatcccccgtctgggcagcaccgtggtggacatggtgaacaccatctccgactatatcaggacgctggacgtgcggtacgacgacctgcgcgtctcgctggagcagtatgccatcactctgccggagatcgacctgggcaaaaacgacctgctgaccaagctcaccgacctgctggccaagggcggctcggccttgctgaacaccaccatcagcgtcaccacgtcggtgctgtcggcggtggtgaacctgctgatgggcgtggtgttctccatctatatactggcccagaaggaaacgctggcccgccagctgaaaaagctgctgtacctgacgttcccggagcagaaggtcacgccgtttctggcgtttctgggccgcgtcagccgcacgttctcccagtttatcaccggccagaccatcgaggccgtcattctgggcacgctggtgctgctgggcatgctgatcctccgcctgccctacgccccggtcatcgccgtgctggtaggcgtcaccgccctgatccccattctcggctcgtggatcggcgccatcgtgggcgcgctgctaatcctgccggtgtccttcatgaaggccatctggttcgtggtgttcctcatcgtcctgcagcagatcgagggcaacctgatctacccccatgtggtgggaaaatccgtgggcctgccgggtatctgggtgttcttcgccgtcatcgtgggcagcggactgggcggcgtcgccggtatgctgctgggcgtccccgtctgcgccgtgatctatgacgaggtacgccgcaccatgcggaaaaaggaagcggcactgacggtaagcgacaatgaaaaggtttcctga

SEQ ID NO: 581 - DNA, 1428 bp, Unknown
  Unknown gut bacteria
atgaaaatactgtttgccgccagtgaggcgtttcccttctgcaagacgggcggtcttgcggacgtggccggcagtctgccggtatctctggccgagaacggcgatcaggtggcggtgatcctgccgctgtatgataagatcccctacgagtggcggcagcggatggtctaccgcagctatatctatgtggacgtggcatggcggcaccagtactgcggcctgttcgtcatggagtatcggggcgtgacgtggtatttcgtggataacgagcactatttccgccggggccgcctgtacggcgagtatgacgacggcgaacgcttcgcctttttcagcaaggcggtggtggatctgctgcccagtctggactggatgccggatgtgatccactgcaacgactggcagacggcgctggtgcccatctacctcaaggacgttgccacccgctgggacgcggtgcggggtatcaaaaccgtgtttaccatccataatatcgagtatcagggccgctatggccccgacaccgtggccgaccttttcggtctgcacgagggctggtggaacgatggcacgctgcaaatggacggcgacgtgaatctcatgaaggccgccatgctggtgtccgacgcggtcaccaccgtcagccccacctatgccgcccagcttcacgacgattactatgcccacggcatggcttccatcgtggacgccatcggctataagctgcacggcgtgctgaacggcatcgacatgacctcctacgacccggcccatgatatggccatccctgtgcactacggccccgacgacatgaccggaaaggccgcctgcaaggctgaccttcaggtgtcgctgggactgcgggaggagccggacacgccgctgctggcggtggtcagccgtctggtgggccacaagggcatggagctaatccgggacggctttgacggcattatggccaccgggtgccagctggtggtgctgggtcagggcgagggctactacgaggactttttccgggcgcaggcgggccgttatgtaggccgcaccgccgcgctcatcacctattccgaggggctgagccgccgcatttacgccggtgccgacctcttcctgatgccctccaggagcgagccttgcggcctttcccagatgatcgccatgcgctacggcgcggtgcccatcgtccgccgtaccggcggactggccgacagcgtgcattcctgtcaggtgggccagccggacggcacgggctatcttttcgaggactatgacgccggggccatgctgtccgtcatcgggcaggccaccggactttacaagggcgacaggacgggctttgctgccgtccagcggcggggcatgaccgccgacttcagttggacgcgcagcgcccgtctctatcacgatatctattccaagctgtaa

SEQ ID NO: 582 - DNA, 1311 bp, Unknown
  Unknown gut bacteria
atcactcccccacccatcgcttgcttccgctgggcgggtgtggtatactataccacatcgatgggcacgattcccattgacggacactacccccatcaacaaacaaaggagaacgccatgggcaaaaatgaaaaaaccgtggaaaccacggtgttcgactatctgcgctggcggggcgacctgaccttcgcccaggacagctttaacgaggtggacaatctggtgctgtgcatcatcgcctacctgaacttccgccgctttccggagctgaaaagccgcgaggcggacaaggccgtgccgctgggcgacgtggtcgcccgcatgacggcggaggacgagcagcaagggctgtcccccaacgactacatccccctgatgcgtctggcggcggagtcccagcggttcggcggcgtgcggatgctgggctatgaggcggtgcgggacgaggaaaaggagatgcagctggacgcggtgtccttcctgattccggacggcacgctgttctgcgcctttatgggcaccgaccggtcgctggtgggctggaaggagaacctgaacctcagcttcatggacgcggtgcctgcccagaccggcgcggtggcctacgtggaggacatggcgcggcactgccccgaccgtccgctgcggatcggcggccactccaagggcggcaatctggcggcctacgccgcgctgcacatcgacggcgcattgcagcgcacccgtctgctggacgcctataacaacgacgggcccggcttccgcaaggacgtgaccgacacggaggagtaccgccgggtggcggcgaagctccacacctatatccccgcctcctccatcgtgggggtgctgctggagcacaccgaggactacaccgtggtggccagcagcagccgcgccgtcatgcagcacgagccgctgacgtggacggtacagggacggcagttcgtccggtgtccggagcgctcggagctgggcaaggcctccgacgacgtgctgcgccagtggatcgcctccatgagccgtcaggagcgggaggagttctccgaatccctgtacgacatgctgacccagggcggcaagctgcggtcgctggaggaggtcaggcagaaggacattctccggctgctggccgccgacgagaagaacaagggcatcgtgtcggaggtgctgcgccgtctggtgacggatgtgagggacgaggtgctgcgctcggcagaggccggtctgaagggcacggcggagacgctgaaggagaccgccggaagtctctatcaggcgggacagaaggcgctggagaagcggaagtaa

SEQ ID NO: 583 - DNA, 1035 bp, Unknown
  Unknown gut bacteria
gtgtccgcggcgctgttctttttgacggtgctgctgtgcctgctgctgcggtcggtcgacccccacagcgacaccagctatgtggccgtcctcttttttctggacgtgttcctgacggcgctgctgacggacggctacctgttcagtatcctcatcgccgtcaccggcgtgctgtgcgtggactacgtgttcaccgagccctactgggagatcagcttcacgctggcgggatttccgctgacgtttatcgtcatgatgttcatttcggtggtcaccggcatgctgaccagccgcgccaagcaggtggaaagtcttaagcgcgaggcggagcgggaacgtatccactccaatctgctgcgggcggtgtcccatgatatccgcacgccgctgaccggcatcgtgggcgccacggacgtgctgctggatcaggagaacgccctgacgccggagcagcgtcaccagctgctctcctccgccaacgaggatgcccgctggctgatccgcattgtggagaacctgctgtccatcacccgcatcggcgcgcagggcgacgccaaggtgaccaagacgctggcggtggccgaggaggtcatcgagggcgcggtggcgaagtttaccagccgtggcggcaagcttccggtgcatatccatctgccccaggaggtgctgctggtgcccatggacgagctgctgatcgagcaggtgctgctgaacctgctggaaaacgccgccatccatgccgagggcgccaccgaggtggacgtgaccctggagcgaaagggcgatgtggcccgtatcaccgtggaggacaacggcgtgggtatcgcccacgataagctgaacaatctctttgacagctccgcccaccagagccagcagggcgaccgcaagcggaacatgggcattggcctttccgtgtgcaagaccgtggtacaggctcacgacggcatcatttacggcgaaaacgtctcccgccacggcggggcgcggtttgtgatcgaattacctatggaggaggaagaccatgaagattaa

SEQ ID NO: 584 - DNA, 951 bp, Unknown
  Unknown gut bacteria
atgatgaccatgaaaaacatcgtgaagaagatcggaatgatgcttttgaccatggtcatcgtctctttcttcgcgtttctggcgttccagatcatccccggcgaccccaccaccaagctgctgggcagcgacgccaccgccgaagcggtggcggctctccgggcggagttggggctggatcgtccctttttcacccgctatttcgagtggatgctgaacgccctgcggggcaatttcggcacgtcctatgtgtacgccatgccggttgcgtcgctgctgcacggcaagctgggtgtcaccgcattgctgacggccatcgcctttgtgctgatcgtggcggtgtcgctgccggtggggctgttcgccgcgtcccgtcagagcggctggctggatcgcgccctgacggtgctgggtcaggtggtcatggcggtgccgccctttgtggtgggcattctgctgacgctgctgtgcggccttgtgctgcggtggttcgaccccggcgcgtttatctccccggaccagagcttctggcgcagcgtgggctatctgatctatccggcggtagccatcgccctgccccgcattgccatgacggtgcggatgctgaaaagctccatcgtgggcgagctgaacaaggattatgtccgcaccgcctacagccggggcaactcgccccgcgccaccctgtaccgccacgtgctgcgcaacgccgtggtgcccacggtggcgttcctcgccatgacggtggcggacattgtggccggcagcgtcattatcgagcaggtctttgccatccccggcattggccgcctgctgctgacctccatcgccaaccgggacttcccggtggtgcaggccattgtggtgatcctggcgctgtgggtggtgctggtgaactgcctggccgatatcctcaaccagcggctggatccccggctgcggctgcaataa

SEQ ID NO: 585 - DNA, 1059 bp, Unknown
  Unknown gut bacteria
atgaaaaaagaaacattcaatctggtcgtccgctttctggtgggcctggcgctgtcgctgctgatctgcgccggtatgatcatgacgggaaagctgggcagcgacaagcctctgctccagcaggccagcggcctgaagggcacggaaacggtgatgaccgtggacggcgagccggtggagtcctgggagtacctgtatatggtcacttactcggcccagaacctgtcctattacggcgtcaccgatctgagcacgcagctgggcgagggctttaccgccgccgactacgtggcacagcaggcggaggctcaggtgaagcagcaggccgctgtccggaagtgggccaaggatatgggcatcacgctgaccgaggatgacggagccaccctgcagcagcagaaggaagcctacggcgaggatctgcagaaggtattgcagatcaacggtctcacggaggagcagtatgaccagctgatgagcaccacgctgctgtataaccggctgtacgccgcctattgcaccacggatggcgcgctgcgtcccagcgacaaggatctgctggcgctggcggaggagcatagcctgatgaccgccgacgtgctgttcatcagcaccgccgagctggacgacgccgccaaggcggacgccaaggccctgatgggcgattatgcccgccagttgtccaccgccgacgacaaggccgccgcctttgccgcgttggaggcaggggagaacgtgaccgttctggccagcaacacctatgacggctgcgacgagaccacgctgaacaaggcgctggccgcactggcggaggatcaggtcagcgacgttatcgaggatgagaccggctactatgtggcgctgcgccgcgctgtggatctgaacgccgtggccgagatggcctttggcgaggatctgtccgcccgtatctccggcgcacaggtggagcataacgacagcgtgtacaacgccattgacctgacgtccttctacgcccgctataccgccggccagcagaagctctatgctcaactgacagcggagcagccgcagggctaa

SEQ ID NO: 586 - DNA, 606 bp, Unknown
  Unknown gut bacteria
atgagtttggataagaagggaaaaacatttgtgatctccgggccgtccggcgtgggaaagagcacggtgctgaaagcattgtttgaggggcgtgacgatctgtatttttccgtgtccgccaccacccgtgcgccccgtcccggtgaggagcatggggtgaactactatttcatcgagccggagatgttccaccagtggatcaccgacggtgaatttctggagtatgccgagtatgtaggcaacttctacggcacgccccgcaaatatgtggacgaggccatggcggcggggaaagacgccatcctggatatcgagatccagggcgccgcacaggttcatacgctgcggcctgaggtggtgcggatcttcatcgcgccgccctcgtgggaggagctggagcgccgccttaccgcccggaacaccgactctccggaaaaggtgcaggagcgattgctgcgggccaaggtggaactgaaggctgccgaccagtacgattattttgtgataaacgacaacgtggagaacgccgtggcggagctgcgggccattatgctggctgagcactgccgccccacagaccgcatccacctgttgcgcgaagcataa

SEQ ID NO: 587 - DNA, 540 bp, Unknown
  Unknown gut bacteria
atggcaaagatcgtaaagggaatcgccgctttctctctggcggcgacggtcattctggccatttcatataaagtgacatccagcggaatattacttccccttgccattaccagcggaaccatcgcctaccattttgttatgcggctgatggtgggactggcgtttcacgctacgatgcggaacaaagcggattaccggaaacgatggtatcaggtaagcaagcgggaaatggcggtatacgaaaagctgaaggtgaagcaatggaagcgcagaatgcccacctacgatcccgcgctgttcgatccgcggctgcatacatgggaggagatcgtacaggctatgtgtcaggcggagcttgtccacgagacgatcgccgtgctgagctttctgccgattttggcaggtatctggttcggcgagtatccggtgtttatcgtgacgtccgttttgtccgccgcgtgcgacatggttttcgtcatcatgcaacgctataaccggcagcgggtcacgaagctgctgaatcggaaaagtgtgagataa

SEQ ID NO: 588 - DNA, 990 bp, Unknown
  Unknown gut bacteria
ggcgtggcgctggactgcgaaaatctggtgcaggagatggagacgctccgcgccgcaggcgtcagcatctctccggagaatctgatggtcagccatcgggcttccctgctgctgccgtggcaccgggagcaggacgcgctggaggaggcccgcctgaaggacaagatgtacggctccaccaagcagggcatcgcgccgttctattccgacaagtaccagaaaaagaccgttcaggccggtgagttgctgtatcccgaccacctgaaggcccatttgcaggatctgctggagtggaaaaacctgatcctccagaaggtctacggcgcaaagggctataccatggaggaactgacggcgtggctggacacctacgccgcgcaggtgcgcccctatgtggccgacaccggccgctatctccgcaaggcccaggaggagggcaagtccatcctgttcgaggggcagctgggtgcgctgcgtgatctggactacggcatctatccctacaccacctcctccaacaccatcgctgcctacgcccctgtaggcgcgggactgcccacggccaggatcgaccaggtggtgggcgtggtgaaggcctattcctcctgcgtgggcgaaggccccttcacctgcgagtggttcggccccgacgcggagaagctccgcgaggtgggcgccgaatacggcgccaagaccggccgtgcccgccgggtaggccccatcgatctggtagccacccgctacggcgtagaggtgcagggcgcgacgaatatcgccctgaccaagctggatatcctcagctatatgaccgagatccccgtctgcgccgcctatgagatcgacggccagatcacccgcgagttccccttccccgccctgctggaaaaggccaagcctgtgatggagtaccgtcccggctggctgtgcgacatttccggcgcacggacgtgggaggagctacctcaggccgcccgtgagtacgtggagtac

SEQ ID NO: 589 - DNA, 690 bp, Unknown
  Unknown gut bacteria
tatatcgagctgaccaagacccgcctgaatggcgaggacgccgccgccaagctggccgccgaaaacgtgctgtgctatgtgctgctgcgtatcctggagctgctgcatcccttcatgccgttcctgacggaggagatctggcaggcgctgccccacgagggcgatttcctgatccgcgccgcatggcccacctatcaggatgcgctgcatttcccccaggcggagtccgacatggagaatgtgaaggacgccattaccgctgtccgtgcccgccgcgccgagatgaacgtgccgccctccaagaaggcgcagctgatccttgtgaccaagcggcctgaaacctacgaggtgggcaagcacttcatcacccgcatggcctatgccagcgaggtgacggtcaccgctcaggctcccgctgatctgaagggcatggtcaccgtggcgacccacgacgccaacatctatctgccgctggcagagctggtggacattgccgccgagctggagcgcatcgccaaggaaaaggccaaggccgaggacaacctgaagcgtatcgaggccaagctggccaacgagtccttcacctcccgcgccccagagaacgtggtcaacgccgagcgggaaaaggccgaaaaggcccgttccctcatcgccaagctggaggaatccgccgctgctatgaagctgtaa

SEQ ID NO: 590 - DNA, 1554 bp, Unknown
  Unknown gut bacteria
atgaaaaagcaccgaatacaacagaaaacggaacggcggatcagcgccggactgcggcttgcgctggtggcgctgctgctgctggtgcagatcgcactggtggtggggctgtccgtgctgctgcagcagaaaatggcgctggcctatacgctgctgcaagtgctggcattgatcgtggccggacgcgtctacacccgccccggcagcagcagctacaagatcggctggatcctgctgatcctggtggtacccgccgcgggtctgatcctgtactggctgtggaacggcgaaagcagtgccaagcggctgacgctgaaaaaggtgccgcttccggcggagagtcccgtccagatggagcagtgcgccgccgcggcgtcggcgctggcagagcaaatgccggagtggaaccgtctggcctgctacatggcacggggcggcttccccctgtacgacagcacccaggcggaatatctcgccactggcgaggcgtatctcagcgatctgctggagcacatggagcaggcgaagcgcttcatctttctggaatactacattgtggcacggggcgagatcttcgaccggatgctggatatcttccgccgcaagcgggcggagggcgtggagattaagttcctctttgatgacttcggcagcatgatgcgcttcggcaacgaggagatcgacgcactgcaaagtatcggcgtggaggtcatgatcttcaacccggtacaccagtacgtgaaccggctgtacttcaactatcgcgaccaccggaagatcgcctgcatcgacggcgaggtggcctataccggcggcgccaatctggcggacgaatacgccaacatcatggagcggttcggctattggaaggactgcggcgtgcggctgaccggccggggcgcctggggtctcacacgggactttatccacctgtgggagcggatgggcggcacgctggcaaacggctacgactactaccgtccccgcttcggcgcggagggtcagggcttcgtccagccctttgtggacggcccggacaacaaccccatcaacaccgccgaggacgcgtttttgcagctgatcgccggagcgcgggagacgctgaccatcaccacgccgtatctggccatcgatgagcccatgatgcgttccctgtgtctggcggcggacagcggcgtcaaggtacagctgctgatgcccggcatccccgaccacaagttcgcctatctggtggcggaaagctactggggtgagctgatgcgccacggggtggagatcgacattttcacgccgggcctgctgcacggcaagaccgtgctggcagacgggaaaatggcgtttgtcggctcggtgaacatggattaccgtagcttccagctgcatttcgagtgcggtacgctgctgtacggcacggcggcgtcccagccgctggcagaggacatggcgcgcatcgccgcctccggcgaacgcatgaccatgaagcgctggaaaagccgtccctggtatcacaaggctcttggcacgctgctgcggctgttcgccatgtggatgtaa

SEQ ID NO: 591 - DNA, 1269 bp, Unknown
  Unknown gut bacteria
atggcagttaacaccgatctctccctgcggcggcaggtgatctacagcgtgtttgttcgaggacacaccaaggagggcacgttccgtgcgctggagggcgatctcgaccgcctgaaagcgctgggtgcggatatcctgtggctgatgcccattcaccccatcggcgaggagggccgtaagggcaccatgggcagcccctatgccatccgggattaccgggcggtgaaccccgacatgggcaccgtggacgacctgtgccatctggtggacgccatccacgaccggggcatggagtgcatcatcgacgtggtgtataaccatacctcgccggactccgtgctggcggaggcgcacccggagttctttttgcgggacgagcagggaagacccgcccgcaaggtggccgactggtgggatattgtggatctggattacagcaaccgcgacctgtggcgctatcagatcgatacgctgaagcagtgggctgccatcgtggatggcttccgctgtgatgtagccagcgctgtgccggtggagttctggcggcaggcccgtgacgaggtggagatcatccgtcccggctgtatctggctggcggagagcgttcacggcgctcatgttttggccatgcggagaatgggcgcttactgcgccacggataccgaggtgcagtccgtgttcgaccttacctatgattacgacgtttggcccttctatgagggcgtgctgaccggaaaggtgagtctgcgggagtacgcggatatcctgacctatcaggagctgacctatcccggcagctacgtcaaagcccggtatctggaaaatcacgacacaccccgtgccgccagctggatgagggacgatacccagctggacaactgggtggcgttcctctacttccagcggggcactgtgatgctctacagcggcatggaatacgcccccaaggaacgggtggacttctttgaaaatcagagcaactatggcgacatgcagcgggacatgcagctctatctgcgaaagctgaaggagctgaagcagacgctgcccatcaccggcggctattggctggaggagagaaacggcctgctgctgggacattacgagggcccggagggcaaggcgctgggcgtattcgacctgtgcggacagggcgcggccgatgtggcggtagagctgcctgacggcgactatcccaaccgtctgggaggcagcgtgaccgtaaagaacgggcggcttgcttttgatggtaagcctgtggtgatttga

SEQ ID NO: 592 - DNA, 1266 bp, Unknown
  Unknown gut bacteria
atgatgggaaaacgtctggcggcgctgttgtgcgcgctgctgctgacggcgacgctgctgccctcggtggcctatggcaccaccacgtctgacggcgcggccaaaaccgacgaaacgaaaaccgataccaccaaaacggagaccaccacaaccgatacgaaggcggaggataagaccacggatacgaaaaaggacgacgccgacgccatccgcaaggagtatcaggatcttcaggatcagatcaacaacaagcgcaaggaaatggacgatctgaagaaccagctgaacaacatcaagaaccagaaggccaacacccagcagcagaagaacctgctggatcagcggaacgccgctttgcaggaggagatcaatctgctggaggagcagatcgacgtcaccacccgcagcatcgccgccaacgaggcgctggagaagcagcaaaccgagctgtttcacaagcagatccgcagcgaggaggagcagggcaccatctcctactggtcggtgctgttcaaggccaccagcttctccgatctggtcagccgcatcgactttatcaacgagatcgtccggtataaccagcaggtcataaagaacctgcgggatacccggcagcagctggccgacgacaaggcggcgctggaggaacagaacgaatccctgaccgcctccaagaaggagctggagggcgaaatttccgagagtatgcggctgctggcggagtacatcaagaccgaggaaggcaagcaggcggagtacgacgccatcaaggcggaggaagaagcactggacgacctgatggcggcggcagaggccaaggcccgtgagctgggtctgaacgatattgcgggcaccgtgggcggctacatctggccctgcaacggcattcgctggatcacctctatgtttggcggccgccaatcccccggcggcatcggcagcaccaaccacaagggcgtggatatcggcacccccatgggtacgccggtgctggcggccaagtctggcactgtcacctgggccagctggaacggcggctacggcaactgcatcattatcagccacggcaacggtaactccaccctgtacggccatctcagcggctataatgtttccacggatcagcaggtgacgcagggacaggtgatcggctattccggcaataccggcaattccaccggcccccacctgcacttcggcatcattgaaaacaattcgtggatcgatcccctgaactatctgaccggctggcagtattacggctaa

SEQ ID NO: 593 - DNA, 906 bp, Unknown
  Unknown gut bacteria
atgggaggtgcggacatggaaagcgaaaaatgccgtgttctgctgtgcgccatcgacaagggctctatcacggcggcggcggaagccatgggctataccatttccggcgtcagccgcatgatggcggcgctggaagcggaggtaggctttccactgctgcgccggagccgcgagggcgttacccccaccaacgaatgctgccgcctgctgccatccttccgggagatggtggcgcaggcggagcaatgccgccagatagcgggggaggtgcggggtcttgtgtccggcacggtggccatcggcacattttccagcgtggccacccactggctgcccaatatgatcggcgcgttccagaaggactatcccaacattgactttgacattcttatggggacgtatccggagatcgagcagtgggtcatgcagggccgggcggactgcggcttcctgcaccttcccacacgggccgacttgaaaaccgtgtgtctggcgcaggacgagctgatggcggtgctgccggaggatcatccgctggcggcgctggaaaaaatcccggcgtcggcgctggcggagcagccctttatcctgctggacaaggcaggggaacgggatagggacgtgatgcaggtgtttgagcgggccggtatcgtgccgaaggtgcggttcaccacactggacgactacgccgttatgtccatggtggagcatggactgggcgtcagcattctgccgaagctgatcctgcggcggatcccctatcgggtggcgctgcgtccgctggagcagccggttttccgccagatcggccttgccacacgaccgggtgaggagctgtcgcccgccgccaagcgttttctgagctatttgccctatcgggactgtgatacgttatctgaaaagtag

SEQ ID NO: 594 - DNA, 855 bp, Unknown
  Unknown gut bacteria
gtggtgctggcggtggtattggctgtgatcgtggcggcgctggcactgctggtgttccgctcgctgctgcctgcggctcagcgggaggaaccggatccccacgcggggcagatctacgtcaacgacggggccaatatggtgtggctgacgccccacgagaactttgccgtcagcccgctgcaccgctggcagttcgtcacgctggaggggcagccctggtatgtaggcagcgaatttgccgtccggcggggcgtcgacctgtcggtgttccagaaaaacgtggactgggccaaagcggcggagagcggcgtagagtttgccgtcatccgtctgggcttccggggctacggcaagggcgccttgcagccggacgacctgtttgacagccatctggacggcgcccacgccgccggtatcgacgcgggcgtgtacttcttctcgcaggcattgacggcggaggagggcagggaggaggctcaatatgtgctggaacggctcaaaggccgtaagctggagctgccggtgtattttgactgggagccgatcagcgccgaggattcccgcaccaacggctacgactacgccaacctgaccgacagcgccgtggccttctgccagaccattcaggcggcggggtatcaggcgggcgtgtacatcaaccgccagcaggggtactatcactacgatttgagccgtctggcggattattccctgtgggtggcggactacaacgcctatccggatttctactaccggttcgacatgtggcagtactccgccaacggacaggtgaacggcttcgacatacaggtggatcagaatctgttgttcgtaccgaagaacgccgtggaatag

SEQ ID NO: 595 - DNA, 897 bp, Unknown
  Unknown gut bacteria
cagtacaagacggtggagcacgagctgatgtaccgccgggagagcgtgttcgaggccagccggggcatgcagcgctttgtggtgggccttgccaaaaaggtgctgatcgccaatcaggtgggcgccctctgggagcagatcagcgccatgtccgcccccaccgctgtgacggcgtggctgggcgccattgcctttaccttccaaatttacttcgatttttccggatattccgatatggccatcggtctagggcatctgtttggtttccattttctggaaaattttgaacacccctatgagtcccgtactgtcaccgagttctggcggcggtggcacatcagtctgggcacgtggttccgggagtacgtgtatatcccgctgggcggcaaccgtcacggcaaggcacggcagattttgaaccttgccattgtctggttcctgacgggcctgtggcacggggccagctggaatttcgtgctgtggggtctctactacgcggtgctgctgattctagagaagctgtttctgctgcggtggctggacaaggctcccaaatgggtgggccatgtgtacaccatttttgccttcatcatgggctgggtgctgttcgccatcaccgatttcgcccaactgggacagtatgtgtccgccatgttcaccgccacgtttgtggacggcacggcgctgtatctgctgcgctccaatgtagtgctgctgatcgctgcgaccatcggctgcaccaccggcccgctgcggctgtggaaccgggtggaggacaagctgtccgacaccgccgccgtcacgctgcgcaccgtgggcgtggtgctgttgctgctgctgtccatcgcgtttctggtgggtgacagctataacccgtttttgtatttccgcttctga

SEQ ID NO: 596 - DNA, 1062 bp, Unknown
  Unknown gut bacteria
atgaagatcgtagtgttatccggcggcttctgcaccgagcgccatgtgggactggtcagcggcagcggcgtgtgccgcgccctgcgggaaaagggtcatcaggccatttttgtggatatgttcatggggctggagaattatcagggcaagctggaggatatttttgacgcgcctgacgggctgctggaaaaggtggctatcgaggagacggcccctgatctggaggctgtccgggcggcgcggcaggacaaaagcccctccttgctgggcaaggacgtgctgaaggtctgtgccatggcggatgcggtatttctggccatgcacggcgccaacggcgaggacggccgcattcaggccacgctcgacctgctgggcgtaccctacaccggctccggctatctgggcagcgccatggccatggataaggccgtgaccaagcggatgatggactcgctgggcatccgcaccgccccgtgggtggacgtacattataaaaaagaggatattccccgcctgacccaagagctgatggtaccctgcgcggtgaagatggtcaacggcggcagctccatcggcatggctctgccggacacccgcgaggagctggagaaggctctctatgacctgctgccctatggcggacacgtggtggtggagaaaaagatcaagggccgtaaaattcagatcgccgtgctgggcgacacctatctgcccgccgtggagatcatccccaagggcgaatacttcgactatgtatgcaagtaccagaaggacggcgcgcaggagatctgccccgctcctatctctgacgaggagtggcggcaggtgggcgagatggccctgaagctccatcaggggctgggcctgtccgtctactcccgcagcgacttcctgctggacgacgagggcaaggcgtggtgtctggagatcaacacactgccgggcatgacgcccaccagccttgtaccgcaggaagcggcacaggtggggctcagctacgccgacctgtgcgagaagatcgtgctggattccatcgaggccagaaaggcggaatacagatga

SEQ ID NO: 597 - DNA, 2160 bp, Unknown
  Unknown gut bacteria
atggacgaaaaccgcacccgtctggagcagccccagcaggacgcgcccaaaaagcgcagcctgtggccgctgttctttttccccatggcgctgctgtatcatgagctgctgctgcacgcctttgaccgcaccatcctgttccgggatacgccgctggtgtatatcctgctgttctccgccgcaggcggcttcctgctgtcggcactggtggatattttgccccggagggccgcccacatcgtcacctacgccctgtgcgtgttctggacggtgctgacgtgcatcgaatactgctgcaagagctacttcaaaagctactggggtctcagcttcatcacccagatgaccggcaatgtggtgggcaacttcttctccaccatggtggagatcatcctcggccgcatcgtgtttatcctgctgtccttcgtgccgctggtgctgctgatcatcctccgccgccgcctgctgccgggcaagaccctcagcgtccgctgccgcgttatggcgctggcggtgttcgcggtgtgtcaggctgtcggttccgccctgtgctataccggcgaggatcgggcggactacacctacaactacgtcaccgactacgccgtgccccgcttcggtctggcagccaccattcggctggaggcccagtacgccatcttcggtctgccggacgcgccggtgatccaggtggacgagccggtgccggatgagccggtggtctacgactacaacaagatggagctggacttcaccgccacctccgatctggtgggcggctccacgctggagaacatgcacaactacttcagcagcaagaccgccagccagcagaacgagtacaccggcatgttcaagggcaagaatctcatccagatcactgccgaggccttctccccctacgtcatcagcaaggagctgacgcccaccctgtacaagctgacccacaagggcttcgtgttcaccaactactaccagcccggctggggacagtccaccaccggcggcgagttcgcccacatgaccggcatcatccccacgtgggtcaacggcaatctcagcttctacgccagccatcaggactacatgcccttcgcgctgggcaaccagttccgggcgctgggctataccaccgtggcctatcacaacaactcctacacctactacaaccgccacctgacccaccccaatctgggctatgattactacggtcagggcaacggcctgaccctcaccgtccccggctggccctactccgatctggagatgatggagctgaccgccccggcgtatattgaggattacgtgaacaccggcaagcccttccacgcctactacatgtccgtcagcggacacgccaactggggctggggcaacgccatgtccgccaagaaccgggaagccgccgtggcggcgtatcccaacgcctctcagccggtgcagggctacatcgccgccaatctggagctggaatacgccctgacgtacctgctggagcagctggaggccgccggtattgctgacgacaccgtgatctgcatgaccgccgaccactatccctacgcgctggtcaccgatgaggtggactactatcaggagctcagcggcaagcaggacagtgagctggatatctcccgctacaagaacacgtggctgctgtggagcggcagcatggagagcagcgtcaccgtcaacaccccttgctccgccatcgacattctgcccaccgtcagcaacctgttcgggctggagttcgactcccggctcatgtcgggtcatgacgtgtttgcccagaactacaacgcttcgcaggccagcacctgcatgccgctggtgatcctaccccccacccggggctacagctggatcaccgccgccggaacctatgacgccaagacccgcaccttcacccccaatcccggcatcaccgcggcggacgactacgtgaaaaccgtgtcctcgctgatagacgccaagtactcctatgcccgccagctgatccagtacgactatgcgggcgtggtgctacatcatccgcaggccacccacgtgatggccgcgccgcccaaaccgcctgagcccagcacggacgaaacggcggacgacaccgtgaacgagggttacgcggatgataccggcaccggcgacaccacggaataa

SEQ ID NO: 598 - DNA, 765 bp, Unknown
  Unknown gut bacteria
atgcacaatacattaaaagaaaagctggcgcagggcaagcgcccgctgggcaccttcgtaggcaccggcagcgccgccgtggtggaatgtctgggctgcgcggggctggatttcgtgattctggacaacgagcacagtcccgtagaggccgagaccaccgccgacatggtacgggccgccgagctgcggggcgtcacgccactggcacgggtgcgggagatcagccgtcccgccatcctgaagctgctggatgtgggcgtgcagggtcttatcatccccgacgtccacagcgttgaggacgtgcgccgcatcgtccgcttcgccaaatacgccccggtaggccagcggggcttctgtccctcccgcaaggacggctggggcaccgccccccagggcagcgtgctggacaccatggcccacttcaatgccgaaacgctggtgatccctcagtgcgaaacagcggaagcgctggcggatatcgaagccatcgccgccacggagggggtggacggcatcttcatcggcccctttgacctgtccatctccatgggcatgcccggcgatttcgagaaccccctgttcaaggcggcgctggagcgcatccttgccgcctgtcacgccgcaggaaagccctgcctgatcttcaccggcgacggagccgcctccgccgcccgttttgctcagggctatgacggcgtggccatgagtctggataccatgctgctcatcagcggggtacgcgcccagatcgccgcggcaaaataa

SEQ ID NO: 599 - DNA, 795 bp, Unknown
  Unknown gut bacteria
atgcgtgtattgatccgtggagcgggggatattgccaccgggatcgcgctgcggctctgccgcgcccggcttcaggtggtaatgaccgatctggcgaggccgaccgctatccgccgcaccgtctgcttctcgcaggcgatcgtctacggaacagcagaggtggagggcatccgtgctgtgtatgccaaggactgcgccgaagcggagcggatcatggcgcagggagatatccccgtgctggcagaccctgactgtgcctgccgccgggaattgaaacctgacgcgctggtagacgccatactggcgaagcgcaatctgggtacaactatgacggacgctcccgtggtggtaggcatcggccccggatttacggcaggggaggactgccacgccgtggtggagactatgcggggccatacgctgggccgcgtgatctatcagggcagcgcactgcccaataccaatatccccggcctcatcggcggctatgccggtgagcgggtgctgcgtgctccggatgatggcatattccatacggtgctggacatcggcgcgcaggtgaagtccggcgatgtggcgggagaggtgaacggaaagcccatgcgctgcaccatcgacggcgttctgcggggccttctggcggacggaacgcccgttttcaaggggatgaaatccggcgatgtcgacccccgctgcaaggaagaatactgctacacggcgtctgataaggcgttggccgtgggcggcggtgtgctggaggcggtactgcattttgccggagaaactgacaaatag

SEQ ID NO: 600 - DNA, 906 bp, Unknown
  Unknown gut bacteria
atgaagcctactgtcatcgcattgggatttttcgacggcgtacaccggggtcacggggcgctgctgcgccgcaccgtggaggtggcccggcaattgaacgccacccccgccgcctttacctttgaccgcccccccaaggaggtggtcacgggaaagcccgtgcccctcatcaactccgcccaggaacggcaggagctgatggagcggctgtacggcatccagcaggtgatcatcgcgccctttgaccgtgaaatgatgaccatgccgtggcaggacttcatcacggagctgttggtgaagcggtacggcgcggtgcatctggtggcaggccacgactaccatttcggccacaaaaacgccggtgaccccgtgcttttgcagcagaaatgccgcgagctggggctgggctgcgacattatccccaaggtggagctggagggcatcaccgtcagctctacctacatccgccagctggtggagagcggacaggtggagcgggccgccgaatttctgggccaccgccactgtctcagccagacggtgagccacggcttccggtttggccgcaccatcggcattcccaccatcaatttcacggtgcccgaccacgtgctggtgccggagcggggtgtgtacgtcacccgcgtatacctgcccgacggcggcagctacgccggcgtcaccaacgtgggcacccgccctaccgtcagcgacagcggcagcgtgtccatcgagacgttcctgctggactttgacggcgacctgtacggcaagcgtatccggctggagttctgccgccgtctgcgggaggagaagaagttcgacactccccagcagctgaaggacgaaattgaaaaaaacattgcccagacgcgggaatacttccgggaaaccggcgaggagtaa

SEQ ID NO: 601 - DNA, 2430 bp, Unknown
  Unknown gut bacteria
atggcagaaaaaaagcaggacggcatcgccgaacgtgaagtaaaccgcccgggcatatttgctccggaccctcacgtcgggctcacctcaaagatggcggacgaacgcatgatatgcggtctcgacaaccgtgagatcgagccgccgaccaagaccgtcaagcagataatcctatcgaatacactgacatacttcaaccttgttttcaccgtgcttgcgctcggaatctgcattgcgggctcatggcgcaatctgacgttcatgggagtagtcatcgcaaacacgctgatcggaatttttcaggagctgaaatcgaagaaaactctcgacaagatggctcttctgacgtcgcagaaatgcatcgtgatccgcgacgggaaggaaataaagctcgacacccacaaaaccgtgcgggacgacattgccgttttctcggcaggctcgcagatctacgccgatgcagtcgttgtggaaggcgaatgtatcgcaaacgaggcgcttataacgggcgaagccgatgagatacgcaaaaagccgggagacgagctcatctccggaagctttataatgagcgggcgctgtcttgcgcggctgaccgcagtcggcgaggacagctttgcctcccgcttgacgattgaagcgaagcaaagcaaaaagcgcggcaaaagcgaaatgatgctctctcttacacggcttgtcaagtggatcggaattcttctcattccgatcggcgcgataatgcttatcaaggagatatcgtggcttggtcaggattaccgcgagggcatagtctccacagtcggggcgctcgtcggaatgattcccgaggggctctaccttctcacaagccttgcgcttctcacgagcatagtccgtctcgcgcagaaaaagacccttgtgcatgagatggactgtatagaaactcttgcccgtgtcgacacgctttgcgttgacaagacgggaaccgtcacggaaaacaagatgactgtcgaggacgtcgtgcctctgatgcccgacaggatcgacgcgcgcgccgtcgaagcgataatggcggattacgtttacgcgatgcaggcggacaacgacaccatgatcgcgctgaagaaatacttcacgggacaggcttcccaccacgcacagcgtatctatccgttcacctcatcgaagaaattcggtgccgccgtattctctcccgagctgacatatgtcctcggtgcgcccgatgtgatcctcggatcgctttacggtaagtatgcggaggtgatcgacgcttattccgaaaagggatgccgcgtgctccttctcgcaaaatactcgggcgatgtcgaaagaatgcctctcaccgggcagattgtgccgatctcgcttatcctccttgcaaacaaaatccgcgaaaacgcccccgagaccttccgcttctttgctgagcagggagttgacataaaggtcatctccggagacaacgccctggcggtctcgcaggtcgcgcttcgcgccggaatctcgggcgccgagcggtatatcgacgcgcggacacttgacaccgacgaaaagatactcaacgccgcctgcgaatacacggtattcgggcgcgtcactcccgagcagaagaaaaagctgatccgcgcacttcgcaagaaaggacgcaccgtcgcaatgaccggagacggcgtgaacgatgtgctcgctctcaaggaagcggactgctcgatagcgatggcatccggctcggacattgcggcgcaggcgtcgcacatcgtgcttctcgattcggattttgcgtccatgccgagcgtggtaatggagggcagacgtgtcatcaacaacatagagcgaagcgcttcgctctatctcacgaagaacatcttctctatagttctcgcagtgataacgcttttcttcactcttccctatccgctcgagcccgcgcagctcagtctgatcagcgtacttacgatcggtatcccttcattcgttctggcgctcgagccgaacaaaagcctcgtccgcgggcacttcatgcagaacgtgctttaccgctcccttccggcggcgttcactaatctgttcatggttatcggagtacttctgttctacctcgccttcgacattccgaaggatgaaatgtctacgatctgcgcggtgataatgggaatcgtgggaatgctgatgctcttcacgacctcgatgccgttcaacacgatccgccggatcctgttcatctcgatgggcgcgctcttcattattctcgcgcttataatgcccgatttcttctcgctcgttcccctcaccttccggacagggctgatcctcgctgtatttgcactgatgtcaataccgtcatacataggcatataccgcctgatttcgatgacggggaacgctttcaaagcgcttaaaagaaaattcaacgccgcgcgccgtgcataa

SEQ ID NO: 602 - DNA, 1704 bp, Unknown
  Unknown gut bacteria
gatcagcgcctttcgcgcgccgtgcagatcctgtgctcggagatcggcgggaagacgggcgagcttgtgccgtttcgcgtcggcgcggagaagggacactgcatcgtcgtttgcgcgggggacgatcccgaatgcgagagctgcactctcgaggtcacggaggacaggataaccgtggagagcggcggcgcggcgggcgcgtattggggctttcagtcgctccgtcagctggtctgcgacggggatgttcccgtatgccgcatcttcgacaagcccgattttcctttccgcggattctatcaggatataacgagagggcgggtgaaccgcctgtcgaagcttttcgcgattgtcgatatgctttcgtactacaagataaacatgctccagctttacgttgaggatgcgttcatgttcaaggagcttgagggcatcgtcaccgaggatgaggcgctcacccccgccgagatgctcgcgctcgacgattactgctatgagcactttatcgatcttgtgccgagcctctccacgttcggtcatatgtacacgctccttcagagcgacaaatacaagcacctgtgcgagcttgaaaacttcgagccgaagcgcgtttattggatggagaagcagtggcatcacacgatagacccgtacaatccggaatccgccgaggtcgtgataagcatgatcgagcagtacattccgctgttcagatcgaagtatttcaacatctgctgcgacgagacgctcgacctctgcaagggaaggaatgcgggacgcgatacgggagaagcgttcgttcaccatgcgacgaagcttatctccgcgctccgcgcgcacggcaagaccgcaatgctctggggagacgtctgcatggctcacgcggagcttgtgaaggagaacatctctccctcggacgtgatcgtgctcaactggtgctatcacaaggtcgtgcccgattggctcggctgggtgttcaacgacatgggatatcggagcatcttctgccccggcacgtcctcgtggagccgcttcatcgagaatgcggacgaggggatcggcaacatcgcaagctttgccgcacacgcgaagaagaacggcgttctcggaatcctcaacacgaattggggagatttcggacacatatgcccgttcaactcgaatctgtacggtgcgctgtacggagcgcagaagagctggaacacggatgccgaaacgggcggcgatttcacgcgccttgtatcggagaggctttacggggtcgtcgaattcgacatgacggagacgattcttgtgctctgccgcgccgagagcatctcgacgtgggcgcatcttgtgacgtggtacaacaagaatttccgcatgggcgagaccgaggagttcacctacgaaaacgaaaagaccgacgctgacgcggtaaacgcgatcgaagtctgccgcggggagatacgccgcctcgaggcgctcggacggaagggggacacggttatcggcgatcttatcctttccgccgaggggatcgaaatactgaaccggatatcgctttatctgcgcggcgcggagggatactgcgacagggaagagcttcgcgggatcatttcttcatggtcggagaggtattcgcgcgcgtggctcagggacgacaagccgtcgcagctttggagactgcgggagttcttcgccgcgatccccgatctgaaataa

SEQ ID NO: 603 - DNA, 2298 bp, Unknown
  Unknown gut bacteria
atggtcgcacttgacagctatccgacagccctcaccgatatactcggggagaacggcgcggatttcggcgatgccgagcttcttgcaaaatgcgatatgaacaaggacggcgcacactgcgactgcttccttatcgccactgcgaaggagctttttgccgtgtcggggatcaccgtgctcacccggcgcgagacgcgccttcttacctcgccgacggcgaggaggatcgatgcggagtttaccgtgctttcgtttgagcggtatgatctttgcgatctcgatgactttacggtcgaggagcttatctcgtcgggaaggcttaccgcgttctcaaagaaggcggaggggcaggtgctgattgccgtctttactaacacttcaaagtttcaggcggagatgttcgcaaagtatatcgtcaaggtgaaaaagggcgagcgggtcgagcttgacgaggaggattcggcggagcgtctcttctgcccgaagtgcggtgcgcgctatcccgatcccgaattgaagatctgcccgcactgtacggacaagggaaagctgatgcgccgcctgtccgtgttccttttcaaatacaagtcgaagatcgcactttcgttcgcctgtcttttcgtgataagcgtgctcggcgttatctcgccgtatatcagctccgcattcttctacgacgaggtgctcgaggcagacggatcgttctacggtcagctcggacttgtcatagccctcgtggtgagcgtgcgcgcgttttcggcgctgtttgatgtggtgaacagtatgctgacgtcgaagatcgccgcaatgatgacctacgacctcagacagacgatattcggagcgatacagcgcctgtccctcggatttttcacgggacgtcagaccggcggacttatgagtcaggtaaacggcgacgcgcagacgatctacacgttcttctgcgacggagttccgtacttcctcatgaacgtggtgcagatcgcggtccttgcggtcattatgttcatcttcaatccgctgctcgctttcatatctcttgtaacgcttccgtttttcgtcgtgacggtcagattcgttttcaaacgtctcggcaatcttcatgcaaaacgttattcaagctcgcgctcgatgaactcggcgctcggcgatatcctcggcggaatgcgcgtggtcaaggcgttctcgagggagaaaaacgaaataaagcgcttcggcagaacggcgcgacgcctcgccgagaacgaaaagaagctcgccgatttcgagaatacggcgtttccgttcgcggatttcatcctctatctcggcaacgtgcttgtgctcggcttcggcggatggatggtcatacgcggaaagatgacatacggtatgctcgtcagcttcaccgcttatatgaacatgatctacggtccgatgtacttcttcatcgacataacgtattggttcagcgactgcgtgaacgcctgcgtccgcctgttcgaggtcgcggatgccgtgccggacgtcgttgaatccgatcacccggtcgtgcccgacgagatacgcggcagagtcacgttcagggacgttgagttttcctacgtcaagaacagaaaggtcatcgacgggatcagcttcgacatcgaggcgggcaacgtgatcggcatcgtcggtcacaccggctcgggaaaatcgacgcttgcgaacctgctgatccgcctgtacgacgtcagcgccggggagatactgatcgacggcgtgaacataaaggatcttccgttttcggtgctccgcgagaacatatcgatagtgtcgcaggagacgttcctctttatgggaacgatactcgataacatacggtacgcgcgccccgaagcgtcggtcgaagaggtgatcgccgcatcgaagatcgcgggagcacacgatttcataatgaagcttccggatgcgtattcgacgaggatcggcttcggctacaaggatctttcgggaggcgagcgccagagggtctcgatcgcccgcgcgatactgcgcgatccgaagatactgatactcgatgaggcgaccgccgccatggatacggagacggagcgccgcatacagaccgcactcgaaaagctcatcaagggacgcacggcgataatgatcgcgcacaggctttcgactctgcgcagcgcggataagctgatcgtcatcgagaacggaaagatgccggagagcggcacgcccgccgagctgatcgcaaagaagggcatttactacaacctttacaggatgcaggctcaggcgctcaggaatatcggcatcgaggcatag

SEQ ID NO: 604 - DNA, 1362 bp, Unknown
  Unknown gut bacteria
atgaaagaacttccgaagacgtatgacccgtcctcgtttgaggacaggctctacaaaacatggtcggaacgcggatatttcaaaccgtccgacgacagaaacgcaccgacgtattctatcgttataccgccgccgaatattaccggacagctccatatgggacacgcgctcgacaacactcttcaggatgtgcttgtccgctataagaggatgaagggattttcgaccctttgggttcccggaacggatcatgcgtccatcgcaaccgaggcgaagattgtcgaggcgatgcgcagagaaggcatcaccaaggacgatatcggacgcgacggattccttgagcgcgcgtgggcgtggaagcgcacgtacggcggacgcatagtggagcagctcaagaagctcggttcctcctgcgattggtcgagagagcgctttacgatggacgaaggatgctccgaagcggtgcgcgaggttttcgtccgcctttacgaaaagggactcatttaccgcggaaagagaataataaattggtgcccgaaatgcctgacgtcgatctccgatgccgaggtcgaatatgaggagcagcccggacatttttggcatatccgctatccgttcgaggacggaagcggatatgtcgagatcgcaacgacacgccccgaaacccttctcggcgatacggcggttgcggttcacccggacgacgagcgttataagaacatcgtcggaaaaatgctcatcctcccgcttgtcggcagaagaatccccgttgtcgccgacgagtatgtcgagcgcgatttcggaacgggctgcgtgaagatcactcccgctcacgaccccaacgacttcgaggtcggcaagcgtcacgggctcgaggttctcgatatgctcaccgacgacgcgaagatcaccgacgactatccggcttacgcgggaatggacagatatgaggcgagaaagaagatcgtcgccgatctcgaggagcagggctgccttatctccgtcgaggatcatgttcacaatgtcggcacctgctaccgctgcggaaccactgtcgagccgaaggcttcgcttcagtggttcgtcaaaatggagccgcttgcgcgtcccgcgatcgacgcagtgcgcgacggcaggataaagttcgtccccgagagattcgagaaaaactatttccactggatggagaatatccgcgattggtgcatctcgcgtcagctttggtggggacaccgcatccccgcgtactactgcgcggactgcggagaaacggtggtcgcaaaggaagctcccgagcgctgcccgaagtgcggcggcaaaggcaccatcatcagcgacccgtgccagacctgcaagggcaag

SEQ ID NO: 605 - DNA, 2361 bp, Unknown
  Unknown gut bacteria
ccgaccggcgcgctcgattccgaaacgagtgttcagataatggatctgctccgtgagatcgcgtccgacaggctcgtcatcatggtaacgcacaatcccgagcttgccgcgcgttattcgacgcggacggtgcgccttctcgacggtgagattgtggacgatacaaatccgtacagcgcttcccttcccgaagagacggcggcaaaaaagaagaaaagctcaaagggcaagtacaaaaagacctcgatgtccgcgctgaccgcgctttcgctttcgacaaacaatcttttgacaaagaaggcgcggacgctgatgatctcgtttgcgggaagcatcggcataatcggcattgcgcttatactctcgctttcaaacggaatccaggtattcatagacaacgttcagaaggataccctttcgtcatatccgatacagatcgcgtcggaaagcgttgacatgacctcgctcatagaaacgctgagcggcaaggacagcgaggacgatgcgcccgagcgtgaagacggaagagtttatcaaaacacgatcatgtacgacatgatgaactcgatgatgtcgtcgtccgcaaagaaaaacaacctgaagccgttcaaggaatacatcgaatcggaggaatgcggtatcggggattacgtttccgcgatatcctacggatacgatcttcccctgcccgtgtacagaactgacgatgaaagcatcactcaggtgaatccgagcacggtattcgacgcgatatacggaggctcgacggtctcgtcatattatcagtcgatgatgtcgagcacatcctcatacgacgtctggcaggagatgctgccgaatgaggacggcggaataaacacgcttatcaccgaccaatacgatgtcgtgtacggaagctggccctccgcctacaacgaaataatgctgttcatcgacaagcacaatgagctgaacgacatggttctctattcgctcggtctccgtgatacggcggagctcgacgagatcatgaaatccgtcatgaacggcgaagagatcactctcgaggacacaagctggacatacgaagagctttgctcgatgaagctgacgctgatactgcccacggacaaatatcaaaagaatccggacggaacgtggaaggacatgagcgaaaacgaagcttacctctcatatgccgtcgaaaaaggaatccctctgaagatcaccggtatcgcacgtccgaacgattcggcgaccgctaccgctatgagcggttccgtcggatacacgcgggcacttacggagtatgtcatgaacggcgtaaattcatcggatatcgccgttcagcaaagctcagacgaaaagatcagtgcggacaacaatccgtattcttcggaaagcgttatcggaaaggctttctcggaggtcgatgttttcaccggacttcccttcaaggacggaacggaaaacgaaaaccagaccgaaagtgaaaaagcatccgaacttcggaattatcttgcatctctttcggaaagcgatcgcgcggctgcctatgtaaaaatagcgtcggtgccgtccgaggttcaggtaaacgaaatgatcgcgcagtacatggcgtcattccccgaccgcaccgcaatcgaagaggctgtgatcggatactacagcgaggaggcgggcatatcctcggatgaaatttcatcgtacctcaaggggctgtccgacgaagagcttgacgaaatgataaagaagactctcggcgaagaaatcaaaaaatcctatgccgagcagacctccgcctcactcacccaaatgacggaaggcgaactttccgccgcgcttgatgtgtatcttgacggatgcggcgacgatacactcgcttcgatttacgcggacatcatgccggataagtattcgaaatcatcttacgcggaaaatgcatcgaagctcggaatcgtacgcgaagattccccttcatcgatcaacatctatgcgataagctttgaagcaaaggaagcgatctccgacataatcgataaatacaacgcctccgttaaaaacgaaagcgacaaaatcacatacaccgattacgttgcgcttatgatgtcgtcggtaacgaccataataaatgcgatatcgtatgtgctgatcgcgtttgtcgcaatatcgctcgtcgtatcctcgataatgatcggaataatcacatacatctcggtgctcgagcgcacgaaagaaatcggtatccttcgctcgatcggtgcgtcgaagcgcgatatttcccgcgtgttcaacgccgaagccgtaattctcggattcaccgccggagttatcggaatccttgtgaccgtgctcctgacgataccgataaacgcgataatc

SEQ ID NO: 606 - DNA, 1728 bp, Unknown
  Unknown gut bacteria
gagacgctgatcgacgactacatcgttccgatgacagctcagagctcacccgactttgcgccgcttctccgcgctgtgctaataatgggcggaatataccttatcggtataatttcgaccgcggttcattctcagataatggtcgttgtgtcgcagggcgttctccgcgatatcagagacgaaatgttcgaaaaaatgcagcatctgccgatcaaatatttcgacaccaacgcgcacggcgatataatgagccgatatacgaacgataccgatacgctcagacagatgatctcgcagagccttatccagacgttctcgtctcttatcactcttgtgacggtgttctgcgcaatgatctcgctcagtccgatcctcactcttatcgcaatagtcaccgtagcacttataatcttctcgacgaagaacattgcggcttcgagcggaaagtacttcatgaagcagcagacctcgctcggcgcggtcaacggatatattgaggaaatgatcgcgggacagaaggtcgttaaggtcttttgccacgagaaacacgccaaagaggatttcgataagctcaacggcgacctttacgaaaatgctttcgccgcgaataaatacgcgaatatcctcatgccgattatgggaaatatgtcccaccttcagtatgtaatacttgcgatctcgggcggcgcgcttgcgatctcgggtatcggcggactgacactcggcgcgatagtttcgttccttcagctttcgagaagcttcacgcagccgatcacacagctttcgcagcaggtaagctcgatcgcaatggcgcttgcgggcgcgggacgcatattcgatcttatggataccgagcctgagaaggatggcggatatgtaactctcgtgaatgcgaaaacggacggcgacggcaatataaccgagactccggagcgcacgggcgtgtgggcgtggaagcatccccacggcgacggcagcatcacatatacaaaggtcgagggtgccgtcacaatggacaatgtcgattttgcctacgaggaagggaaggacgttcttcacaatatcacgctgtacgcgaatcccggcgagaaggtcgcttttgtcggcgcgacgggcgcgggcaaaaccacgataacgaaccttataaacagattctacgatattgccgacggaaagatacgctacgacggtatcaatataaacaaaataaagaaggacgatcttcgccgatcgctcggcatcgtccttcaggatacgaatctgtttaccggaacggtgatggagaatatacgctacggaaagcttgacgcgacggatgaagaggtgtacgcggcggcgcgtcttgccaacgcggacgacttcataagaagactgcccgagggatacaatacgatgctcacgggcaacggcgcaaatctctcgcaggggcagcgtcagcttatctcgatagcccgcgccgcggtggctgatccgcccgttatgatactcgatgaagcgacctcgtcgatagatacacgcactgaggcgcttgttcagcacggcatggataagctgatgcacggcagaacggttttcgttatcgcgcacaggctctcgacggtccgcaattccgacgtgatcatggtgcttgagcacggacggataatcgagcgcggaaaccacgaaaagcttatcggagagcacggaaagtactatcagctttatacaggcgggctggaactcgaataa

SEQ ID NO: 607 - DNA, 1515 bp, Unknown
  Unknown gut bacteria
atgcgggcgaactccaacgaaaggaattttcaaatgaagctgtccgatataataaaaaatgtgccgcatacgctctgcggcgacggcgaatgcgaaatatcggggatcgagcttaactcatccatgtgcggcgacggttctctgttcgtctgcctccgcggcgcacgcaccgacggtcacaagtacgccgccgatgcatattcgcgcggctgccgtgcatttctctgtgatcacaggcttgacctcggcgatggcgtgtgcgaggtcgtgtgcgccgatacgcgcgccgcgcttgcgtcggtttcggcggagttttacgggaatcccgcgaaaaagctgcggataatcggcatcaccggaacgaagggcaagacgaccacctcccttatgacggcggcgatactcaacggcgcgggaattccgtgtgcatatatcggctcaaacggcgtgatgataaaggaccgccatatagatacggtgaacacgacgccggagagcctcgagcttcaccattattttcgcctcatggcggatgcgggggtcgataccgtcgcaatggaggtgtcctcgcaggcgcttgcgcaccacagggtagacggcatcgactttgaagtcaccgcttttctgaatctgtccgaggatcacatcggagagggtgagcacccggatttcgaggattataaaaattcgaaaaagagactgttttccgagcataagacgcaccttgcggtttacaatgcagacgatccctgttcggaggagatgatctcgacgtgcagcgcgccgaagatcgccttctccgtcggcggcgatgctgatctttcggcatccgatatacgcccgttccgcgacgagttcgctctcggagtggattttaccctttcggcttgggggcgtgccgagagcatcagactgagatcgcccggagagttcagcgtgtcgaacgcgatggcggcgattgcgacagcttcgcatttcggcgtttctgtcgcttctgcggcggagaccctcgccgtaacatccgtgctcggaagaggtgagatcgtagaaggactgcccgacaggacatttgttatagactatgcacacaacggcgtaagtctgacaaataccctccgcgtactccgtgaatacaatccgtcgaggctgatctgcgtattcggatcggtcggcggcagaacgcagatacggcgcgcggagcttgcgcacgccgcgtcgaatctcgccgatctttcggtgataacgagcgataatcccgattacgaatcccccgacgcgatcatacgcgagataatctcgcattacgatggtcccgcgccgtatatagtgataccggaccgcgaagcggctgtccgcgaggcggtgcagctttccgctccgggcgatatcgtgctgtttgcgggaaaaggtcacgaaacttatcagcttgtctgcggcaggcacatcccgttttccgaaagggagatcattgccgacgaatgcagcgtcgtgcttacggaggaattctccgtttga

SEQ ID NO: 608 - DNA, 1104 bp, Unknown
  Unknown gut bacteria
atgggctggaactcatggaacaccttcggtacgaacatttccgaggacctcatcaaggaaaccgcagatgcaatggtggacacgggtcttgctgccgcaggctataactacgttgttatcgacgactgctggtctctccgtgagcgcggagcggacggacgcatcgttcccgatcccgagaagtttccgagcggaatgaaggctcttgctgattacgttcactccaagggactcaagttcggtatgtactcctgcgacggtcctctcacctgcgcaggctatccgggaagctacaacaatgagttcatcgacgctcagaccttcgctgattggggcgttgacttcctcaagtacgacaactgctacaagcccgagcacgacggatacttcctctacaacagaatgtccatggctctcaagtccaccggacgcgacattctcttctccgcatgcaactggggcgcagagaacgttcacagatggatccgctccaccggcgcgcacatcttccgttccaccggcgatatcaacgacagcttcggcagcgtaaagaatctcgttctcagccagaccgataactggcccttcagcggtccgcagtgcttcaacgatatcgatatgctcatcaccggtatgtacggtaagggaaatgttgcggtttccggatgcacagacgaagagtatcttacacacttcgctctctggtgctacttcgcatctcctcttatgatcggctgcgatatccgcaacatgagcgacgctactctcaagaccctcaccaacaaggagcttatcagaatcaaccaggataccgaggcgagaactcccgcccttatcggcaatcccggcgatgatacttactgcttcctgaagcatcttgacaacggcacctactccttcgcattcatcaacttcagcgagtcctaccgcgcagtatgctgcgacttcttcaagttcggcatcactctcgacaccggatacgcattcgatttcgaggatgttatcgacggtcagaagggggagaacatcacccgcgagttcaaccccggcgttcctgctcacggctgccgtattatccgcggtacgcttcatccgaaggcgtaa

SEQ ID NO: 609 - DNA, 1302 bp, Unknown
  Unknown gut bacteria
atgcagaattattggcagaaggaaatcgaaactgcctcgcgcgatcagatcaccgcgtggcagaatgagcggctttgcaatacggtagagcacgtttacaaaaatgttgagctttaccgccgccgcatggatgaggcgggagtaaagccgggcgacataaagacgatcgaggacattacgaagctcccgtttacctgcaagcaggatctgcgcgacacatatccttacggaatgttcgcggtacccatgtccgaagtcgtgcgccttcacgcttcctccggcacgacgggcaagcagatcgtcgtcggatatacaaaggaagacctcgaaatatgggaggacatatgcgcgcgccagctcgtcgcggcgggggcgacaaaggaagataagatacatatatcctatggctacggactcttcaccggcggtctcggactccacggcggagcgcagcgcctcggcgcgaccgcgatccccgtatcctctggaaacaccgcgcgtcagataacgatccttcaggatttcggttccgattttctttgctgcactccgtcgtatgcgatgtatatcgcggagacgatggagaatgaggggatcgacacctcgcgcttaccgcttcgcggcggaatattcggcgccgagccgtggacggaggagatgcggcgcgagatagagcgcaagctcaacataaaggcatacgatatctacggacttaccgagaccatgggtccgggtgtcgcatatgaatgctcagagcagcacggtatgcacgtcaacgaggatcacttcatcatcgagataatcaatcccgagacgggcgagcatatgcccgacggcgagcagggcgagatcgtgttctcgtgcataacgaaaaaggcgtttccgcttctccgttaccgcacgcgcgatatcggcgttatcactcatgaaaaatgctcgtgcggacgcacattcgtccgtatgtcaaaaccgatgggacgcaccgacgatatgctcataatccgcggtgtaaatgttttcccgtcgcagattgagaccgttcttctcaatatgggatattcgccgaactatcagattgttgttgaccgcgttaacaatctcgacacgatcgaggttcttgtggaaatgacggaggaagcgttctccgacgtgcttactgagctttcgacaaaggagagagcgctttccgaaaatatcaaatcccttctcggtgtagccgcgaaggtgcgccttgtatcgccgaagtcgatcaagcgaagcgaaggcaaggcagtgcgcgttatagacaatcgcaaaaaataa

SEQ ID NO: 610 - DNA, 1383 bp, Unknown
  Unknown gut bacteria
atgatcgtcataggcagccgcggaagttcaaatacggtgaagctttacgagatatgcagctcggtctgcgatcggacatacctcattgaggatgcttcgggactttcggatatcgtgataccgtacaataaaacagtgtccataactgccggcgcatcgacgccgtacagtgtaataagggaggtagaaagaaacatgagcgagaccactgaaaattttgcacagatgcttgaggaatccctcaaaactttaaatacaggagacgtagtttgcggaacagtatcggctatttcgcccaatgagatccacctcgatctcggagccaagaccacgggcgttatttcacgcgatcagataaccgacgatcagtcggcaaagcttgaagatatgttcaagctcggcgacgaagttgaagcattcgtaatcaaagtaagcgacgttgacggtattgcgaccctttcgaaaaagcgcgttgattccgataagaattggaaaaacatagtcgcggcttacgaaagcggcgagattcttgagggcaagattgtcgaggctgtaaagggaggagttatcatttctctcgattccaaccgcgtattcatccccgcatcgcagaccggaatcccgcgcgacggagacctttccgcacttgtcggaacgacccagcgcgtgaagatcatcgaggtcaagaatgagcgccgccgcgcttacgcttccatccgtgcggttgcacgcgaggagcgcaaggcaaaggagaaggcattctgggataccgttgaagagggtgcgatctatgaaggacccgttaagagcctgacctcttacggcgcattcgttgacctcggcggcgttgacggaatggtacatctcaccgagctttcctggagaagaatccatcatccctccgaggtcgtcaaggtcggcgatgttatcaaggtgttcgtaaagtcgatcgaccgcgagaagggcagaatctctctcggatacaagaccgaggataccgatccgtggttcattttcaacaacaagtataagatcggcgataccgcgaacgtcaaggtcgtaagccttatgcccttcggcgcttttgcggagatcgttcccggcgttgacggacttattcacataagccagatcgcagatcacaagatcgagaagccggacgatgttctcaaggtcggcgataccgttgatgtcaagatcaccgatatcaatcaggagaccaagaaggtaagcctttcgatccgcgctcttctcgagcagggtgcaaaagaggctgaggaagcatccgacgacgcacaggcagaggaagcttccgagccgaaggtattctccaccgacaatccggaagcatatgcggatttcggcgagaataacgcagagtaa

SEQ ID NO: 611 - DNA, 843 bp, Unknown
  Unknown gut bacteria
atgataacagacagagaacaaatcaaaagaacgctttccgaaaaggagcttttcgtattcgacatggacggaaccatctacctcggtgaaaacgtattccgccccgcggtcgatttcataaaaaaactgcgtgaaaacgggaaaaaggtgctcttctttacgaacaatgcatcgagaacacccgaattctatataatccgcctttcgcgtatgggctttgagccttcgcgcggtgagatcatgacgtccggagacgttaccgccgaatacctttcgcacgagtgctccgacaaaaaggtttacgtcatgggaacgccggagcttgtccgatccttccgcaagcacgggataaacgtgatttgcggagatgacggcgagatcgttccgggcactcatgccgatatcgtcgttacaagctttgatacgacactgacgtacaataagctgaaatattcgtgcgaattcgtttcgctcggcgcgcggtacatatcgacccatcccgatctgaactgcccgaccgaggacggcaggatccccgacagcggctcaattgccgcggctgtcaccgcatcgaccggagttgtccccgagtatttcggaaagccggagaaatcgtgcgtcgatacgatcgccgcaaggctcggcgtggacaaaagcaggatagtcatgatcggcgaccgcctttacacggatatcgcggcgggcagaaattccggcgtgacctcgctccttgtcctcaccggagaaaccgatgcgtcgatgcttgaatccgcccccgaagggcagattcccgatatcgcactgcgcgacctttgcgaggcttcggagataatgttcggctga

SEQ ID NO: 612 - DNA, 1812 bp, Unknown
  Unknown gut bacteria
ccgataaagatcaaatcctctcgcgtgaaatgtgcgataggctgggtctggtgggcgatatgccccgccgccgcgatgcttctttccgaatggatgatacggaatccgttcaacggaaagatgacgtggaaggtaatacttctgaatatggtgatttactatattgcggcggcattcttcctcttccttacaaggcgcgctttttggtctacggttttggcgacggtgtttcccgcgctcatcggaatcgcaaactactatgtcgtttcgttccgcggaacggtgctgttcccgtgggatctcggctcgatcggcacggcgatctccgtcgcggataactataagtttgaatttccttacgaaatggcgatccttatttccgcgtttattcttatgtatcagatcgcctgcaagtgcggggtgaagatctttgcaaagaagatatggctccgcgttctgctcaccgtgatgtcgctttcgatgggcgtgggatatgcgttctatgcgcagtcggacgatatcgtttcgcgtttcagactgtatccgtatatgttcaccccgaattccgtttattcgagggacggcatgatggtcagcctgctgttttcgctcaagtatctcgccgtggataagcccgagggatacgacgccgatctcgtgaacggagttgccgaaaaatacgccgacgacggcggagacggcacatcggcagaggagaaaaccaagccgaacataattgtcatcatgaatgaagcgtactccgacctctcggtgctgagagatttcgagactaacgtaaatccgatgccgtttacctcaaagcttacggaaaacacggtaaaaggcgatctctatgtttcggtcgtaggcggaaacaccgcaaattcggaattcgaatttctcaccggatcgtcgatggcgttccttcccacgggctccattccgtatcagcagttcataaagggcgagatgccgagcttcgtttcgcatctcaacgacctcggatattcctcttccgcgatgcatccctactatgcgagcggttgggacagaaacaaggtgtactcatatttcggatttgacaagatgtttttcaaaaacgattttaacaatccggagacgatcagacagtatatcagcgatgccgccacatacgataagataatcgagctttacgagaataagggtgacagtccgatgttcgttttcgatgtgacgatgcagaatcacagcggatacaagggcgaagtgcagaacaactttgcaccgcttgtcacggtaaccgacggcaaagtctcgacggggctttcggaatacctttcgctcgtgagaatttcagatcttgcgttcggcgatcttgtggagtatttcaaagaggcggatgagcctaccgtgatcctgatgttcggagatcatcagccgggcgacgccgtggtgcgctcgctttatacatcggtcggacagacgtacccgccggaatctttcgaggatcagtacaagcgttatatcgttccgttcttcctttgggcgaatttcgatatcgaggaaaaagacgacgtgacgataagcgcaaactatctttcgactctcctgtgcgaggtcgcggggatagagcttacccctcagatgaaatacctttccgagctttacgaaaagtatccggtgcttaacgcgaacgggtacatcgactcggacggcaatctcttctctgcggataagataaacgaaaacaatgatctcaccgagtattcatgcattcagtataaccttctgttcgacaggaaagaacgtgtcgaagcacttttcaaataa

SEQ ID NO: 613 - DNA, 1944 bp, Unknown
  Unknown gut bacteria
aaccccgccgacggtctcgacgcggctgtacgcaagtacgcaaacgccgtcgatctcggcaagtccacccttttcgatatcacctatcacgagggctaccgcgtcgaaaagctcactcttgcgggcaacgacatttccgagtacacggtagtcgcgccggaaaacgatccctcccgccgcagctacatgaattgggcgatgaacgcagcgtgcaacgagatggtctccctcatcgccaaagcgtgcggcactaaccttcccgcagtacgcggaacctccgatgccgcaaagcagatcatcctcaagttcagcgatgacgaaagcctcggcaatcacggatacaagtattacttcgaaggtgacaatctcgtcattgaaggcggacccgaggacggctgtctgaacggcgtttaccgcttcctcgagcatgagctcaactgggaatgcctcagcttcggcgacagcctccttgcggaagcggattacatcgacgttcccgccgatgccgcacgcaccgagcagcccgttttcgattgggcatggctctacttcatggcttacgagcagttcaagaccgaccgcaccaccactgcaaatccctacggcaaaatagatcaggcaatgcacggggatcagctcctcggcacgacccactgggcaggtcagatctgctacacggacgaagaccgtttctacgcagtctacgacagagttatcgactacattgtaaacaatatcagagccggaaaagtcatcggtgaggacttcttcgccgtcagcctcgctcaggtagatgaggcgaaatactgcaggtgcaagcagtgcttgaccgtcgtcaaggaagaaggcggcgtgaactccggtcccgttatacgctggatgaaccgcatggtcgaagaggtcaacgcaacggacgacgcttatcgcgcgctcatatacaagtgctatgcttaccacggaagtcagccgccctgcaagaccgctcccgttgatcaggtatgggtcacattctgcaccgacggtgcatgctcgaaccacattctccgcggcggcgattgcaacgaccgcttcggcctctacggactctccgaggaacccatttacaacaacgactccttcggttcatggctcaagcagtggaccgatatgtcggacaacatctatgtctggctctacgctctcgactgcagcccccgtcagtacaccatattcgaaacgatctacgacgatattcagttcctttccgaatgcggagtgcgcggattcttctggcagcatcagtcaaacggtctcggattcaatcggatcaacttccagcttgcataccagctcatctggaatacagacatgacaagggacgagttcaacgccctcaaggagcatctcttagagaaggaatacggcgaaggctacacctacattctcgagtatttcgacattcttcagcagtcgcaggataaggcgggatgctggaactgctggggctacggctcacccaagggctccgatgagcgcgatcaggcatactatgcggagaactttgatctttcggtcgagcttctcgagcgtgcgctcgtcctcgccggcgacaagaagcaggtcgatctctgctcgcgtctgaccgttcacatgctctacagcggatgctatgcggcttactttgaggcttacgacaacaacgacaccgcgcgcctcgaagaactcaacgcaagatacagccgcgcgatcgaccgcataatcaccgcatacaatgcagtcggctggggctggctcgtatcggcagacatcatcaagatctactcgacggactatgctcaggttacgatctacagatcgcttgaggatatggcttggaagtcctgggcagaggatcgcgactatcttccgcagggagagacgcagcgtcccatgcccgacaagtatgccgaggatgcgaaagtctga

SEQ ID NO: 614 - DNA, 1764 bp, Unknown
  Unknown gut bacteria
atggcagtaagcaagatgaaaaagttttccgctgcggtgcgaacgtgcgatgcggaaaaactgctttatgaattgcagcggctcggatgtgcgaggctcgaatatctgaatgaggcgagggaaaccccggcagatgatgatctgcccgagtacgcgctcccggaggagatcgcgtccgcagcggcgcttcccggatttgataattccgaggagcttgcatctctttcgtcggagatcgcgtccgcccgcacggcgcttgaattcctcacggatgcatacaccggaaagcatccgatgttcctccggcccgaggaggtcgacgcagatgagttcgagcgcgataccctcggggatgcgagaaagtgtgcgtccgaggcgctcgaaataaaggacgctatcgccggggcggagaagaagattcagcttctcggcgacgagatcgcctcgtgcgaaccgtttgcgcactcggagtttgagcttccggaaagcatgactgcgaggacagcgaccgtttgcggcactcttccgccctcgatcggcgatgaagagataacgtccgctctcggcgattacgcatgcacggtcgatgtcatatcaacgggaaagaacgggtctgctgttgcaatgaccgcgcaccgcgacgatttcgacagctgcatgtcggcgctgtcgtcgctcggatttacgcagactcaggcgcagccaagctccgatgaaggctatgccgacggagttatcgcgtcgtgcatagcggagacggacttcgaaaatcaaaaactcacggagcttcgtgaacgtgcgaaggctcttgcggacggcaagctcaccgagatgagggtatacctcgattacctgaccacagctgaggcgcggcttcgtgaaaaggacaagatgagacagaccgagcgctgctcggttataggcggatgggtgagcgagcgttctgcgggaaagctcgaaaagctgttcggcgatgtcggcgccgcatattcgtttgacgaaccggagccggaaaaggaaagcgttccgatcattctttcaaacggggcgttcggatcgcagtttgagcctatcgtcggactttattcctatccctcatacggcgcgtttgacccgaccacggtgatgggtgtgttctatatcctgatattcggtctcatgtttgccgatgtcggatacggactgacgcttacggtcggatgcctccttggactgaagctcatgcgccccaaggaatcgcttgcgcgctttctccggatgttcgcaatgtgcggagttgcttcaatggtcggcggtgcgctcttcggcggatacttcggtgatatgccgacgcggatcatggaggactttctcgggatcgagaaagcacccgacatggcgctctgcttcaacatgatcgacaatccgatcctgttcctcgtgatatcgcttgcgatgggcgcgcttcatcttctcaccggaatggcgatcaaattcggcataacggtgcgcgacggacacccggtcgccgcggtgttcgatgtcggaagctggttcattctgttcgcgggaatcggtctttacttcgttttcccgacggcgggaatgatatgcgctcttatcggtgcgctgatgctgatcttttcgcagggacgcgccgaaaagaacccgataatgaaactgcttaaaggtattctctcactgtacgatatagtgagctacggctccgatcttctttcgtactcgagaatccttgcactcagccttgcgtcggcggtcatcgca

SEQ ID NO: 615 - DNA, 1956 bp, Unknown
  Unknown gut bacteria
accggatacaacatctccggagaaatgtacggacccgactactcgtatcacgagataacaggtcagcacgccgagataatgagatatcccgtattcggcgttgtcagcggaacatgggacggacgcaccgaaggctacacagcgataatcaccgagggcgacacaatggctaaactcatgtcgactcacggaggcggacagcgtcacaattacaactccgtttacgcaacattcaatcccagaccgtacgatacctacagcctctccggctcaaccgtaaccgataagaccgcaacatggaccgttacctcatccagacgttataccgacagctacagaatcaagtatatcatgctgacggatgacgcaacggcacaggctgcaaaccttacgaattactacgagcccagctacgtcggaatggcaaaggcttaccgcaactacctcgagaagagcggacagctcgcaagactcaatgcaagcgatattgacagcaatattccgctctatatcgaatccttcggcgctacgcagaccgacggacgcttcctttccatccccgttcaggttgatacggcgctcactacattcgaagatgtcaagacgatgtacgatgagctgactgccatgggagtcaaaaacatcaacttcaagcttaccggctttgcaaacggcggaatccatcccaccgttccgtataagctgaaatgggagcgcgtgctcggcggcaacagcggattctccgatctcgccgcatattcgagagagaagggcttcggtctctatcccgagttcgatttcgcgtatatgcacgataacacaacatttgacggtgtgaacgtgaaaaagcatgccgtaaagacaatcgataacagatacacagcaaagcgttactacgacgcggcaacccagacatggcagagcgatttcgcacttgcgatttctccttcggtttacgactatttctactccaagttcaacgaatcctatgtggattacaatgcaaacggaatttcggtttcgactctcggatccgatctgaactccgactttgacaaggatgatccttacaaccgcgaggactccaagaacttcactcaggagattctcgcaaagatgggcgagagctacgatgtgatggtgtcaggcggtaacgcgtataccttcaagtatgcggacgttatccttaacatggcaacggaaagctccaagtacatgagagcgagcgcgtccattccgttcataggaatggtgctccacggatacatcaagaccgcaggcgaagcgctcaacatggagagcgatatcgagagcgcactgctccatgctatcgagaacggctcaagcctttacttcatcctctcctaccgcaacctcgaagccctcaaggaatccggttcattcagcaactattattccgtcggctacgatgtatggaaggacgaggtcgcggagtattacctccgcctgaacgatgttctctccgatcttcaaactaagcttattgtagatcacgactttatcaccgcatcccgtatccccgatgacgacgagatccaggctgatgaagatgctgcaaagcttgcggcagagatcgcaaaggctgagaaggacgaggctgaccgcaaggcgctgctcgcatctctccttgcacagagaagacgtgagctcggaatgaccgttgatgatgaagagatcgttattcccgacgacgacgaggatatctccgaagacgacggaagcgataccgatgacggtaccgataccgacgacaacggaaacacttcttcgggtaccgtgaacaagtatctcaccacagagggcacggtcgtccgcgttgaatacgaaggcggcacaagcttcatactcaactacaactcatttgccgtaaaggcagtgtataacggaacggtctacgaaatcgactcgctcggcttcgtaagaatcgacggatga

SEQ ID NO: 616 - DNA, 1566 bp, Unknown
  Unknown gut bacteria
atgggttatctcggcaaggagctgaagctcgaaaaattcagggaatactttgaaaaaacggtgtcgcgcggtccggatatgtcgcgcatcagggagcttgacggagcgatcctcggctttcaccgtcttgcgataatggggcttaccgacgaaggtatgcagccgtttgagcttcacggaagctatgccgtatgcaacggtgagatatacggcttccgcccgataaaggcggagctgtcgaaggaatacgattttgcgtccgactccgactgcgagatcattctgccgatgtatgaaaagtacggtgtcggaatgttcgaaaagcttgatgcggaattcgcgtgcatcatctacgacggggcgaagaaatcgttcgtcgcggcgcgcgatccgatcggaatccgcccgcttttctacggatacaccgacgacggtggcatcgtgttcgcatccgaggcgaaaaacctcgtcggactgtgcaagcgtgttatcccgttcccgcccggacactactatgcggacggcaaattcgtccgctaccgcgatgtgaccgaggtttcggagtatgtctccggcgatcttgacacgatctgcaaaagcatacacgacaagcttgtcgcgggagtcgagaaaagactcgacgcggacgcgccgctcggattccttctctccggcggacttgactcctctctcgtatgcgcgatctctcagaagcttctcaaaaagccgatccgcacctttgcgatcggcatgagcgaggacgcgatcgacctgaaatacgcgcgcgaggcagccgatttcatcggcagcgatcacagtgatataatcatcacgaaggacgatgtaatctcgtcgctcgaggaggtcatcgccgcgctcggcacctacgacataacgaccatacgcgcgtctatgggaatgtaccttatctgccgcgaaatacaccgcaccaccgatgtgcgcgtactcatgacgggcgagatatccgacgaactgttcggctacaagtacaccgactttgcgccgtccgccgaggaattccggcgcgaagcggtaaagcgcgtcagagagctttacatgtacgacgtgctccgcgccgacagatgcatttcggtaaactcgatggaagcgcgcgtaccgttcggcgatctcgacttcgcgtcatatgttatgagcattgaccccgaactgaaaatgaaccgctacggcaagggcaaatatctcctgcgccgcgccttcatcggggattatctgccggaggatcttctcatgcgcgagaaagcggcattctccgatgccgtcggtcactctatggttgattatctgaaggaatacgcaaactcgctttattcggatgaggatttcgcgcgtctttcggaaaagtatgactttgcgcgcccgttcaccaaggaatcgctgctttaccgcgagattttcgagaagtattatcccggacaggcggaaatggtcgcggatttctggatgccgaacaaatcgtgggagggctgcgatgtggacgatccgtccgcgcgcgttctttcaaactacggagacagcgggaaataa

SEQ ID NO: 617 - DNA, 1329 bp, Unknown
  Unknown gut bacteria
atgtacggctttacaactgaatttgaaccttttgcggtcggatttctttcatgcgaaagcgaaaatctgagtaagaaagcagcctcgggtcttttgcgcgcagcggagaaaatgaacataaccgttgatcccgatctcgggcttgtctacgcttttcagggcatgaactgcactcttaccttcggaggcgggattacctgcaatgaagacggcttggagcgcctccgtgaggattatccggaaagtgcggctgatattcggtatatcattgacaatatgaaggggtatgcgacaggtccgaaggtgtttgatgcattttcccagacagaactcgaccttcttcattccggatctctgtggggaggaacatggacaggtcacgccgttcccgagtttgcggcgatcgcatcccacggaacggacttcataaggaaaaaggtaaccgcgtacagcatgaaaaatacgggaagcgcggagttttacgaagccatcaataccgccatggatgccgttgacgctctcggcgcgagagcgggggagatcgctgcgcggatgcttgaggacgagacggattccgcccgccgcgcacatcttgaaaagctgcgcgatacgttcactcacgcgccgaaatcgccgtgtctcgactttgccgaagcctgcatagtttatacgatgctgttcaccttcgacggagttgactcgcccggtcatttcgatcagtacatgtatcctctttggaaaaagacggatgccgggctcagaagagaataccttgaaaatatatggaatttctttcacaacacaagaacgtggaatctctgcatttccggctccgacgaaaattggaacgatatttcgaacgaccttacatacgagatactcgacgtcacgcgcaagtttaagtatcagacgccgaatcttacaatgcgatgccaccgtaatacgccggagagactgctgcgcgaagcgtataagaaaatagccacgggatgcggaatgccgacgctctataacgacgaggcggtctgccccgcgcttgaaaatctcggtatacctccgaaggacgcgcacctttatgtgatgaacggctgcaaccagatcgatattcagggtaaaagccacatgggtcttgaggacggcgaggttaatattgcgaaagctgtcgaattcacgctccacaacggcgtttctgagaaaacgggacagcagctaagcataaaaaccggagatgcctgctcgtttgaaaccttcgacgaattctacgccgcattcataaagcagctcgattatatgacggatgtcgcggcggaaatgtcgaataagagccag

SEQ ID NO: 618 - DNA, 1062 bp, Unknown
  Unknown gut bacteria
atggaaaaagtcaaggtcggagtgatcggatgcggctgtattgcaaacgcggctcacatcccttcctacatgaagtgtgacgatgcggagatcaagtatttctgcgacatcgtcaagtcgaaggcggagaaagcagttgaggaatacaagtgcggaagcgcgatcgacgattaccgcatcatcctgaacgatcccgagatcgacgcggtaagcgtctgcacgcccaacctcatgcacaagacgatcgcaatcgacgctctgcgcgccggaaagcacgttctctgcgagaagcccgcggcacgcatctactccgaggcgctcgagatgcagaaggttcagcatgaaaccggaaagattctgaacatcggtgtcgtcaaccgctttgccacctcagtaaacgaggttcgccgccgcatcatgagcggtgagctcggagaggtataccatgtattcgtaaacttccgctgccatcgctccatccccggaatcggcggcgcattcaccaccaaggcgatctccggcggcggcgtgctcatcgactggggagttcaccgcatcgaccttgtaatgtactgcctcggcgatcctcagcccctcgcggtatgcggcaaagcgttctcgaagctcggctgcgacattccaaactacctttaccgcggaatgtggtccgaggagacccgcaacgtgaacggaacctacgatgtagacgacagcgtaacggctttcatccgcaccgagggaccgatcatctccctcgagggcgcatgggcgcagaacatcgagcccgaagagaactacatcgacttcatcggaaccgaaggcggcatccgtcttgtttacggcggcggcttctcggaatacaaggtcgcatcgaagaccttcatctccgaagaggcaaagttcgaccgcggagatatgttcctgaacgagattcagagctttattcacagcgtgaagaccggtgagaagattcagtcccacatcgactacgcaattctcacgtcgaagatcatgcagggcatctacgattcctccgattccggaaaggaaatcgtattctga

SEQ ID NO: 619 - DNA, 1335 bp, Unknown
  Unknown gut bacteria
ttgcctaaggagaataaagtgttcgataaaattttatgtgcgaaccgcggcgagatcgccgtcagagtgattcgtgccggccgcgaaatggggataaaaaccgtcgcggtatattccgaagccgacaaaaattccctccatgccgccctcgccgacgaatgtgtctgcgtaggaggaccgagcgcctcgtcaagttaccttaatcaggaaaacatcatcagcgctgcgcttgctacaggagcacgcgcgattcatcccggatacggctttctcgcagagaacgcctccttcgcccgtctctgcgaggcgagcgggatcgtgttcatcggtcccgacggtgacaccatcgagaagatgggaaacaaaaacaatgcccgagagctgatgataaaggcgggagtgcccgttatacccggatcgggagctctttccgacgctgcggaagccaaggcttttgccgaaagcatcggatatcccgtgctgataaaagcatcagcgggaggcggcggaaaagggatccgtctcgtcggaagtgaaagcgagcttgaggatgcgttcatcaacgcctcggaggaagcgcgccgtgcgttctccgacggagaggtgtatatggaaaaatacctctcacccgtccgtcacatcgaagtccaggtgctcgccgacgaatacggaaacaccgtcacgctcggagagcgcgactgttccctgcagctcaacaggcagaaggtcatcgaagaaaccccctgccccgtgctttccgaagatacaagacagcgcatgttcgatgccgcgcgcgccgctgtctccgccgccggatacacgaatgccggaacggtcgaatttcttctcgacggtgacgggaacttctacttcatcgaaatgaacacgcggcttcaggtggaacacgctgtttccgaagaggtctcaggaatcgatatcgtcaagtggcagatccgcatagcttcaaagcttccgctctccttcactcaggacgacgttgtcctgcgcggtcactcgattgaatgccgcgtcaacgcgaaatcacaggggcagatcgattttctgcatttgccgagcacgacgagagtccattttgattccgcactcgttcagggagaaaggatatctcccctttacgattcaatgctcggaaagcttgtcgtttacgctccgacgcgcgacgaggctatccgcaaaaccgaagcttcgcttgccgaggttgcgatccagggcgtggaaacaaacatcgacgatctgcataccattattttcgaggatgccttccaatccggggaatacgacacctcatacctcgaaaagctctttaaaaaatga

SEQ ID NO: 620 - DNA, 1521 bp, Unknown
  Unknown gut bacteria
ggtgtgaggatcgtcggcgacggagcggcgggcgcatattacggcgtgcagactctccgtcagataattcacgagtacggcgattcgcttccccattgcaggatcgaggataagcctgaatttgcggagcgcggattctatcacgacgtgacgagagggcgcgtccccacgctgaagcagctatgccatatcgccgatctgctcgcgtattataagatcaattctcttcagctttacgtcgaggacgctttcgaattcgtcgagtacgacgggatcatgaccccggagaacgtgctcaccgccgaggagatcaccgcgctcgacgattactgctacgacaatttcatcgagctcgttccgtcgcttgccacgttcggacacctctacaacctccttcagagcgataagtacaagcatctctgcgaaatggaggattggaagccggagaagatgtattggcttgaaaagatggcgcaccacacgatcgacgtatcgaacgaggagagcatcaagcttatctcgagcctgatagatcagtttatcccgcttttccgttcggacagattcaatatctgctgcgacgagacgtttgacctctgccgcggacgcaacgcgggcaaggatgccggtgaggaatacttcaaattcctcatgaagataatcgagcatgtgaagagccgcggcaagaccgtcatgatgtggggcgatattgcgctcagccatcccgataagctccactatatccccaaggatacggtcatgctcaactggacgtacgtttcggatcccgacgagggcaaggtcaaggcgttcgccgacgcggggctcaatcagatcgtgtgccccggcacgtcgagctggaaccgcttcgtcgaggagatcgaccgctcagagggaaatataacccgccttgcggattacggcgcgaagtacggcgcgctcggcatcctcaatacaaattggggagatttcggcaacatctgcccgttcaactgctcgctctacggaatggtgatcggcgcgcagaaggggtggagatgctccgccgtcctcacggaggaattcgaggaggcggcaagctcgctgctctacgattccgacgacataaacgtgatctctctcatccgcacgatgggccgctgcgagagaagctgcgattggatggagttcatgtattggtacagcgcgaacaccgtcgagggcaagaccacggagcttgcctgcgataccgatgccgcgatcgcgcatattgcggagcttgacggggtaattgccgcacttcgcggtatcggcgaggatgacaaaagaatatccgatctcattctctcgtgccgcgcgatacagcttatgaaccgcgtctgcctgaagatcaagggcgttgaaggctacaccgaccgcgtcactcttctgtacgatgtagaagcgtggctcaagccctaccgcgagtcgtggctccgcgagaacaagctgagccagcttgatctcgttgaccgcttcatgcacgaggttgcgatctgctga

SEQ ID NO: 621 - DNA, 1725 bp, Unknown
  Unknown gut bacteria
atgagaatatacaagaaatggggacgcgactccgtcggaaagatacgcgaaaacccgtaccgcctttgcagcgaattccacgggataggattccgccgtgccgatgagatcgcgctcacgatcggcaccgacaagaattcccacgaaaggctgtctgccggaatctcctacgtcctctcggcatatatgcagaaaacgggaaacaccctgatgccggagggcgagcttaccgatacgtcagccgcgcttctcgatgtccccgccgagattctcgccccggtgctcgatgacgagataaaaaggtcacacgccgtcggcacggtctcgaacggtgaaagatacataagcctgccgcgcgccgccgaagcggaaaaatactgcgccgcgaagctcgtgcagctttaccgtctctgcccgagaatcggcgatgccgatattccgatacttatctcgcgctgcgaaaacgattcgcatatcgaatatgccgatctccaaaaggaagcgatatatgccgccctctccggcggagtctgcgtaataacgggcggtccgggaaccggaaaaacgacggtcatacgcgcgctcatatcgatattcgacgggctcggactgaagtgcgcgcttgcggcaccgacgggacgcgcggcaaagcgcatgagcgaggcgacgtcgtatgaagcaaaaacggtccaccgccttctcgaaatggaatacaccggagacgacgaaaacgcttcgttcctccgcgatgagaaaaatctcctcgatgaaaacgtcttcatcatcgacgaagcgtcgatgatcgacatcttcctgttccattccctgctccgcgcgatcaagcccggcgcgcgcctcatcctgatcggagacgcggatcagcttccgcctgtcggcgcgggcaacgtccttgacgatctcatatgctcggaggcgtttccgctcgttcgcctgacgagaatattccgtcagagcggcgaaagcatgatcgtcaccaacgcacatatgataaatgaagggaaatttcccgactgctctaataaggacggagatttctttctcatgctgcggtattccgacggcgaaaccgcatctacggtcgccgagcttataaaaaagcggcttccggcgaaatacggaaaggacatcgcgggagatatacagataataacaccgtcgagaaagggcgcgtccggcacggtcgagctgaacgcgcgccttcagcagcttctgaacccccgagcccccgaaaaagcggagaaggcattcggagaaaagatattccgcgacggcgatcgggtaatgcagaccaagaacaactactccgtcgaatgggagaaggattcggtttcgggcgtcggaatattcaacggcgacatcggacagcttatttccgtggatcacgcctccggcacgttcagaataaactttgacggaaggatctgcgactacgactttgcctttgcggacgagcttgaccacgcctacgccgtgacggttcacaaaagtcagggcagcgaatacccgtttgtcataatcccgctttaccgctgcgctccgatgcttctcacgagaaaccttatatacaccgcgatcacacgcgcctcgcgtatggctatactcgtcggcgacccgtccgtactctcgacgatgatcgagaatacgggtcacacaaaacgcctcacccgcctgaaggagaacataacggaggcgctcggtgaataa

SEQ ID NO: 622 - DNA, 1782 bp, Unknown
  Unknown gut bacteria
atgctcacctttatccttcttccgctgtatttcttcgtgaagaagatcagcctccgcgagaagatcgcaactgcgatacttgttctcttcatggtgttcagcttcaatgcatcgacgcttgacctcgtatggcacggcatgcagcgccccaattggctgaactaccgctattcctttatgctttgctttctcttcattatcatggcttacaaagcatatgagaatatacgggatataggctaccgcccgatcattataagcgcgggcgttataacgcttgtactgtttgttctgcagaagcttgaatacgaaaacattcccgacctgacaagcgtttggccgtcgatcggatttattgtcgcatatctcctccttctccgcggcgctacatggagcgttaaaaatataagaaatacgacggcgctcgtccttgtgatgattgtttcgtttgaggcgtataccgcgggacttgcaaatcttgtcgatctcgatgacgacgttgtttattcaaagcgcaccggattccgagatttcatcgataagtattcgcccgtggtggataagcttaaagaggacgatcccggcttctaccgcatggaaaagacgtcgcacagaaaaacaaacgataatatggcactcggtatatacggcgtgtccaattccacatcgaccctgaatgcctccacgataaagcttctcggagattacggaatttcgtcgaaatctcattggtcgaaatatctcggcgcaactcccgtgttcgattcgatcttcggaataaagtatatcatgaccgagaatgtttctcttatgagctctctttatgaaaagaagtctcaggtcggcagcgtgttcatctacgaaaatccctacgcaatgtcgattgccgcgggagtcaatgaagcgcttgcttcctttgatgagacacagtataaatctccgtttgagcgtatgaacgatacggtcgccgcaatgctcggcgaggaggatggagtcaagatattcaagccgctcaagcagtcctcgattatcaacacgatgaactgcactcagaactacacatccggccatataaaatacaccaagagctcggacagcgatatttcctccgtaacactttcgtttgaggcggaaaacagcaaaaacgtgcttatgtatatcccgagcgactatacgcgcgaatgcaaactctatgtaaacggcgcggcgaaggacacatatttcgcaaacgaaacctgccgtatagtcgacatcggaatttttgagcccggcgaaaacgtggagatccgccttgagcttcagaaggacaatctctatttgaaggataactgcgattatttctactatttcgatgaggacgttttcaccgaagcgatgcctaagcttaagacaagtgagttcaacgtgaattaccataccgaggacacactctgcggaacgattcacgttctccccggtcaggagcttatctatacctctatcccttacgatgagggatggaaggtgagcgccaacggaaacgctgtcgaaacctttgaggtgatgaacggtcttaccgcattccgcctgagcgcgggaagctataaccttgagatgaaataccgtcccgactgtgcggtttacggaatcatgatctcctgcgcgggagttgtgatatttgcgctcatgtggatcggcgagtacctcctccgcaagcgccgtgtccgcgtcggagcagcacttacggaatctcgaacggacggagaaatctccgacactgcgctgtcggaggatatcacggag

SEQ ID NO: 623 - DNA, 1452 bp, Unknown
  Unknown gut bacteria
gagcattacgaaggcgggatcgcgcacgtcggcggcggtgtcgtcggttcgcttccgggggagcttctttggcgcgggctcaacatatgcatggtgataatactggtcggcgcgctgctgattctcattccgcttcttttcgggataacaccgaaggcgctttacgagaagatcgcataccgtgtgcgccttgcaaggctcaagcagctcgatatgcgtgaagagcgtgcgcgtcaggcggaagagcttcgccgcgccgagcgcgcagcgggcgtcgtcggatacggcaagtacaagcccgagcagcttttgattcagaccgaatctactgcgaatgatgagaagaaaaaacgccgcccgatggatacggagcttgatccggaggatgaactcggtgcgaagccgtttgtcgatcccgcggcatatgaggcggcggagaaggagaagctttttgagggaagccgcgtcgagatgaccgatgtcggagacgaaggagccccttcggcgggcgatgagcacgtcggagaagcgtcggatgcggcagacaaaacttcgcgcgcggatgaaaataaagaaaatgaagaaggcggaggggcgctgaccgagagcatcggcgcatcggcgcaggagaacggcggagagattgacctgagcgaggtgttctccgaaagcagtgacgaggagcttgtccgccggctcaacagcatgtacggtccgtcggacgcgcagtccgcaccgtccgcgcaggttgagcttgaggtcgaacgcaggcatatcaccgagatccccatcgataacgaaacggttccgccggacggcggcgaggatgcgggcgaaggtgtgacgactgatctgtaccccggagacgcactttacaaattcccgccgatcgagatgctcgcggaggatcccggcaaacgcgacccgaatataaagcgcgagatggaggagaacgcgcgccgcctgacggaggcactcgcaagcttcaacgtcaaggcgactatacaggattcctcgcacggtccgacggtaacgcgctacgagctgtcccccgaatccggaacgcgcgtcagaacgattgcgaatcttgtggatgatatatcgctttcgcttgccgctccgggcagcgtgcgtatagaagcaccgattccaggcaagagcgccgtcggaatcgaggtgccgaacaagacgagaagcaccgtttacctgcgaagtcttatagacagcgcggaatttgcaaataataagagcaagatcaacgtggctctcggcgaggacgtcgccggacacggggtatttttcgatatagcaaagatgccgcatcttctcatcgcgggcgcgaccggcatgggtaagtcggtttgcataaactgcgttatagtcagccttctctataaggcgacgccagacgaggtaaagctcatactcatcgatccgaaaaaggttgagttc

SEQ ID NO: 624 - DNA, 1401 bp, Unknown
  Unknown gut bacteria
atggtattttcaagtctcgaatttattttcgtatttctcgcatccgtgctcgcggtctattacctcgtgccgccgaaggcgcgcaacatcgtgcttctcctgttcagccttgtattctacggctggggcgagcccgtttatgtatttctgatgattgcgacgataaccgtcgattacatctgcggctacatcatcgggcgcgatctcgattcaaagccgaagcgggcgaaggtcacgcttatcatctcgatcgtgataaatcttgcgcttctcggcgtattcaagtattacgatttctttgccgggacgctcaattcgctgctcggcaggggagttttccccacgctcgggctgacgctgccgatcggaatatcgttctacacgttccaggcgctctcctacgtcatcgacgtataccgccgcgacgcgcgcgttcagaagaacatcgccgcattcggcacatacgttacgctctttccgcagcttatcgcgggaccgatcgtccgctacgccgacgttgacgatcagctgcgcgagcgcacgcattcgctgacgcttttcgcctccggatgccgcacgttcatatgcggactcgcgaaaaagatccttcttgcaaacgccgccggcgcaatgtggaattcgctttccgccgccgcggagccggatgcgctcggcgcgtggctcgccatcgtattctacaccttccagatatactttgatttctcgggatactccgacatggcgatcggtctcggaaaaatgttcgggttctcgttccgcgaaaacttctactacccctacgtttccgaaagcatcaccgaattctggcgaagatggcacatctccctttcgacatggttccgcgaatacgtctacatcccgctcggcggaaaccgcaagggcgtcggaagaacgtacttcaatctgttctgcgtatggcttctgacgggactgtggcacggtgcaagctggaacttcgtcctctggggactctactatttcgcgcttcttgtaatagaaaagaccttcctactgcgcctgcttgaacgcgcgccgaaatttctccgccatatctactcaatggcggcggtaatattcggctggctgctgttcgtgatcgaggacgtatcctcgatcggggcttacctgtcacgcatgttcggcggcaccggggtatttgcaacgcagatcaccgtatatgagcttgtgcgcaatctcatgttcctcgcgatactaattctcgcgtccactcccgcgccgaaaaagctttggtacaaactgtactcaaagggtacgccgtggaggatcgtgcagtccgtcgtgtgcgcgatcgcgtttgtcctctgcatagcatacctcgtggattcgtcatacaacccgtttctgtacttcagattctga

SEQ ID NO: 625 - DNA, 1470 bp, Unknown
  Unknown gut bacteria
ttgagaatttttgataagaataagaatatcattataagcggggcatgggacgtagagctttctccgtgcctcgacggaaaggaagcttccggcggaagctatggtgaatacatgaaaataatcgttgcgggctgcggaaagataggcacggcgatcctcgaaagccttgtcgcagaggggcaagacgtcgtcgcaatagacgacaatgcggacgtcataaccgaaataacgaatatatacgatgtcatgggagtttgcggaaacagcgcggactgcgagacccttgacgaggcgggcgtcgaatccgcacagctttttgtcgccgcggcgggttccgacgaaatgaatatgctgagctgctttatcgcaaagaagatgggggcggagaacacgattgcccgtatcagaaatccggagtataacgaccgaagtctcggatttatgcgtcagcagctcgagctttcgatgtcgataaatcccgaactgctctgcgcgcaggatatgttcaacatactgaagcttccctcggcggtgaagatcgagaacttctcgcgccgcaatctcgaaatgatcgagatcaagctcggtcccgattccgagcttgacggaatgaagcttaacaagctgcgcgataaatacaagatcagctttcttgtgtgtgccgttcagcgcggcgacgagatgtacatccccgacggaaattttgaactgaaatgcggagacaaggtcgggcttacggcaacgcccgcggatatacagaagcttttgaaagccatcggagtgcttcgccgccaggctgaaaacgtcatgataatgggaggaagccgcacggcgtactatcttgcgaagatgctttccaacataggaatatccgtgaagatcgtcgagcaggatccgaaaagatgcgtcgagcttgcaaactctctcccgaaggcggtggtcatacagggcgacggcgcgcagcaggagcttcttcttgaggaggggctcaacaccgtcgatgccttcgttgcgctcaccggaatcgacgaggaaaatatgctcatgtcgatattcgcgtcgatgcataacgttccgaaggttctttccaaggtaaaccgtaccgagcttgccgcgctcgcggagaaaatggggcttgactgcataatctcgcccaagaacacgacctcgaacattctcgtccgctacgcccgcgcacttcgtaactcgatgggcagcaacgtggagacgctgtataagctcatggacggcaaggcggaagcgctcgaattcaatgtcaaggcggattcaaagcttttggggataccgctaaaggatctgaatttcaagccgaatatacttatcggcggaatcatgagggggcgcaagactatcattccctccggcgacgacgtgataatggcggaggcccgcgttatcgtcatcgcggcggatcagcgtcttcaggatctttcggatatcataagataa

SEQ ID NO: 626 - DNA, 966 bp, Unknown
  Unknown gut bacteria
atgaacgatcaatccacgtcagagcttgactttataaaaggacttctgatcgacgcgatccgcgcggcggacgcgatcccgaagcccgcgcttaatctttggtttgcgcatctgaaaatcgaatcgatatccgattccacggcgatcctggcggtggagaacgaattcatcagcaagaagatacaggagagatacgccgacgtgctcgctgattacctttccgagatcgtcggataccgcctcttcgttcagatgtcggtagacgagaccctcgtgcccgcgccgagaggcggaacgtatatccgcccgttcaacgcgatggagggaaaaatgcccgaagcggacgatgatgaagacgaggacgaggaggaagaagaggacgcaccccgcacggtcggcgatcggaatagcgcggaggaaaaaaaggagcagtcggcaaacggcgaccgccggctcgattacaatcccgactataccttcgacaacttcgtcgtcggcgaatcgaatatgttcgcacattcgatggcgaaatacgtctcgaagcatcccgcaaagaagtacaaccccctcttcatctacggacctccgggagtcggaaagacccacctcatgtacgcgataacgaacaatatcctgcttgacaatccgaacgcaaacatcacctatataaagggcgaggatttcacgaataagcttgtcgaggctataaacaaaaagcagcaggagcagttcagaaacaaataccgcaaggtggatgcgctgctgatcgacgacgttcagttcatcgcgggcaagaattcttcgcaggaggagcttttccacacgttcaataccctctacgaggagcataagcagatcatactcacctccgaccgtccgccgaaggatctccccggacttgaggacagaatacggagccgcttcgagggcggagttctcgcggacatatcgctcccggattacgag

SEQ ID NO: 627 - DNA, 1362 bp, Unknown
  Unknown gut bacteria
gtgaagttgcacctcgggcgaggtgcatgcccgaccgatgccggtgaaaaaaatctttgcagggagctttctccggcatctgtcggaagggcggagaagttcgtctttgtttcggaaagagagatatttatgaaaacggacaataagagatacataagacttcttgcggttttgtgtatgatcgtgtattttgtgagctatcttacgcggataaactattccgccgttctggtagagatcgtgaacagccgcggcatatcgaaaaccgaagcgtcgcttgcggttactgcaagcgcgctcagctacggcatcggacaactcgtaagcggatacttcggagaccgcataaagccgcacaggatagtcttcgccggacttctctgtacggcggcgatgaacttcatcctgcctctgtttgcatcgactgcggcgactgttgcaatttggacgatcaacggattcgcgcaggcgatgatgtggccgccgatcgtcaagatactgactgcgaaaaccgaaggcgcggattatcagaaagcgacggtcatggtttcgtcgtggggcagctcgggcgcaacgatattcgtttatcttgtgtctccgcttatcatacattcgatgggatggaaagcggtgttcttcttcgcatcgaccgcagcacttcttatgagcgccgcatggatgatccttttcccgagagtgaacggaaagcttgaggatatcagcgttctgcgcggatgcggcgaccgcaaatacgaaaagatgaccgggcgcaccgcggtgcttatcgcgctcgtcatgatcgccatagtcattcacggaagcctgcgcgacggaataaccacatggatgcctacatatgtatccgagacgttcaacctgaagagcgagatctcgatcctctcgggcatactgcttccggtattcagcatcatatgcagtcagctgacctccttcgtgaaccgcagattcgtcggcaacatcatgctgaattccggtatcatattcgtgcttgcggcgctcagctcgacgctgctcgctctgcttggcggaaagagcgcgcccgcgtcgatcgtcgcacttgcgctcaccacgggatgcatgtacggaatcaactacctccttacctgcctcgcaccggtgtttttcgtgaagtacggcaaggtttcgttcatatcgggacttctcaattcgtgcacatacgtcgggagcgcggtctcgacctacggcattgcgctgctgacgaacgataagagctggagctatatcgccggaatatgggcggtcacggctcttgcgggagcggtgctcagtcttgcgatatcggcggcatggggaaaattcaccggaaagagcaaagcttaa

SEQ ID NO: 628 - DNA, 1641 bp, Unknown
  Unknown gut bacteria
atgaagcttgaaaaactcagcgaattcaaagggaccgcaggtcctgttcttacgatagtcatggacggtgtcgggcttgctccgaagagagagggcaacgccgttgcggaggcatatacgcctacgctcgatatgctgatgtccgagtacccgactgtacagctcaaggctcacggcaccgcggtcggacttccgtccgatgacgatatgggaaattccgaggtcggacataacgcgctcggctcgggtcaggtgttcgcgcagggcgcaaagcttgtctcgcagtcgatcgaatcgggaaaaatgttcacctccgatgcgtggaaggagattgtttccgcggcgaaaaacggcggcacgcttcattttctcggacttttctccgacggcaacgtgcattcccacattgatcatctcaaggctatgatcgacgaagccaagaaggagggcgtgagccgtgtccgcattcatatacttctcgacggtcgtgatgtcggagagacctccgcactcgattatgtcattccctttgaagcttatctcgattcgctccgctctgatgatttcgacgtaaagatcgcgtcgggcggcggacgcatgaagatcacaatggatcgttacgaagcaaattggcatatggttgagctcggatggaagacccatgtgctcggcgagggaagaatgtttgcttccgccgaagaggctgtaaagacctaccgcgaggaaacgggcgcgatcgatcaggatctcgatccgttcgttatcgccgaggacggcaagcccgtcggaacgatcaacgacggtgacgccgtggtcttcttcaacttccgcggagaccgctcgatcgagatatcgaaggctttcgaggcgggagacgacttcgacaaattcgaccgtatccgcacaccgaaggtcgtatatgcgggaatgctcgagtacgacggcgacctccatattccgtcgagataccttgtcgctccgcctgagatcaccggaacgatgggcgaatacctctgcgataccggggtaactcagtatgcgatctccgaaacacagaagtacggtcatgtgacatacttctggaacggaaaccgctcgggcaaattctccgaggagcttgagacatatgtcgagatcccgtcggatgtcgttccctttgagcagcgcccgtggatgaagtgcgccgagatcaccgacgcgctcatcgaggctctcgaaagcggagaatacaagtgcctgcgggtcaacttcccgaacggcgacatggtcggacacaccggaaactatcttgcaacgcgctgctcgatggaagcgcttgacctgcagcttgcacgcatcctcaccgttatcgataagctcggcggagttgcgctcataaccgcagatcacggcaacgccgacgagatgtacgagatcgataagaagaccggcgagccgaagaagggcgagcacggcttcaaggcaaagacgagccatacgctcaaccccgttccgttcgtgatctacgataactccactgataagaattataccgtaaagaaaggtgcattcggactttccgatgtcgcggcgaccgcggtcaacttcctcggataccgcgctcccgatatctgggatgagtcgataatcgatgtaaaatga

SEQ ID NO: 629 - DNA, 792 bp, Unknown
  Unknown gut bacteria
atgacgcatactctcgaggtcactcagatcgcaagaataattgcacgtgcacttatgctgaacgaggatctctgcgaggcggctgcgctcggtcacgacctcggacataccccgttcggacatgccggggaggacgttatgcagaagtgcttttcaccggattttacgcattacaagcagagcctgcgcgttgtggaaaagcttgaaaacgacggcgccggtcttaaccttacatgggaagtgcgcgacggcatcgtaaaccatacgggcgagcatatggcatcgacgcttgaaggcgtgatcgttaaattcgccgaccgcatcgcgtacataaaccacgatatagacgatgcctgccgtgcgcgcattatgtcgatcgacgatataccgcgcgatatactcgacgttctcggaacgggacattccgagagaataaacacgatggtaacatcggtcatagacgcaagcacggattccgacacgatcgcaatgaccgaagaggtggcgcaggcgacaaacgccctccgtgattttcttttcaaaaacgtctatcacaatccgatcgcaaaatccgaggacgataaagcgcaggagcttctttcacgcctgtttgaatattatgttgagcacccggaaaaaatgccggatttattctacaaaaacaccgagatcgaaccggtcaagcggtgcgtgtgtgactatgttgccggcatgaccgacagatatgcgatcgacctttacaaagagctcttcatacctgcggtatggagcgttccgtctaaaaattactga

SEQ ID NO: 630 - DNA, 1194 bp, Unknown
  Unknown gut bacteria
gtgaagtcgtctgaggagagggacggcgtctccgtcccctgtgagggcaagctttattaccgcggctatgatgtgaatgatctcgtccgcggctttaccggagacggccgcttcggatacgaggaatgcgtttaccttctccttttcggtgtgcttccgaataagaaagagcttgatgattttacggctcatatcgaaagtctgcgcacccttccgtcgagctttgtccgcgatataatcctgaaagcgccgagccgcgatatgatgaacagcctcgcaagaagcgtgctcacgctttattcctatgacgaaaatgccgacgatacgtcggttgaaaacgtgctccgtcagagccttcagctgatatcgctttttccgatgctgtcggtttacagctatcagtcgtattcgcactaccacgacggacagagtctgtttatccatacgcccgctccgggactttcgacggctgaaaatcttctccatattcttcgcatagacagcaagtataccgatcttgaagcccgcgtactcgatatggcgcttgtgcttcacgcagagcacggcggcggaaacaactccaccttcacaaatcacgtcgtcacctcatccggaacggatacctattctgccgttgcggcttcgctcggctcgctcaagggaccgaaacacggcggagcgaacatcaaagtcgttcatatgttcgaggatatgaagaaaaacgtcagcgactacgacgactgcgatcagatacgggactacctcactaaaatactcaatagggaagcgtttgaccgagcggggcttatctacggcatgggacatgcggtgtattccgtttccgatccgagagaaagaatactcagcaaatatgccgagagactttcggaagaaaaaggacttcagaaagaattccgtctttacgaaaacacggcaaacatcgcatccgagcttatttcgcagaagcgccgcatatataaaggtgtaagcccgaatgtagacttttacagcggattcgtgtataagatgctcggactgcccgaggagcttttcaccccgatatttgcagtcgcgcgtatcgcgggctggagcgctcatcgccttgagggccttataaacgagggcaagattatacgtcccgcatatcgctgtgttaaagatcatgaggtctatatttccgttactgacaggtga

SEQ ID NO: 631 - DNA, 2487 bp, Unknown
  Unknown gut bacteria
atgccgaaaagtcagtatgtagatcccgggaaggtctttgagcgcggattcgccgaattcactccgatcccgctttgtcagtacaacaagaccctcaaggaagagaaagcaatttacaccaaggaggatttcctccgcatttaccgcgatatgcgcatcatccgcgaattcgagacgatgctcaatgagatcaaggtaaagagcgtctacaacggcgtcgagtaccacaaccccggtcccgctcacctttcgatcggtcaggaggcgtccgcgggcggggcggcgggctgcctcgatatcaacgatttcacgttcggctcccaccgcagccacggcgaaattctcgcaaagggtctttcctcgatcgagaagctcgacgacggagagctttacgacataatgaaggaattccttgacggcgtgacgcttcgcgcggtcgagggaagtgaggataagaagggcgacgtgaaggatcttgcgatcaacttccttctctacggcgcacttgcggagatcttcgcacgcaccacgggcttcaaccgcggtctcggcggatcgatgcacgcattctttatcccgttcggaatcctgccgaacaacgcgatcgtcggcggcgcggctcccgttgcgctcggtgcggctctctacaagagaagctgccacaagaagggcatagttattgcaaactccggggacggcgcgctcggacgcggccccgtcatggaatcgatgaacttcgcatcgatggagcagatcagaaagctttggggcatggacggcaagtacgacgattccggcatgccgatcctcttcaacgtattcaacaacttctacggaatgggcggtcagactcagggcgaaacgatgggcttcggtatccccgcacgcctcggtgccggcttcaacaccgagcagatgcacgcggagcgcgtgaacggctacgatccgcttgccgtgatcgacgcgaccgagagaaagaagaagatcctcgttgacggcgacggccccgcgctcctcgaggtcatgacgtaccgcgtgagcggacattccccgtccgattcctccacctaccgcacgcaggaggagatcgatgcatggaaggaagcgtgcccgatcgccgcttacagagcgaagatggtaaagggcaagatcgcctccgaggcggagttcgacgctatcgatgaagagatcgtaaagcgcatgacccgcatctgccgcatggcgaccgacgattcgatctcgccccgcatggatctctccaaggagcccgacatcatctcatcgatcatgttctcgaatcagcatgtaaggagcatggacgagagccgcgagcccgaggttctcatgccgaaggaggagaatccccgcctgaagcagcttgcagcgaagagccgcttcgcattcgacgagaacggcaaggagatcccgaagatcaaggttctcggactccgcgacgcgctctttgagtcgatactcgataaattctatgaggatcccacgctcatcgcctacggcgaggacaaccgcgattggggcggcgcgttcgccgtttaccgcggacttaccgaggctctgccgtatcaccgcttcttcaacgcgcccatttccgaatccgcgatcgtcggctcgtccgtaggatatgccgtcgcgggcggacgtgcgatcgtcgagcttatgtacgccgacttcatcggctgcgcgggagacgagatattcaatcagctttccaagtggcaggcgatgtccgcaggcatacttaagatgcccgttatcgtccgcgtatccgtcggctccaagtacggcgcacagcattcgcaggactggaccgcgctctgcgcgcacatccccggactgaaggtgttcttcccggctactccctacgatgcgaagggtctcatgaacgcggcgctcaacggcaccgaccccgttatcttcttcgagagccagagaatctacgatatcggagagaaattccacgagggcggcgttcccacggaatactacgaggtaacgcccggcgagcccgacatcaagcgtgaaggctcggatgtcacgatccttacgatcggcgcggtgctctaccgtgcgcttgacgcggcaaagacgctttccgagaaatacggcatcgaggctgaggtcatcgacgcgcgctcgatcgttccgttcaactacgaaaaggttctcgagagcgtaaagaagaccggaaggatcatcatcgtcggagacgcggtggaccgcaactccgtaatgcgcgatatggcatcgaacatcgccgaaatggcgttcgattacctcgacgcgccgccggtcgtattcggttcgcgcaactggatcactcccgcatatgagtttgaaaaatacttcttcccgcaggcagacggcataatcgacgttatatccgagaagcttctcccgatcgagggacgtgtctgcgagatcaacgagaccgagcttgagcacatcgagcgctcaaaggcgggactctga

SEQ ID NO: 632 - DNA, 1842 bp, Unknown
  Unknown gut bacteria
gtcggatataagctaagcccgttcctttggaagacagtgaagagcggtctttccgcgggacgtgttcagtcgatcgcaacgaagataatcgttgagcgcgaggatgagatacgcgcgttcgttccccgcgagtattggacggtcgatgccgttctcacttccgacggacgtgattttacggctcactattacggcgaagccggatcgaaggataagaacgagctttcagccgaaagcgaagccgtaaggataaaggacgactgcttcggcaaaaaattcgtctgcaccgaaatcaaaaaaggaaaccgtacaaagtcgccggcaccgccgtttatcacttccacactccagcaggaggcatccaaaaagctcaatttccagtctcagcgcacgatgcgcgttgcacaggagctttacgagggcgtaaacctcggtcacgaaaacggcggagtacagggtcttataacctatatgcgtacagactctctccgagttgcggctgaggctcagagcgccgcgctcgaatatattgccgaaaattacggcagggattactgccccgaaaagccgcgcgtttacaggacaaaggcgaatgcgcaggatgcacacgaggcgatccgcccctccaaagtggctcttgatccggaaaagataaaaaaaatgcttacaccggaccagtacaagctatataaactgatatggcgccgcttccttgcaagtcagatgtcctccgcagtcctttcgacggtgaacgcagagtttgcctgcgaatcacatatcttcaagtcaagcggatataccgtcaaattccgcggctatatggcgctttatgaagagacgagtgatacggcggataccgaacgcgaggtggttcttccgcctgtcgacaaggatgccgagctgaacgcccgtgacatcatacccgaacagcacttcaccgagccgccttcacgctataccgaagcttcgcttatcaaattccttgaggaaaagggaataggacgccccagcacatacacacccataataacgataataatatcgcgcggatatgtcaagcgtgacggaaagtccctccgccccaccgatctcggtgagataataacaagactgatgaataagtccttcccggatatcgttgactacaaattcacggcgtcgatggaaaatcagcttgacgagatcgaaaacggaaacgcgacgatgctcgatatgctgtcgaagttctatgaaggcttcagccgtgagcttgaagaggcggagaagacggtttccaaggagacctatgaggctcctgccgaggagacggacataatctgcgaaaaatgcggaagccgtatgatagtcaaaaacggacgctacggacgttttgccgcgtgcccgaattatccggaatgcaagaataccaaacagcttaataagtccggaacagccgaagcggaaaaagaacccgagatcgcgcccttcaaatgcgagttctgcggttccgatgtcgttgtaagacagggaagatacggcgcgttttacgcctgctcccgttatccggaatgcaaattcacaaagcagaaggtcaaaagcctcggcgtaagctgcccgaaatgcggcagagatatagtgaccaaatacggaagaaacaaaaccgtgttctacagctgctccggatatccggagtgcgatttctcgtcgtgggatcttccgacaaacgaaaagtgcccgcagtgcggagaaatgctgtatcagaaaaaaggcggcgcacttcttgtgtgcaaaaaggaaggctgcggatataagcgcgagattaccgacagttccgacgcgaaagaatccggagaagaaaaatga

SEQ ID NO: 633 - DNA, 2829 bp, Unknown
  Unknown gut bacteria
ataaccgacggaagacctatcggatttgaaaccgacgaattctattataagtcgaccgatgagatgagatcgcttttttcggagtatgagggtgcgatcgaaaacaccgtgaagattgccgagatgtgcaattttgattttgttttcggcaaaactcttcttccgcgatacaaaccggaggacggaacggcacctgcggatttcctgcgccgccttgctctcgacggacttgaatcgagagtgagtaaaaagcatgtcgtctataccgacgcccatcccgaaaacgaataccgcgagagaatcgactacgagctttcggtcatagacggtatgggctacagcgaatattatcttatcgtgtgggattttgtcaattactctaaatcccacggaatatccgtcggtccaggaagaggaagcggagccggcagtcttgtggcatacctgtgcggtatagtcgatatcgacccgattgtttacgggcttatattcgagcgctttctgaatccggaacgtgtcagcatgcccgacttcgacattgacttttcgtatgacaaacgcgacgaagccgttgattacgtccgccgcaaatacgggaatgatcatacctctctcataatcacttttggaaccatggcggcgcgcgccgcggtccgtgatgtcggacgcgctctcggaatgagctattccgatgtcgatgaggttgcagttctcattcctcattcaccggatatgaccctcgaaaaggcgataaaaataaaagcgctttccgaaaaatactcttcagaccccgaagtgcgccggcttatcgatattgcgatgaggcttgaaggaatgccgcggcatgcctccacacatgccgcaggtgttgtaattacggaaaagccgctttacgaatatgtacctcttgccgtaagcaacggagcgcctgttacccaatttacaatggaaaccgtcgccgatctcggacttctcaaattcgatttcctcgcactcagatatcttacgataatcgacgcatgtgtcagtcaggtacatgaggaaaattccgatttcgatatatccgcgatcgatataaacgatccgcgaacatacgcgatgatatcacgaggggatacggacggagtttttcagcttgaatccgcaggaatgagacagcttctcatgcagatgaagccagaaaagatagatgacataattgcctcgatcgcgctgtaccgtcccggtccgatggactcgattccgaaatatctcgaaaacagagcacatccggaaaaaatatcatatccgacggacaaacttgccccgatactcgatcagacctacggatgtatcgtgtatcaggaacaggtcatgcagattttccgcactgttgccggatacagtctcgggaaggcggatatagtccgtcgtgcaatatcaaagaaaaaagcctcggtgcttgaggcagagcgcgacagctttatttcgggtgcgcttgagcgcggcatatccgaggatgcttcgcggaggcttttcgacgacatcgcgggatttgcaaattacgctttcaacaaaagccacgcggcggcatatgcggttctgtctttccgaacggcatatctgaaatgccactatatcaaagagtatctttgcgcgcttctcacatcggtaacggattcgcccggaaaaatcgccgaatatgtcagtgaagcgcgcagcggcggaatttccgttcttcctccggacgtaaacgagagccgggcggattttcacgtcagcggaaatgccgttagattcggtctgcttgcaataaagaacatcgggaaaaacaccgtcgatgaaattgtttcgggcagggaatatgacggggcttataaatcggtcgctgattttatttcgcgcatcgatccttccgtgctgaataagcgtcagcttgaggcactcataaaatccggagcgctcgacagtctcggagaaaagcgcagtgcgctgcttgcctctctcgacaagcttatcgatgcgagagtttcggttccgacaaattcggtcgaaggtcaggttgatatgtttgcggagtttcaagccgaaaaaacatataccgttccgccgcttccagacattcccgaattcacatcgcgcgagcttcttgcactcgaaaaagaaagcataggaatatatctgtccggtcacatactttcggatttttccgaaaatataaatcacatttcgcctgaccgtattgcggatatttgcggtggcacggaagattacagtgacgaaaaagaaaaagcatccgacgggcaaaaggtcaaggtatgcgttataataacaaaacgctcgaacaagcaaacgagaaacggggaacagatggcttttctcaccgcggaggacgaaagcggtgaatgtgaagtgatcgtatttccgaaggtcctcgaaaaattcggacattttctcaccgttgattccgccgtgcgcatctgtggaagtgtttccgtcagagaggacgaaggagcaaaaatcattatggaaaaggcggaacgccttatcgaaaattcatctttccgtgcggaaaaagagaaaagcaaaaacacaaaagaatccgccgctcccgcttcccgtccgcaaaaggaaaggcgcctgttcgtaaagctcgatatgtcggatgagaaactgaaaaacagggtgatcagccttatatcgatattcgagggacatgatttcgtgcttttctacgattcgtcaaagaatgattacgtccgtgatttcacaatgagagccgatgcctcggattttgtcgtaaacgaactttgcgagcttctcggcgaaggcgcggtcgttctgaaatga

SEQ ID NO: 634 - DNA, 1734 bp, Unknown
  Unknown gut bacteria
atgcttagaatcacagacaacggaaattccgagtatgtaataatcatacgtaagaatcattccgcttcggagaaaaccgctgcagaagagcttgcggcttatctcaaaaagatcaccgatgccgaaataccggtaaagacggacgacgagaagaagaccgatcatgagatcgtgatcggatttacgaaccgcggcggcaagggcaagaaggaactcggcgaggagggctttaccatcaagaccgagggcaaacgcctgtttatcctcggttccgaggtgcgcggcgcgctttacggcgtttattcgttcctcgagaagtgctgcggatgccgcttttacaccgacacctgcgagcgcgttccgcagatgaatatgcttaccgttcccgagatcgactgcaccgagcttccgggatttgagtaccgtaacgtatattggttcgcacagggcggggagatgatctccgcaaagctgaaaaacaacggcggaatggggcacgagctcaccgagagagtcggcggcggaatcaactatataggcagcttctgtcataccttccccgatctcggcgagaccggaaacgtatgggatatgccctgcctcagcgacgaggcgatgtatcagaccgtcctcaagaatgtgagaaagagacttatcgagaacccgcttctcaagatcatctccgtatctcaggtagacggaaataacggcgagtgctcctgcgaaaagtgccgcaaggtatttgaagaggagaagagccacgcaggtacgcttatccgcttctgcaaccgcctccaggaggatgtgaacaaggaattcgagggcgttcatatcgatacgcttgcgtaccgctacacgagacagccccccgcagttaccaagcctcacaaggatatgatcgttcgtctctgcaacatcgagtgcagcgtcagcaagcctctcgaggaagctgtaaacgatcccgcggagaacggatacgacaatttcccgaccaacctgaagaagtggcatgagatcacaaatcatctctacatttgggactacacaaccaacttcaccaatatgtccacctccttcccgaatttcaacgcaatcagaaagaacgcacgtttcttcaaggagaacggcatttccggcgttttcgaacagggtaacagctcctgcctgaacggtgagttcggcgagcttcgcggatatcttcttgcaaagctcctctggaatccctacatgaccgagagtgagttccgcgttcatatggcggatttctgcaccgattactacggcgctgccgcaaagcatatgatgcagtacatcgatttcgagcatgagtgcctccacgacatcttcatgacgatctacttcgacgactcctccaacattatctacatggacggatacaaggatcattccgagggcgcgtttgcgttctacgataaggctgccagaatcttcgacgaggctgaggctgccgcatggggaagcggaaaccgcacccactacgacaacgtccgccgttcgcgcatacagctttacaactacaattactttattctcaagagaaagatggatagtgcaaatccggaggaaaaggaggcgctcgagcgtgcaagcgcagagtcgaaccgtacaatgttcgcgcttatgcgtgaatacggcttcaccgagccccgtgagttctcccatctcgatctcgcgtcggtaccggatttcaatcagtgcttcatacactggtaa

SEQ ID NO: 635 - DNA, 1362 bp, Unknown
  Unknown gut bacteria
atgaaagatctgctcattgtaaatttgatccttgcgatcttcttcacggtatgctacacatatcagttcatatacattctgatcgcgctgatcaaagagccgaagaaatacacctccgacaacagaaaccgttatgcggtgataatctccgcccgtaacgagcgcgacgtaatacacaatctgatcgacagcatcaaaaagcagaatccccccgccgagctgatcgacacgttcgtctgcgcggacaactgcaccgacgacacggcggagcgtgcgcgcgaagccggagccatcgtgtacgagcgtttttcgaccgaaaaggtcggaaaggggcatgcgcttaactatctcttccacaagatcttcgaagattacggaaaagagtactacaacgcctatctgatcctcgacgcggataacctgctcgacgagaactacatgacggagatgaaccacgtattctccgccgggcacaggatcatcacaagctaccgtaattcaaagaactacggtacgaactggatttcctccggatatgcgctttggttcctgcgcgaagcggtctacctcaacaatccccgcatgattctcggcacaagctgtgcggtatcgggcacgggcttcatggttcaccgcgatataatcaacaaaaacgacggctggaagcacttccttctcaccgaggacatcgaattctccgtggacaacatcataaacggagaaaagatcgcatacgctgcggacgcaatgctttacgacgaacagcccgagacgttttcgcagtcgtggaagcagcgtctcagatgggcgaagggatatcttcaggtattcatgaattacggcggacggctcatgaagagcatcggcggaaaaggcggattctccgcattcgacatgaccatgacgaccatgcccgcgatattcctctcggtgatcggattcttctacaacgtgatcaccctcatcgttgcgatctgcacaaaagacccccatgtcgggcttttctggggtgcgcttgccatgaccgtcgcggtcatgtacataatgtactttgcgatcggtgtgatcaccggagttacggagtggaacaagatcctcaccacgaaaggaagaaagataaaatctttcttcaccttcccgctcttcatgttcacctacatcccgatatcgatcgccgctctgttccgcaaggctgagtggtctcagataaagcacaccgttgcggtgtcgataaacgacatgaatgcaggcaaagcgcaaaacggcaaggatcggagcgatgccggcaaaaaggacggcgatgccgacggcagcgccgatggaaacacaaaagataccgatgaaaaagaagaaaagaaataa

SEQ ID NO: 636 - DNA, 1278 bp, Unknown
  Unknown gut bacteria
atgaacgaaaacattgaaaacaccgcggccgagccttcgctttccgaagtccttcagattcgccgggacaagctttccgctctcgtcgccgcaggacgcgatcccttcgagaaggtcagattcgactttgacgcatacacgaaggacataaaggacaatttcgacgagatggatggcaagaccgtccgcatcgccggaagaatgatgagccgccgcgacatgggcaaggcaaacttcatcgacatcatggacgcatccggcaggatccagtgctacgtccgcataaacgatgtcggcgaagaaaccttcgacgagtaccgcaagtgggatatcggcgacatcgtcggcatctccggcacggtgttccgcacccgccgcggcgagatctccgtacacgtttatgagatagagcttcttgcgaagtctcttctccccctgcccgagaagttccacggactgaccaacaccgatatgcgctaccgtcagcgctacgtcgatctcataatgaaccccgaggtcaaggacaccttcgtgaagcgcagccttatcctccgcgagatccgcgcttatctcgattccaagggatttctcgaggttgacaccccgatcctcactccgttcgagatcggcgcgtcggctcgcccgttcgtcacgcatcacaacacgctcgacatggatatgtacctgcgcatcgagacggagctttatctgaagaggctgatcgtcggcggattcgaccgcgtatacgaggtcggcagaatcttcagaaacgagggcatggacacgaagcacaaccccgaattcacgacggtcgagctttatcaggcgtacacggattacaagggcatgatggaccttgttatcgaaatgaacacgcagcttgcggagaagatctgcggcacgacgaagatcacataccagggcaccgagatcgacatgggtcattgggaaaagctgactatggcagaggcggtaaagaagttttccggcgcggattactatgcgtgggacagcgacgaggcggcacgcgcgtgcgcgaaggagcttcacgtcgaggtcgccgaaaatgcgacgaagggcaccgttcttgcggagctgttcgacgcatacgtcgaggaaaagctgatccagccgacgataatatacgactaccccgtcgagaacagccctctcgcaaagagaaagccgtccgagcccgccttcaccgaaagattcgagtacttcattaatgcgaccgagttcggaaatgcattctcggagctcaacgatccgatcgat

SEQ ID NO: 637 - DNA, 1629 bp, Unknown
  Unknown gut bacteria
ttgggtaaggcaataaacatccttgtccttgtaattgcttctctcgttgttattaccgcctgcgtcctcaacatcgccggattgatcggcggactccgatccgggatcaccgaggaatgggtcgattttcttaaatggaacgaccgttcttatataaacacctacggcacgctcgataaaaaatatgtgaataacatgctcggcgcgacctcgcgccttacgccgaaatccctggatatgacaacatacgttccgggaaacggcgaagctgcgcatctcgagatcggcacggcgttttattcgataaacggctacgattcggaaaaattcatcgccgtaaaggacggcagcgatttcttcctgtactgtacacaggatgcggattccgcatctcttctcgaaaaatgcggagtgaagcggtataaatcgcagatcggattcggcacattctttgttcagggtacgggcaaaggcacagattccgatataagcctcaaatatttaaaatcctattcggcacttacttcgtatctttccgacaaatcaaaggacttttccggaaatcaatacaaggacgtgattatgcgccgcggctatgatgaggactttttcctgaataaagcggtgattgcgataagactcggcagctgtgaaagtgcggcatacggccttaacgcggtcatgtccggaaaatcggagatgacgtttgttctcagaaaaaacgtactccccgatgagatcagatacgctgccggggacgtcgggtacctctttgttgagatcaacagacgagattacaacggtcagaagcttgtttatcagatcgagccggatattatcgagaatgcggagatactcgccggagaggatgcggaaagcgcaatgaatgcccgtgtcaaaatcgcatatgagtactcggagatctcgggtacttcgtgggcgatcgccgcgggcgaagaatacgacagggattttttcgattcgaatctcctctttatagtatcgtgcggggattccgagggcttgagccgatacagcctcgattccgtgtcgaacgaacggggaattctaaaaaaaaatataacgagatgccgcaatgtaaacgcctctcccgattatcgcaggcagtatattaccgttgcatatccgaaatcgaggtataacggcgaaaccgttctcccgatcgcaaagctttccgatgcgccgccggagccgacggagtatactccgcgcgactgcacggtcatcacggacatggataccctcacggagcttgccgcggtttacggaattcccgaaaatatatacggtgataaattttttgaaagctacgttctctatttcgtgggggatgtggtggcttcggaggatgtggatttctcatatatgtcatgccgcgccgatgaaacaggacagacgatcaccgtgaaggaaaccgtcccggcggattgcgatgattccccggttctgaaatatgtagccgttccgtatctgaaaagcgcatacggcggcggcggatttacggtgcttctcgaaacgaagtacgaatacctgacggtaaacggctacgaaaatactgaaaatacagaggaaacgacggatgaaacggctgggaccgaaaccgccgct

SEQ ID NO: 638 - DNA, 1317 bp, Unknown
  Unknown gut bacteria
atgagtaatgaagaaataatcataacagcaaagacggtcgacgaggctctctcgaaagccgaagcggaatacggttcgcagggcgatatatcgtacgaaatactcgaaatgccgaagaagggctttttcggcatcggaagcgcgcccgcaaagattaaggtcacaataaaccgtgagcaggagagcattctcagcgagataaattcggatcggaaaaatgccccgaagccgaaaaacactcagccgcgcagagacggcgcagaccgtgcgaagaatcagccgaagccgcaggagacgaagaagaatgctcccgcgcgcgacgcaaaggacgcgcagccgaaatctcaggataagccgcaaaacaagcagaaggatcagtcaaagcaggacggcggaatcgccgctcaggacagaaacggcgcacaggacaagcagaaggcgccgaagaaccaaaacagggattcgggtgcgaagaaggctccgaaggagcccgatactcagaagcaaactgcgtcggaaaacaccgaaaagaagccgcagaagggcacgttcgttgagaaggaacgtccgaacatcgtcatcaccgaaaaggagatggagcttgctctcggatttatcaacacccttctccgcaacatggagtccgaggcgcatgccgaagccgcagtcgctcccgagggcgcggtgttcgagggagtgtaccccaagatcgagatcgtcggagaccgttcgggaattctcatcggtcatcacggtgaaacgctcgacgcgatacagttcctcgcaaatctctgcgtaaaccgcaagaccggaacctccggcaaggactttgtgaagataacggtcgatatcgaaaactaccgcgaaaagcgcgaggcaacgctccgcgcactcgcgcgccgcatggctcagaaggcgataaagtacaagcgcaacatggtgcttgagccgatgaatccttacgaaagacgcataatccactccgagcttcagacctttgagaatgtcgatacacattccgtgggaagcgacgaaaaccgcaaggtcgttatcacctacgagggtgcggataaggcggagcagaagcgctcgcagaagaaccgccgcaattcctcatcaaagcagggcggcgcgcagaaggaaagcgcaaaatccgctcccgtaagaaggatctccgaagaggagtccgcgaagattcaggaaacctatgcggcttaccaggaggaaaaggcgggacgcgagcgtccgcgccgcgcttcctcgatcgacgagatactcggctcctacgacgagcccgacgagcctgtcggactctga

SEQ ID NO: 639 - DNA, 1041 bp, Unknown
  Unknown gut bacteria
atgaaaaaagcggcggtaataggctacggcggaatgggctcgtggcacgtcaaccacatacagaacagcgatgttgtttccctcgcgggaatctacgatattcttcccgagaagcgcgctcttgcggagagccgcgggatccgtgcttacgcttcgcgtgaggagcttctcgcagacaaggagatcgagcttgtcaccattgcaatcccgaacgacgttcatgaggaagtcggaatcgcgtgcatgaacgcaggcaaaaacgttatcatggagaagccggtaacgctctctctcgaatctctcgaaagactgatcgagtgctcgaagaaaaacggcgtgaaattcacggttcaccagaaccgccgtttcgatgtcgattttctcgcaatgaagcagatccacgactccggtgagatcggcgagatcatcaatatcgaatcccgcatccacggaagccgcggtattccgtccgattggcgcggaaccaaggagcacggcggcggaatgcttctcgactggggcgttcacctgatcgaccaggtgctcaacgtcatcggatgggacgttaaatccgttcgctgcgatttcgagcacatcaccaacgacgaggtcgacgacggcttcggactccgcctcgtgtttgagagcggcgcgcgcgcgtacatcgaggtcggcacatacaacttcatcgcaatgccgagattctatatgcgcggcaagtccggcacggcttacctctccgactggcagagcgaaaccgatgtcgtgaagtgcaagtattggcacgaaagcgacgttctccccgttcagactgcggcaggacttacaaagacgatggctccgcgcgacagcgtgaccgtcgacacctacaaggtaccgcgtccgcattccgatgtccacgatttctaccgcaactacgttgacgcgatcgacggaaagtgcgagcagctcgtcacgcacgatcagatgcgcaccgttctccgcgttatcatgcgcggattcgaatccgcagaggcgggcggcaccgaagtcgcattctga

SEQ ID NO: 640 - DNA, 2427 bp, Unknown
  Unknown gut bacteria
atgtcaaaggaacagtgcaccgaagaggaaataaagaaaaatctcgaaacaaagctcgcaagatttttcggagtgatgcccgatgaggcaaacgcaaatcaggtatataaagcgacgatacttacggtgagggatatcctcacccaaaagagatcggatttcaaagagaaagtgaaagcgaagaaggcgcgccgcgtctattatctctgcatggagtttctcgtcggacgctcccttaaatcaagccttatgaatctcggtatagcggagctttacgaaaaggctctttccgacatgggcttctctctcgattcaatctatgaaatggagcccgatcccggtctcggaaacggaggactcggacggcttgcggcttgctttatggattctctcagcacattgagctatcccgccacgggcttttcgatatgctacgaatacgggctgttcaagcagaagataatcgacggaaaccagatagaacttcccgatgagtggatgagccgcggggatgcatggctgaatccgcgcacggatcgcgcggtaaacgtccgcttcggcggtcatgtgaccgaaaattggcagagcggaaagtgcagcatcacatacgaagactgcgacgaggtgcaggctgtaccctacgatatgatgatatcgggagcgggcggcgaggctgtcaatcttctcagattgtggagagcgcatgatacgaagatattcgacatgagccttttctcccagggagagtatgtccgagcgcttcaggaaacgacggacgccgagataatctcaaaggttctgtatccgtccgataaccacgacgagggaaagatgctccgccttactcagcagtatttccttgtgtccgcatcgcttcagaatataattgcggatcaccttgccgtgtacggaacgctttataactttgcggataaggttgcgatccatataaacgatacacaccccgcactctgcattcccgaacttatgcgtatcctcatggatatatactcatacacatgggaggcggcgtggtctgtcgttacgcgcgtgatctcgtacacaaaccatacggtcatgcccgaggcgctcgaatgctggaacgagggtctttttgccctcaagcttccgcgtatccatatgatagtcaaggagataaaccgccgcctctgcgccgatctctggaatatgtatcccggagattgggaccgcatatcgagaatgtccgtgatagcacaggggcaggtgcgcatggcaaacctcagcgtcgccgcatcccataaggtgaacggcgtctcggcgcttcattccgatatccttacgaaaaccgtattccacgattattacaaggctttccccgataagtttacaaacgtcacaaacggaatcgcctacagaagatggctctgctattcgaatccggggctttccgcgcttcttgacgagtgcataggcacggcataccgcacggacagtgaacgcctcgaggatttcagagcgtttaaggacgataagcccacgcttgaaagacttatgcagatcaaggcggacaacaaggtcaattttgccgcgcttgtggagaagaatacgggagtgcgcatcgatccttcgtcgattttcgatgttcaggtcaagcgaatgcatgagtacaagcgccagcttctgaacgcactcaaaataatatcgctttataatgatattctcgaaaatccgaatgccgatataacccccgccacgttcattttcgggggcaaggcggctccgggatactatatggcaaaggatataataaagcttatctggagcatcggacaggagtttgcccgcgatacgagagtgagggataagatccgcgtcatataccttgaggattacaacgtcaccacgaccgaaacgctgatgcccgcatcggatataagcgaacagatatcgcttgccggaaaggaagcgtcgggcacgggatgcatgaagttcatgataaacggagcgctgacgctcggcacgcttgacggagcgaatatcgaaatgatggagaaggcgggagcggagaatttcttcatattcggactcaactccaccgaggtcgatgagctgtggaagagagggtacgattccgccgaatactgccgcaagagcgaaagactttcaaagacggtggaaactcttcgacgcggattttacggcaattccttcgaggggatggcaaattatcttcttcacggcgggggaatcgccgatccctatatgtgcatggcggactttgattcgtatttctcgacgtacgaggcaatgtgcgactgctatgccgacagcatgaagtgggcgaagaaatcgctctgcaatatcgcgggcgcgggatacttctcgtccgaccgcagcatacgcgagtacgccgagaaaatatggaatctctctccggtgaaataa

SEQ ID NO: 641 - DNA, 1140 bp, Unknown
  Unknown gut bacteria
atgagtgcaatttaccgcttcttcggaagcatactgcagtttctcgataagataacgggcaactacatgatcgcccttgcgctgttcgcgcttattatccagatactgatgctgccccttgcaatcaagcagcagaaaaactcgatcaagcaggcgtcgctcgcgccgaaggtcgccgcactgcgcaagaagtacgcaggacgcacggacaaagccacacagcagaagcttcagcaggaaacgatggatctctatcagaaggaaggcttcaaccccgcaggcggatgcctccccctcctcatacagcttccgataatcatgcttctttatcaggtgataatcaagccgctctcctacgtttcgggattttcctccgatgtgataaacgcaatcggtgaaaaactcgtttctctcggcgcatatacggatactgccgcatacaccgccgcgatgaagtcgtccgaaataagcgtcatcggcaagatccacgaaaaagctgccgagctttcgtcgatcgagggcttctcgatcgatgccgtaccgaacttcacggtcggtccgttcaatctttcgactaccccgaaattcgcaatatccgacggcggctggcattgggattggctcattctcatcccgatcgtaacgctagtcataatgtatctgacccagaagataacccgcaaattcatgtaccagcctccggaggctcaggatcagcagaacgcgatgtccatgaagatcatgaacctcacgatgccgcttttctccgcgtacattgcgtatatatggccggcggctatcggtatctattggataatccgcaatatttatcaggtaattcagcagatcgcaatcgcaaagatcatgcccccgccgaagttcaccgaagaggattacagggcggcggagcgtgagtttgcgggaaaagcccccaagaaggtcaagaagagcgaaagagcgggaacggtgcgttcgctgcaccatatagacgacgatgacgacgacagcgctgccgtacaggctcctgcggcaaaggagaacagcggttctcccgattctcacgtcggaaaatccccgctgaaggacgaaaacgacagaaaaaaagctacagagcaggaagatgagtccgaagatgagtaa

SEQ ID NO: 642 - DNA, 1749 bp, Unknown
  Unknown gut bacteria
atgggtacatacaaggctcagtttatttccatgataatcatgatcgccttgggaatagggatatttatcggattcaacatagaatggtacagcctcgaaaaaaataccgacagctttcttcgggagacgaactttgcagattacagaatcgtttccgaaagcggattttcggcggatgatgtgcagaacgtgctttccgtcgacggcgtgaaagcatcatcgcgctttatttcggtgaatgccgacgtcaaggagagggacggcgattcggtcgcgctgaccgttaccgaaaatccggatgtttcatcgtttattacggttgacggcgacggatacgacccggacagcacggacgggatctgggtttcgaagaaatacgcagatgcaaacggcattgccgtcggcgatacactcacgttcgtttacagaaacgcggagatcaccggaaaggtccgcggacttataagagccggtgaatacctcatatgcgtgcgggacgaaacgcagcttatgcccgatcccgatacatacggctttgcgtatatctctcccgcgatgatgaaggatgccctcggattcgaattctatccgcagataaatgtcatttcggatacggaaaagaaggatttctgcgagagaatcgacagcgcattcggaaagacgatgctcattctttcgaaggatgagaacatatcttattccggcgcatcgggtgaggctgaggaaggaaagaccatgagcacggtccttccggtaatgtttcttcttattgcggttctcacgatggtgactacgatgcaccgccttgccgccaaggagaaaacacagatcggaacgctgaaggcgctcggcttcaagaatcggcgaatccttgctcactacacgtcgtatgccctgatgatcggacttgtcggctccgcgttcggaattgcgttcggcttcggagtagcgtatttcattatgaacccgaacggctcgatgggcacatatctcgatatgccgtcgtggaagctttcgcttccgtggttctgctggatcgtccttgtcggcataatcgcgctgcttacggtgatcggattcctttccgtgcgaaagatgcttgccggatgcgcggcggactcgcttcgcccgtatacccctaaaaaggtaaaacagctgcggatcgagaaaacggcattcttccaccgcctcggcttcggtattcgctggaatctgcgcgacatcatgcgtcataaatcgagaactctcatgactctcataggcattgtcggatgcatgataatagtcgtcggatcggtcggtatgcgagacacgatgaacgaatttctcgatgtttattatgacggcgcgacaaattacgcttcacgcatctgtctgagcgaggacgcgacggatgaagagcgcagcgctctttgcgagaagtacggcggagatacgagcgcgtcggtcagcgtacagcttgaagaaaaggcgctgtctctcgatatttacaaaataactcacgatacggtccgtttcccttcggtgaagaaaggatacacctcacttgaaaacgacggcgcttacatatgtatgcgtattgcggatgaatttgatcttgccgcgggcgatacctttaccgtaagtccttacggctcggacgaagaatattcgatgaaggtaaacggaatcatccaatcggtatccgaaagtatcgtgatcaccgatgagtatgccgagagcctcggaatcccccgcacggcggattcg

SEQ ID NO: 643 - DNA, 2421 bp, Unknown
  Unknown gut bacteria
atgattgaacgcagatatattgacctgaaacatgagcttttcgatatttactacgggaaactcaacgacatgcagagagagagcgtatattcggtaaacggtccgaatcttattcttgccggagccggaagcggaaaaacgacggtcctcgtaaaccgcataacccacataatccgttacggcaacggttacgccgtgaattttattccggacgatctcaccgaagaaaccatcgccgaaatggaacgggcgaaaagcctgcctcacgacgagctcggcaaatttctcgaaagattctcatacgatgcgccgagtccgtggtcggtgatggcaataaccttcacgaacaaggctgcaaatgagatcaaggccagactttacgcagcattcggcgaaggctcggaagcagcatacgaagtatgggcgggaacattccactcgatatgcatgaggcttctgcgccgctacggagaagccgtcggatacacaagcgatgccggaatatgcgacaccgacgatgcgaaaaagctgatcaccgactgcatgaaaaagctcaacatcgacacaaaacagcttccggtaaaatcggtcatgtcggcaataagccgtgcaaaggacaatcttatgaccgcggcggacttctcaaaggaaaccggaaacgatttcaagctcaagcagatcgcaagaatttacgaaatgtattcggcgcgtcttctcgaatcgaatcttctcgacttcgacgatatcatcatgcagaccgtatttatgcttcggttcaacgacgaaatacggagaaagctgcagaatcgattccgctatgttcttgtcgatgagttccaagacacaaacgtagctcagcttgagctcacgatgctcctatcgggcggatacgacaacatcatggtcgtcggagatgacgatcagagcatatacaagttccgcggtgcgacgattgaaaacattctttcgttcgaccggaaatacgaaaatgtcaccgttatccgtttggaacagaactaccgatcgacaaagaacattctcgatgcggcaaatgcggtcataaagaaaaacgaaggacgtcatgcgaaaaatctctggtgcgacggcgcaaaaggagacgagatttcccttgtccggcttcagaatcagcttgacgaggcaaaatacatatgcgataccataacggatgccgtatcctcgggaaggtactcttacagggattttgcaattctgtaccgaatgaactcgcagtcacggacgctcgagcaggcaatggcaaagggcggcgttccctatcggcttctcggcggtacgcgcttcttcgaccgggcggaaatccgtgatatggtcgcatatctctgcgttataaacaatccctccgacagcatacatttgcggagaatcgcaaatgtgccgaaaagaggaatcggcgagcgttctctcgaaaacgctgaaatgcttgcgtcgtctctcggaatatcgatgctcgagcttatgagaaatgcctcgcactatgaagcgctgcctaccgccgccgctcactcgatggaggagtttgcgaaaatgatcgcggatttccgcgtgatggctgacgagggcaacatttcggagcttattcgccgtgtatacgaggatacaggatacgaaaaaatgctggaagcagcaggtgaggcggaagcagatcggatcgacaacgtcggagagcttgtttccaccgcagtgcagtatgaggaaaatgcggacgaaccttccctttccgaattccttcttgatgttgcgttggtttcggatgtcgataaatacgacgaaagcgcagatgccgttgtccttatgacgatccacagtgccaaagggcttgaattccccgtcgtatttcttcccggacttgaggaaggaattttccctggatatcagtcgatattcaatcccgaagacattgaagaggagcggcgcctctgctatgttgcaatcacacgcgcgaaggaaaaggtgtatctgcttcacgttcacgaaagaatgctgaacggctccactcagtacaacaaggtctctcgcttcgtcgaggagattcctccggagcttatagacgagcaggacaagaccgggcgctccggtcggatcatgtccttcggcgatgaaaaggaaatgcattcgctcaaggtcagacagaacaggaattctcccctcggaacgtctccggcgcgcattaacgcggaaaagaatctcggcataataaagaaagaaaacaagccgaagccttcggctttcgccgtcggaaacagggtgcgccatgtgacgttcggcccgggaaccgtactgtccgtcaagccgatgggcggagacataatgtacgaaatagatttcgacaaggtcggaacgaaaaagctcatggcgacatttgcaaggctcaccgccgaataa

SEQ ID NO: 644 - DNA, 1545 bp, Unknown
  Unknown gut bacteria
atgaaagaaaataaagtcgcagagcagctcactgcggataataaaaacacatcggtgcttctcgaaatgcaggatatcgaaaaagcatttccgggagtaaaagcacttgataaggtaaatcttacggttaaagccggtaccgtccatgcccttatgggagaaaacggcgcgggaaagtctacgctcatgaaatgtcttttcggagtttatacaaaggacgccggcaagatatttctcgaaggacgggagatcaacttcaaaaattcaaaggaagcactcgaaaacggcgttgcgatggtgcatcaggagctcaatcaggcactgaagcgcaacgtcatggacaatatgtggctcggccgttttcctactgttgcaaaggggcttccgatcacaagcgaaagaaagatgtacgatgcgacaaagcagattttcgataaactcgggatcaatgtcgacccgagaaccgtgatgagtaaaatgcctgtgtcgcagaggcagatggtcgaaattgcgaaagcggtttcttataatgctaaggttatagttttcgatgagcctacgtcgtccctgaccgaggatgaggtggcgcatctcttcagaataataaatatgctgcgcgatcagggctgcgctatagtatacatttcccataagatgaaggagatcctcgagatatccgatgaggtcacgataatgcgcgacggaaaatggatagccacaagggaatcgaaggatcttacgacaaacgagatcataaagcttatggtcggacgcgagctgaccaacctttatcctccaaaatcaaatgtgccgggcgacgtgctgcttgaggtcgacgaccttagcgcggagtactccaaactcagagacgtatccttcaaagcacatcgcggagagataatcggtgtcgcgggacttgacggctccgggcgcacagagcttcttgaaaatattttcggtacggcgacacgaaggagcggcacgctgacgcttgacggaaagcgtataaagaacagaagtgcaagggaatcgataaaaaacggttttgcacttctcaccgaggaaagacgcgcgacgggaattttcggtattctgaatatccgcgacaacgcaacgatttcgagcctcggaaagtgcagtagcggaccgtttctcagtaaaaagaaaatgaaaaaaagcaccgattggtgcataaaggcgatgaacgtaaagactccgaatcaggagactaaaatacgttctctctccggcggaaatcaacagaaggtcattctcgggcgttggctgctcaccgatccgacggtgctgcttctcgacgaacccacgagaggaatagacgtcggggcaaaatatgagatatatcagcttatcattgaccttgccgcaaggggcaaaacagtcataatggtttcgtcggagatgccggaacttctcggtgtgtgcgaccggatacttgtaatgtccggaggacggcttgccggtgaagtcgatgcgaaaacggcgacccaggaagacattatgacacttgcagcgcaatatgcgtga

SEQ ID NO: 645 - DNA, 1560 bp, Unknown
  Unknown gut bacteria
atgaaggtcatagaatatctgaagaaatttttctcgaacatggcgttcatgttcaggcgcacatggaaatatgccaaaagcaaatattttttgatgatcctcgattcggtgaaatctacggtgcagccgttcgtgcttctcataattccgaaatatattctcgacgagcttgcctccgagcgcagagtggatgtcactctgcgatacatagcctattacgctgccgccgtagtgggcttcaatctgatctcgctcataataagcaggttcggctcggatcagagcatgaaaatagatcaccgcgtagccatggatcagcacacgaaatggcttcacatggattacgacaaattcgagaacggaagagtccgcgatctcgaggcacgttccgtctcggcggcggagcctcggaatttcgccgaggataaggtactcggctttatctcgaacctgattcgcctcggcggatatacctacataatcatgtcacttcacccgataatgatcctcttcattctcacggtcatcgccgcaaacacgcttatcgcaaggcgcagtgccaagctcggctacgaatacaccacggcaatgactcgtctgtctcgccgcttcaactacatattccgcacaatggtagatttcaaagtcggcaaggacgtgcgcataaacggtgccgacagctggctgaaaagtaaatttgaaaaggaatccgaggaatacattcgggatcaccgcgcgcagcagagaaagctgctcggcataaacacgctctccgacataataggactcatacagaccgtagtgatgtacggatactgcggataccttgcgatctcaggcgggatcacggtcggatcgtttacggtgttcctcggcgcactaaccgcgttcaccggaaccttcaacgaattcgttaaacgcttccccgcgctcggactgctctcgaaatacatcgacgactacagggaattcctgcgctgcgcggagcatgagggaaaggagcttgaaacctccgacatctccgcgcttcccgagcactgcgacattgaattcgtaaacgtatccttcaaatatccggacaccgaccgctacgtccttaaaaacataaacattaagataaaagcgggggagcggctgtcgatcgtcggctacaacggtgccggcaaatctacatttataaagctgctatgccggttctacaagcccaccgagggaaaaattctgctcggcggagtcgatatttcgacctacccactccccgaataccgccggcggctcgccgtggtgttccaggattatcagcttttttacatgtctgtcagatacaatatcgtcctcaacctcgaagaggacccggagcgcgtgagaaaagcgctcgccgaaagcggtatcctcgaaaagatcgaagggctggagaacggaatcgacacctcctacggtcggatcctgtactaccattcgcgcgacttctccggcggcgagacgcagaaaatcgcctgtgcaagagcgtactacagggattcgccgatcgtcatcctcgacgagccgacctcggcgctc

SEQ ID NO: 646 - DNA, 1044 bp, Unknown
  Unknown gut bacteria
atgataaaaaagctgctgtcgttcacgcttgccgcgctgaccgccgcaagtgtatcgtcatcactcgcgtcattcggcacggcgaatgtccgatcgcttctcaaggaagattcgcttgtcgtttatgacgaggacctcggatatctcaagggaatcttccccgacaccgcggtaaaggctttcaagtcaaactttatctccgacatcaccgtgaaagatgcctccggcaatgccgcatccgacgatgctccggtcggcaccgatttcgccgtaaccgccgacggtgcggagttcaagacccttgtgtacggcgatgtaaaccgtgacggaaaggttgacaccaaagacgttatcttcatgatccgcaagtcgatcggctgggacatcgacgcaaacatgaccgcgttcgacgtaaaccgcgacggaacgcaaaactccaaagacataatcaccgttatccgcaagctcgtcggatggaatctcgagctcggatattctccgttccgtgctgacacatcaaaaatcaacgctcccaacgaggatgagtctctgcttctcaccttcggaggcaataccgagaaactcaacgccgaagccgacaccgcgaacggcagatactcctacgtcatggagcttgccgggaacgaagcggaattctgccaggcttatcttgcggcaaaagcggatcgcgagggacttaatatttcgatttccgcctttgcggatgcggacggcaacattctcgaatccgagatgctccgcgaagaatactacaccgttatcgattacggcgtggttcccgagtctctgcctccggtggcaaagaactttaagatttccgcggacaggcagcagggatttttcatccgcgtgacctcggcggagaatcagaagccggggctttaccgcgcgcttctcagcgtgaccgacgcggacggcaagaccgtcaagaatgcgtatgtctacgcaaaagtgtgggatttctcacttcccgtcgaaacctcctgcaagaccgcgttcggaatgagcgcatacaccatctat

SEQ ID NO: 647 - DNA, 564 bp, Unknown
  Unknown gut bacteria
atgcacaagacacttatggacagggacatagaaagggtactcctttcggacagcgaaatacaaacgatcgtcaagaggatcgccgcggagattgaccgcgactatgccgcagaggattcaaagcttctgcttctctgcattctgaaaggcagcgtcgtatttacgggagacctcatgaaagcgctttccatacccgccgagatcgatttcatgaaggtctcgtcatacggagccggtacaaagtcgtccggccgcgtcaatatcattctcgatctcaacagaagcgatctcgccgactgcgatatccttgttgtggaggacatcatagacagcggacgcactcttgcatatcttgcggaatatctgcggataaacggtgcaaaatccgtaaagacctgcaccatgctcgacaagccttcgcgccgcgaggtggatttcactccggactacatcggagcggaaattccggatgaatttgtagtcggttacggtctcgattacaatgaaagataccgttctctcccctatgtcggagttctgagaccggagatatacgaaaaataa

SEQ ID NO: 648 - DNA, 825 bp, Unknown
  Unknown gut bacteria
atgctctgcacagtatttgcatcatgcacaggcaaatcctccgatgatctcgcagataaggaccccggaaaacctgcggtatccggaaacgacaccgcagcaaacaccgacgacaacaccggcgatgcttcttcggatctcgcatacatcaccggaaagaaaaagcttgtcatcggtattacggaatacaagccgatgaactatcaggaagacggtgagtggaccggattcgacacggagtttgcaaaagcgttctgcgaaaagctcggtgttgaagcggagttcctcccgattgagtgggacagccgcttcacggagctcaagtccaaggcaatcgactgcatctggaacggaatgaccatcagcgaagacgcaacgaaaaacaccagcgtatcaaaggcatatgtaaagaacgctcaagtcgttgtaatgaaggcagacaaggccggtgagtacacccgtgttgaagatctttccaagctcacctttgctgctgaaaacggaagtgcgggcgaggctgcactcaaagagctttcctacaacaccaccggcgttactgctcagagcgacgccctcatggaagtcgcatcaggaagcaccgacgcatgcgttatcgacataactatggcaaatgcgatgaccggcgaaggcacaagctacaaggatcttgcgatcgcctgcgagcttaccagcgaggaatacggtgtatccttcagaaccggttccgacatggttgagaagttcaacgaagtcctcgacgagttcctcgccgacggaacactcgacagacttgccgaaaagtattcactcactcttgtgaaataa

SEQ ID NO: 649 - DNA, 1305 bp, Unknown
  Unknown gut bacteria
aaggtcctcaaattcggcggctcatctcttgcggatgcggagcattttcttcaggtgaaaaaaatcgttgaagcggaagaggcgcggcgctatgtcgtaccctcggcaccgggcagacgctttcccggagacgacaaggtgacagaccttctgtactcctgctacgatgcggtccgttcgggcgaggacatcgatcccgtgttcgaccgaataacagaacgctatacggcgatcatcgacggactcgggattgacctcgacctgtcttccgaattcgaccaaatcagaaattcgatcacgcatcatgcaggacgcgactatgcggcaagccgcggtgaatatctcaacggaatcattctcgcaaagcttctcgggtacgatttcatagatgccgcgtatgtcatctatttcagggaaaacggaagcttcgacgacgaaggcacaaacgaagtgctgaaagagcttctcaagaagcacacccacgccgtcattcccggattctacggttcaatgccgaacggcacggtcaagaccttctcgcgcggcggatcggacatcacgggctccgtagtcgcacgcgcagccggcgccgatctctacgagaatttcaccgatgtgtccggattcttcatgaccgatccgcgcatcgtggaaaatccgcgccgcatcgatgtcatcacctatgccgagctgcgcgagctttcatacatgggcgcaatggtattccacgaggacgcgatcttccccgtacggcgcgaagggatcccgataaacatcagaaacaccaacgagccgtccgatcccggaacgatgatcgtggcatcctccgacacatacgaggattcggtgatcaccggaatcgcgggcaaaaagggcttttcgataatcaacgttgaaaaggacatgatgaacgcggagatcggcttcggcaggcgtgtgcttgaagcgatcgagaactgcggtctctgctttgagcatcttccctccgggatcgacacgatgagcgtcctcatatcaaccgcggacatcactcccgtcaaggaccgcgtgcttgattcaatacagaaatcggtcacgcccgatcttctctcgttcgaggacggtctcgcgctgattgcggtcgtcggacgcggaatggtaaaggcaaagggtaccgcggcgcgcatattcaacgcaatggcaagcgcggggatcaacatccgcatgatcgatcaggggtcgtcggagctcaatatcgtggtcggagttgacgagcacgactttgaagaggctatacgggcaatatacgccgaattcacgaaataa

SEQ ID NO: 650 - DNA, 1956 bp, Unknown
  Unknown gut bacteria
gcctgcgaccgcctcggcaaggttcccgaaggaaacaccgtatgcgactacgacgccgaagagataaagcgcggcttttccgtcggactttcgatcgcgtcgttcccctggaacaccgtcaagatcaatctgctcgacacccccggcacgcttgatttcgagggtgaagtgagaagcggcatccgtgccgcagacgctgccgtcatcgtcatcgacggcaaatccggcgtcgaggtaggcgccgagctcgcgtgggatctcgccacggaggcaaaggttccccgcgcattcttcatcaacaaatacgacgacgccgaagcaagcttcgagcgtgtattcaacgcactgcgcgaccgtttcgggatccagctttgtccggctctcgttccggtcaagagaaacggaaaattcgagctcattgatctcgtatcgatgaagctttacaacttcgatgagaagggcacgcgaagcgaagccgagctcaccgaggaatacataaagatcgccgacaagtacaaggacgctctcaacgaggcgatcgcaggaacgaatgacgagctcatggagaaatacttcgcgggtgaggagatctccaccgaggagagcactctcgcgctccatgagggcataatctccggcgacatcgttcccgtttactgcggaagcgcggctaagctctggggcatccgcgcactgctcgacgcgattgaaggatcgttcccgcgccacaccgcgaagaaaaacgaaaccgtgatcgaggacggcgaagaaaagccgtatgcgatcgatcccgaaggcgaatgctccgtatttgtgttcaaaacggtatcggatcagttcggaaagcagacgtacttcaaggtaatgtcgggcacgctccgccgcgacatgacgctcaaaaattccgcgagcggaagcgaagaaaagatggctcatttctactcgccctgcggaaagaagcagaccgaatacgaagtgatgcacgccggcgacatcggcgttatatcgaagctcggacgcactgcgacgaacgacacgctttcgcagtccggcacgctcaccttcaggaagatcgatttcccggagccgtacatggcgaaatccgtcgtcgcatccggcaagggagacgaggacaaggtcgccgcgtcgatactgaagctgaccgacgaggatccgacgctgaaattcgaaaacaacgccgagacgaagcagatgctgatctacgggatgggcgatatgcagcttgacgtggcggtttcgcgcctgaagtcgcgctacggcgtgaccgtgcagaccggcgagcccgagatcgcttaccgcgagacgataaagaagcgcgtacaggtcgaaggaaagcacaagaagcagtccggcggttccggacagtacggacacgtcaagatcacgttctctcccggagaggcggaaggtctgaccttcacgcagagcgtcgtcggcggaaacgtgccgaagggatactaccccgcagtcgagaagggacttctcgaggctatgcaggagggtgttctcgcgggatatcccgtggtgaatctcgccgccgatctctacgacggatcgtatcatccggtcgattcgaacgagatctcgttcaagcttgccgcgcggcttgcgtacaaggaaggtctgccgaaggcggatccgatcctgctcgagcctgtcggaaagctcaacgtcaccgtgccggatgcgctcgtgggcgatgtgatcggcgacctcaacaagaggcgcggccgcgtgctcggtatgaatcccgccgaaggcaagagcggattcaccgtagtcgaggcggacgttccgaagtcggagatgacggattacgttatcgcactgcgcgcaatgtcgcagggacgcgcgcgctttacgttcaaggtggagcgctatgaggaagtgcccggaaacatcgcgcagaagataatcgccgcccgcgcgaaataa

SEQ ID NO: 651 - DNA, 1194 bp, Unknown
  Unknown gut bacteria
atgggaattttccgtatctacggcaaaaatcgtctcagttgcgcatatcgcagccacgggttgacaaattgcccgcctccctttattgcccgcaacggcaaaaaagcgtatcattacggcagtaaacccgcccgcgaacaggcggcggaaaaggttaaacggaagggaacggtcacagcaatgatacttgcagacaaaatcatcaatcttcgtaaaaaggcgggctggtcacaggaggaccttgcggaaaagctcggagtttcgcgccaatccgtttcaaaatgggagggcgcacagtccgtacccgatatggacaaagttcttcggctgagccgcattttcggtgtttcaaccgattaccttcttaaagatgaaatcgaggaatgcgaaccttcctttcaatcctccgacgacagtgccgagcctccgcttcgcaccgtcacaatggaacaggcctctgcctatcttgagcttcgccgtgtttccgcgccgcgaattgcgcttgcagcttttctttgcgttatttcgcccgcagctttgatttttcttgccgcaatgagcgacagtcgtgttattaatatcagcgaaaaccttgcctgcggcatcggtctttgtgccttgattctgcttgccgcaatcggtgtcctgctttttatgtcagccggcgcaaaggcaaaggaatatgaatttcttgaaaaagaaccgtttgaaacggaatacggcgtggccggtatgctgcgcgaacgcaaagctgcatttgcgcgcacctcctcaaggctcaatatcatcggaaccatgctctgcatactttcggtgattccgatttttgtttccgtctgctttgaaaatgcggattttgctcccgctgcggcggtaagtcttacgcttgttattgcgggcatcggcagtgccgcattcgtgcttgggggaacatataattctgccattgacaaacttctcgaagagggtgactacacccgcgtaaagaaggaaaagagcggactcgtaagccgcatatcttcctgctattggctgattgtgaccgcggtttatctgctgataacattcggcatcaagggcggcaatcccaaaacatcatgggtcatctggcccgttgcgggcgttatttttgccgcactttcggcttttttgaatgcgcttcccgctgcatcttcaaaacacggcaagaagtaa

SEQ ID NO: 652 - DNA, 1866 bp, Unknown
  Unknown gut bacteria
atgtcaaagattatcggtatcgaccttggtacgaccaattcctgtgttgctgtccttgaaggcggcgaacccgttgttatccccaatcccgaaggctcccgcacaactccctctgttgttgcgttcaaaaacggcgagcgtatggtgggtcaggttgcaaaacgtcaggctatcaccaaccccgacaacaccgtaagcagcattaagcgtgaaatgggcagcgattaccgccgcaccatcgaaggcaagtcctatactccgcaggaaatttccgcaatgattcttcagaagctgaaacaggatgcggaagcttatctcggcgaaaaagtcactgatgctgttattacagttcctgcttatttctccgacagtcagcgtcaggcaaccaaggacgcaggcaagattgcaggccttaatgttctccgtatcatcaacgaacccactgcggcggctcttgcatacggtatggataaggaaaacaaccagaagatcctgatttacgaccttggcggcggcacgttcgatgtttccatcctcgaaatcggcgacggcgtgtttgaagttcttgcaactgccggcaacaaccgtctcggcggcgatgatttcgacgatcgtcttatcaactatattgcagaggaatttaaaaagtcccacggaattgaccttcgcaacgaccgcatggcgaagcagaggcttaaagaagcagcagagaaggcaaagattgagctttccggcatggcttccgcaaacgtaaatcttcccttcatcacgatggatgcaaacggccccgttcatctcgatatgaacatcacacgtgcaaagttcaacgagcttatctccgatttgctcgacaaaacaaaaacttgcgtacagcaggcattgcatgatgcgggtcttaaaacttctcagattgataaggttatccttgtcggcggttcaacccgtgttcccgcagttcaggatcttgtaaagaacatcaccggcaaagaacccttcaagggcattaatcccgatgaatgtgttgcaatcggtgctgcaattcagggcggtgtcctcggcggcgaagtcaaagacgttcttcttctcgacgtaacgcccttgagcctcggcattgagaccctcggcggcgtattcacgaagcttattgaccgcaacaccaccatccccaccaagaagagccaggtattctcaactgcggcggacggtcagaccagcgttgaaatccatgttcttcagggcgagcgtgagatggcacagtacaacaagagcctcggcaagttccagcttacaggtattgcacccgctcccaggggtgtgcctcagatcgaagtcagctttgatatcgatgcaaacggcatcgttcatgtaaccgcaaaggatctcggcacgggcaatgaacagaacatcaccatcactgcctccaccaacctgtccgaggatgaaatcaaccgcgcagtcaaagaggctgagcagttcgcaaacgaggataagaagcgcaaggatgaagttgaaacccgcaaccatgccgacactctggtatatgaaaccgaaaagaccatgaaggaactcggtgacaagattgcagagagcgataagtccagaatcaacgccgaagttgaaaatgttaaatctgctctcaacggcagcgattccgaggcgatcaaagctgcaaccgaaaagctgacagaggtatcctatgaagttttcggcaagatttatcagcagcaggctcagcagaacggcggtgcggcgggctttgatcccaacgcgggtgcagcgggcagcggcaacaacggcggcagcaacagcagcaacggcagcgatgacggcgttgttgatgcggattacgaggttgtagacaactga

SEQ ID NO: 653 - DNA, 897 bp, Unknown
  Unknown gut bacteria
gtgaacgtgtaccgaattattaccgatacttccgccaatcttgagcttgagcttttggagcggaagggtattgcggagataccgttttcattcagtataccggaaaaaggcggcgaggcgctgtactgtccggatttttcggcttttgattccaaagcattttatgatgcaatgcgcagcggaacaagagtcacaacctcccaaataacgcccgctcaatatactgaaaaaatgcgtcccttgcttgaagcggggcaggatattctttttatcggcatgtcatccggcgtgagcggatcatttcaggccggaatggtggcggctgctcagctgcgcgccgaatttcccgaacggagcattgagcttatcgacactctcggagcctcactcggggaagggcttgttgttctgcgtgcggcggaactccgcgattcgggaattgccctttctgcggcggtgcacctgctttcggactatcgcgacaggatgtgtcaggttttcacggttgacaacctcaaatatctctgttcgacgggcaggctttcgaatgcaaaggctgcaatcggcaacattttgaatatcaaaccccttttgaagggcgacagcgagggaaaaatcgtcaatttcggcaaagttcgcggaaggaaaaactccctgcgcgcaattgcggaacaatatcgcgaatacgttgttgacgctgcaaaccaaacagtcggcatcgcacatgcggactgcattgaagatgcaaacactcttgcggagcttatatcagaaattgctccgccgaaggatattttaaccgttatgtacgaacctgtgacgggttcccatgtcggtccggggacactggcattgttttttgtcggcaaaaaaggcttcagacaggcaaagagctga

SEQ ID NO: 654 - DNA, 1896 bp, Unknown
  Unknown gut bacteria
atggacaaaagaacaaaaaaagaaattcaatccaaacccggcgcaaaaaaaacaccgaaaccgaagtacaatctttggcagaacacgggattcatgctgcgcacatcccgaaagtacgcaaagagtgttttcccgctctgcatcgtgcttgcattgctcagtgcgggcaaaagcattgccgaactgcttattgcacctgcaattctgaacaaaatcgagctttccgcatccctcggcagtgttgttttcacaattgcggcatttgccttggtgctcatgctgctttccgggcttcggtcctatgttgatacgaatgcgctgttcggaagaatcgccgttcggagccagggaatctatctcagcatttcccgcaaatatgccgaaacatcctatccgaaccttttgaacacggattttcttgccctcggagaaaaggcaagtgctgcctgcgccggcaactcagagtcatccgaagccatctggacgactcttacggatctgatgacgtcatgtatcggctttatcgtttatcttgctttgctgacgaaccttaacctttggcttgccgcacttgttgccgcaacaacggctgtcagctattttgcaagcaaacgaatcaacgaatggggctatctccatcgcagcgaagagcttgagcttacaaaaagaatcgaatacgcaaacaaaaccgcaacatcgcgcgagtttgctaaggatatccgcatgttcggcctgcgcggctggctggaagatctttggggcagcacaatgcgcctgtacagtgcgttttgtgcaaagcgcgagcgcaaatatatttgggcaaatatcattgatatcgttctgacttttttgcgcaacggcatcgcttatgcgtttcttatcggaatcaccgtcaaaaacggattgcctgcctcccaatttcttctgtactttgctgcactgagcggctttgcacagtgggtcgttgagattcttgataagctttccgtaatgcacaagcagagccttgatatttccacgattcgcgaatttcttgattgggacgagcctttcgaccttaacggcggcgaaagaatcgcttttgaaccgaacaagcaatacgaaatcaggcttgatgatgtttccttccgctatccgaaggcggataaagacacgctctctcacattaatctgaccgttcatccgggtgaaaagcttgcaattgtcggccttaacggcgcaggcaaaacaacgctcgtgaagcttgtgtgcggttttcttgacccgaccgaaggacgcatactgcttaacggagaagatatccgcaagtttaaccgcaacgactattacgcgctcttttcggcggttttccaggaattctccgtgcttgacgtcaccgttaaggaaaacgttgcccaatgtgttgacggaatcgatgaagcccgcgtttggcagtgcattgataaggcaggtctgaccgaaaaaattaagtccctccccaagggcattgaaacgcatctcggcaggcgtgtgtttaaggacggagttgagttttccggcgggcagacgcagaggctcatgcttgcaagggcattgtataaaaacgcaccgatactcgtgcttgacgaacctaccgctgcacttgacccgattgcagaaaatgacatctatcaaaaatacaatgatatgacgcacggacgaacctcgttcttcatctctcaccgccttgcctcaacgcgtttttgcgacagaatcatttttgttgacggcggaaaaattgcagaggaaggcacacatgacgagcttttgaaaaacggcggaggctatgcctatctgtttgaagttcaaagcaagtactaccgcagtgataatcaggacggcacgtcagacggttctcccgacgccgcaatcaaatga

SEQ ID NO: 655 - DNA, 1764 bp, Unknown
  Unknown gut bacteria
atggattccatggtgaatcattacacgagtgcaaagaaaccgcgaagcgaagacgcctacacgcccggcggcaagcgcgggaagcgacccgatcgtgccgttaatgtttactgtaaatgtatccgtaatatctacagagatattcctatcgttatcggcggcattgaagcgagcctccgccgctttgctcattacgattattgggacaaccgtgttttaccttccgttcttgtatcctcgggtgcggatctgttgatttacggcatgggtgaacgccagattatcgacattgcggaggctttggacggcggcattgctgcacgggatattacctatgttaagggaactgcatattgggcggataacctctcgcgcgtgtatgagtacgcgcttattgacagctttgaaaaagtatcaaacgacaaaaaagcttactgtgctgcgtttatgacgcaataccgtgaacaggatgcgataagcggcgcaacgcttgttcagccgcacgggagcggatttgttgttgtgaactcacccgccatgccgctttcacgcaacgagttggatgctgtttacgatcttccttatacacgccttccccatccttcctacactgagcatattcccgctttggatgaggttcgcttttcccttgtcagctgccgcggctgctacggccaatgtgcgttttgtgcgcttactttccaccagggacgcgtcattcaatcccgaagccacgaatcgctgattgccgaagccaagcttatgaccaaaatgcccgaattcaagggctatattcacgatgtcggagggccaacggcgaattttcgtcagcctgcatgtaaaaaacagcttacgaagggtgtatgtaaagaccgaacctgtttgggatattcaccttgcaaaaacgttgaagtcagccatacggattacgttgaacttctgcgcaagctccgcagactggacggtgtgaatcgtgtgttcatccgttcaggtattcgttacgattacctgatgtacgataaagatgaaacattttttaaggaacttattaaatatcatataagcggacaacttaaggttgcgcccgagcatatcgatgatcacgtgcttgagatgatgggcaagcccggcggtgaactgtaccaacgctttgttcgaagatataagcagcttaatgatgctctcggaatgaaccaatacattgttccgtacttcatgtcaagccatccgggcagcactttaaactctgcaatcgcacttgcagaatacctgaaggcgagcgggcagcggccggagcaggttcaggatttttatcccactcccggcactctttccacctgcatgttctatacgggacttgacccgcgaacaatgaagccggtttatgttcccgtttcgcccgaggaaaaagcaatgcagcgcgccctcatgcagttcttcattccaaagaatcggcctctcgtccgaaaagctctcaggcttgcagacagggatgatctcatcggcagcggcaggaactgtctcgtgccggatgtgtatcaaagcccgacacacagcggaggctcttcctctgcgacaaaaagcaatcaccgttcgcagtatggagcgacggaacattcggcaatcaaacggaaagatgcgcggctgaatacccgtttcggttccgttgaacagagccgcagcaatggaccgaacagaggtgttcaaggcaaaaaaacggttaaaacatccgataagcgttcaggcgtaaagaagcatcgctga

SEQ ID NO: 656 - DNA, 765 bp, Unknown
  Unknown gut bacteria
atgcaatttgacagaataatttccgtccgcaacaacagaaccgtttttcgagacggagaactctgcataaaagtgttggaagatgactttcccgcttcttttgtgctctccgaagcaacaaacatggtcgccgccgccgaagccgggctgaatgttcccaagctgcgtgaagtcaatttgcacggcaacaaacgcctcattacctatgactatatcgtcggaagtccgattttgtgcagcgacagggatgatgccgaattccgcgcgcagcggctgaacctgcttattgatgctcagctttcgataaacggtacacgctgccccgaatgcatccgcaatccgcgcacagtgccgaattttcgcagcacaggtactgcatgtacggcgcacgatgaaccgaacgcagcggatatcgttcaaattgcttttaacagcggtaaacatgcggcttttgccggggatatgctttgtcacggcagccttgcgcccgaaaatgtcattttatcttcaggcggcgagctttatattatcgactgggcgtacgcttactcgggaactccggaatccgatgctgcaatatgctgccttatgctttggctcacatgcggagaacaaacggcacgcgaatatttcaagctctatctaaagcgtaacggatcctgctcttccgatgcaattacgacacttttgccgtttgcggcatccatgctttataaccgtgaaaatgcagccggaaagaaactgctgctttcaataatgaagtaa

SEQ ID NO: 657 - DNA, 1095 bp, Unknown
  Unknown gut bacteria
atgaaatacgatcgtgtttataacttctccgcaggcccctccatcctccccgttgaggttcttgagagcgtgcgcgacaaccttctcaactatgaaggcagcggcatgtgcgtcatggagatgagccacaggtccaaggttttccagcagatcatcgacgaagccgaacaggatctgcgcgaccttatgaacattcccgataactacaaggtcatgttcattcagggcggtgcaacgcttcagtttgcaatgctgcccatgaaccttatgaaaaacggcgttgctgactatatcgtaaccggcaactggtccaaaaaggcatataacgaagcaaagaaatacggcaagatcaaccttgttgcaaccagcgaggatcgcaattacagctacatccccgattgttccgatcttcccatcagcgaggatgcggattatgtttacatctgcgaaaacgagacgattcacggaaccacataccagactcttcccaacaccaagggcaagattcttgtttccgaccagagctcaatgttcctttcaaagccctgcaatgtttccgattacggcgttatctacggcggcgcacagaagaacatcggcccggcaggcatggtaatcgtaatcatgcgtgaagacctcatccgtgaggatctgccccagttcgttcccacctacatgagctatgccacccatgcaaacaacggctcaatgtacaacacccccaactgctggagcatttacgtctgcggtcaggtattcaagtacctcaagagaatcggcggccttgaagtcatggcaaagatgaacgaagaaaaggcaaagatcctttacgacttccttgatgagtccaagatgttccgcggcacggttgaaaaggaattccgctctctcatgaacgttccctttgtaactgcttccaaggaaacggatgcggaagttgttgccgcaaccaaggcagcgggctttgacaacctcaagggccacaagagcgtcggcggtctccgtgcctccatctacaacgcaatgcccaaggaaggcgttgttgctcttgttgatttcctccgcaaatacgagcaggagaattacaagggctga

SEQ ID NO: 658 - DNA, 2145 bp, Unknown
  Unknown gut bacteria
atggcagagacattggttatcgtggaatcgccgtccaaagcgaagacgattgaaaagtatctcggctcaaaatacagggtcattgcatcgaacgggcatgttcgcgatttgccgaaaagccagctcggtgttgatgttgaacacgactttgaacccaaatatattacccttcgcggaagaggcgaagttatcgaaaaaatacgcaaagaagcaaagcacgcaaagcatatcgtgcttgcaaccgaccctgatcgcgagggagaagcgatttcgtggcatcttgcaaaaatgctgaagctggatgaaaacgagccctgtcgtgttgtgtttaacgaaatcacaaagacagtcattcaaaaggcggtcaaaaatccgcgctgcattgacagaaaccttgttgatgcgcagcaggcgcggcgcgtgcttgaccgtttgctcggctacaaaatcagcccgctgctttgggcaaaggttcgaagaggactttcggcgggccgtgtgcagtcggttacgacaaaactcatctgcgacagagagcgcgagatacttgatttcgtgccgaaagagtattggaccgtcacagtaaaacttcatcttgccaagcgtacattcgaagccaaattctatggttttgacggcaaaaagacggagcttcagacggaagccgatgcaatgcgcgttgcggatttgtccaccggagcggtttattgcgttgcggacatcaaaaccgcaaaaaaaacacgtcatgcgcccgcaccgtacacaacgagcagcatgcttcaggatgcatcgaaccgcgcttcaatgccgccgaagcgaaccatgctttgcgctcagcagctctatgagggcgttgatatcggcaccaagggcagcgttggtttgattacgtatatgcgtacggattcggttcgaatttccgccgaagcgcagcagagtgcgagagaatacattgcgacagcgttcggcgcagcttacgtgccggaaaagcccaatgtttttaagggcagagcgggttcccaggatgcgcacgaggcaattcgtccgaccgatgtaaaaaacacgcccgcatcggtgaaacagtatctcgaaccggggcagtataaactttacaaactgatttacgaacgtttccttgcgagccagatgagtgatgcgctttacgaaacttcaactgttacgcttgaaacgcagactcagccgaaatgcacatatcgaaccaacagttcaaaaaaaatctttgacggattcacggcggtttattccgtttcgaacccgtcgcaggatgacggcataggcgaaaaggacacgacccttcccgctatggaagtcggcagtgaacctaagtttgtttctctgaacccgaagcagaactttaccgaaccgccttcaagatacaccgaagcatcccttgtgaaaactcttgaagagctgggaatcggcagaccgagcacgtattccccgacaatttcgacaattatcgacagagggtacgtagaaaaagaaaagaaacagcttgtgcccaccgatctcgggttcgttgtgaacaaagttatggaggataatttccgcaatattgttgacgtcaagttcacggcggatatggagtcacgattggactcagtggaagaaggcaaggaacgctggcaaaatctgattgaagatttctatcctccgtttgaagaatctcttgaagaggcattcaagaccgttgagcgtattgaaattcccgatgaggtttcggatatcccctgcgataaatgcggcgcaatgatggtatataaaacaggcagattcggaaggttccttgcctgcccgaattatccggagtgcaaaaacacaaagcccattgttgaaaaagtcggcgtgaaatgccccaaatgcggcggggaaataatcaagcgcaagggcaaaaaaggcagagcgttttacggctgcgagaattatccggagtgtgattacgtatcgtggtatctgccgacaggcaaaccgtgcccgcgctgcggaaggatgaccgtgtggaaaatgggcccgaacggacgctatattgtctgttccgaaaaggaatgcggctttgttgttccgagcggagagattaaaaacacttatcccgaccttgcggataaagcggaggcacgggactga

SEQ ID NO: 659 - DNA, 1503 bp, Unknown
  Unknown gut bacteria
atgaaacgggttttcactgcatcgatgcaccatgaatcaaattcgttcaatccgataattgcgggcgaaagcgaattttcggtcattcgcggggcggaaattttcaacagattcaaggaaaacgatgccgcaacgggaataatcaagaccctgcttgcggcaggatacgaggttgtgccttccgttttcacaagcgcggtgccgaacggtgaggttgatattgatttttataacaaaattaagaaagagattatcgaaaccgctgttgcggaaaacaaaaggcagccgcttgatgcggcggcacttgcattgcacggctcaatgtatattcacggtttgggcgatgcggagggctttcttctggaggagcttcgcgccgcgctgcccgaaattccgattttctgttcgctcgacacacatacaacaatgacgcagcgtatgcatgataatgccgacggatttgcggcatttaaatgcgcaccgcatacggacagatacgaaacgggtgttaaagcggctgagatgacgattgcagcccttgaacgcggagtgaaagcgaaatccgcttgggtgcgcgttcccttccttgttgcgggcgaaaaatcctcttcaacggtggaacccatgcgctcgcttgccgaaaaaacgagggcggcggagcgtgagccgggcattcttgcagcatcgtatttaatgggttttccgtggtgcgacaatgaaaacagctctgccgcagtgtacgtcacggcagaaaatcaggctcttgcggatgaatgcgcaattcgccttgccgaggagctgtgggcgcgccgcgatgatttttgctttcaaacggaaacatattccgaagcggaagctctggatgcggcattcgaaggggttcgaaccggcggtccgtttccgatttatctttcggattcgggggataacccgacagcaggttcaacatcggactgcacgggcttcctgcgccgcataatggaagatccacgtaccgacgagcttgaaacgcctgtggtattcggcggaatctacgacccggaagcaacccttctttgcagggacaaggtcgggcaggagctgacgctgactttcggagcaaagttcgacagaagctcttcggttccgattacggcaaagggaacggttctcgcctatatcaaaggctggaataaatttcacggagtcggcgatattgctcttttccgctcatgcggggttgatattgtgctgagcgaaaaccatatcggttacggcttgcctgccgtgttcggcgatttgggaaggaatcctgccgatatgcagattgtggtatgcaaactgggttatctcaccgcgcagcaggcagcatatgcaaaacgcagcattatggcactttcaaagggcagcacgaacgaagatttgacaagccttgattacaggcatattccgcgtccgatttttccgctggatacggattttttgttcgagcccgccgaaaaccttattcgcaaaacaaaataa

SEQ ID NO: 660 - DNA, 2061 bp, Unknown
  Unknown gut bacteria
atgagaagcacaaaaaagaaacctgacaacgttattgatatcagcggcaatgttgagcttgttatgaagcttgcggcggacaaactcgatgcgggcgatcatatcggcgctctttcgctgatgcggcgtgcggaaacaattgaacccgaaaacgaggaagttatgcttgcaatcgcgggaacatacaacgagatgaacaggttcaccgagtcgcttgcttattcctcgcgcgtcctgaattccggtcatgaatatgttcaggatgctttcatgattgcaggctacagctaccttggtctcggtgaatatgttgcggcgcgcaaagcgtacaggcagttcctgataaacgttccggacagctacactgatgaggacttgattgctgtttacgaggctcttgatatatgtgaggcgaattgtgctttgaacgagtcaagggaatcagttcctgccgttcgcgacagcagtgaggttgagcttgaagaaacactgaaacgcattgaagcagaggaggatcgcgtgaacggcgatatggcatacggacttctcagcgatgcaattgaaaaattcccggattcctatgaactgttcgaaaagtatcttttgagctgctatgctgtgatgcattttaaaaaaggtatcaaaaaatacgaggccgctcccgaaaaatggaaatcgagattaacgattcggtgctatgccgcgcttttgtacagcggagctcacaggccgcgcaaagcagccgagtgtgcagacaacatccttaaaatgaaagggttggatgaagaagagctgatgcgggcatccgccgtgatgctggaaattcaaaatgcttccgccgcgatgactctcgttaaaagggtctattcggagcacccgtacgatcaattggtaatccataactatgctctgtcagcctacctcagcggggattatgctcttgccagaactctctttgaaaaacagctgcgaatagatccgagtgacagtgttgctgcttattatcgcaaactgtgcataaaaacgcaggaggacggcattctgagaaacgtcagcataccctatgatgttccgagcggcgaactgttccgctgcatgaccgtgctttcgaacgaactcggaaatgaagatgcaggcaggatgttgaccgaaagcgaaccggagcttacacaagaggagattgaagagtgcgtacggtattgcgcagaaaaaactcctccgcccttccgtatcggcggattgatgcttttgtacgagcgtgaccgtcggtcggcgatgcatgagctttacaagattcttttggatccgagttgtgacgacagcgttcgcaggtttgcaatcatgactttccgcgataaagagaatatgacaaggttcacgatttttgataagggaaaactcttaacgggtgaactgttctcaaccgaaaatcaacccgacaaaacggatgacgaagaaaaagaggatgattgtccgcatttgcaggcaccgttcgggcggctgaatgcactcttgcagcaaaaactctgcaattgcagcaaaaaaatcaggcaggaagccgaaaatattgttgaagcggctgcggaactgtacaatgatttggggttggcattatccaattcgcaggttcctgcatatgcagcggcgattgattatacatgccgctttatgaacagcaaaagagcagttaatgcaaaaaaacttataaaggattatgatataactctgcgcaggttggaaaatgcggcggagaagcttcaaagcgatctttgcgtatacggaatgttcgagccggaagaaatgtgcaaacttgaagacagctttgaagaagcattcaaaaagcttcatgcagaggaaaaagcagcagcagaacggaaaaaggccggaaaaaccaagccgtcttcccgcaaaaacgccgacgccggctcaaacaaggcggatctcgcttcaaaaaaacggacaaattcgggaagaaagtctgataaagaagcaaaagatgattctgtgaacaaatccgaaagcgggtccgaaaacaacggcggcgcaccggatgcggaatga

SEQ ID NO: 661 - DNA, 1818 bp, Unknown
  Unknown gut bacteria
atgcggacaccgcgccccattaaaaaaacagaagaaaacaaggagaaaaaaatgaattcagaatggtcattggatgaactctataaaggctttgacgacccgaagttcgctgcggatcttgcaaaatacgacgaaatgattgcaaaaataaacgagtttgcagccaaaatttccgacatgcagccgctcgacgctctgaaaacctatattgccggcagcgaaagctcaatgcagcttttaaccgacatgtattcatatgccatgctgcgttcctccgtgaacacaaaggacaccgaggcggcaagcatcagcggcaggctcatggcaaagatgagtgcaacaacaaaggcggaaacgataatcaaaaagttcatttccgaaattccgaaccttgatgagcttatcgagtccgatcccgtgctgaaggaatacgaattcctgcttaaaaacatccgtgcggatcaaaaacataccatgagcgatgaatgcgaagaagtcgccgcactttacaacatcagcggggcaagcgcatggagcgatctgcacagctacctgacgtcatccgtgactgcggatttccgcggcgaaaagcttaccctttcttccgtgcgcaaccttgcatattccgctgacccggcggttcgaaaggaagcatacgaggcggaacttgcctgctatgagaaaattcgggattctgttgcattttcgctcaacagcatcaaacttgaagttatcaacaacgcacgtctgcgcgggtttgagtcgcctttggcacaaactttgtacaattcccgcatgacgcgcaaaacccttgatgcgctcatggcggcaatggacgaacatttggatattttccgccgctacctgaggctcaagggcgaagtcctgggtcataaaaacgggattccgtggtacgatatgtttgcgcccatgggtacaaacaccaaaaaatataccgttgaggaggcaaaggcatatctgctgaaaatcttccgcggctttgataatgaccttgcaaatatggttgagcgtgcgtttgatgaggcatggatcgatttctatccccgcgagggaaaggtcggcggtgcattctgcgcaaatctggacggacacaaccagagccgtgtgctgacgaattttgacggctcgttctccgacatcgtaacgctggcacatgaactcggtcatgcgttccataatctcaacatcgccgggcaccgtccgctgaacaacgattattcaatgcccgtcgcggaaacggcatccacgttcaacgagaacgttatcatgaacgccgccattgaagcagcggaaaccgatgaggagaaactcttccttatcgaaagccagcttcaggacgccgctcagataatgtgcgatatttactcacgctatctgttcgaaacttccgttttcgaaaaccgtgaaaatgatttcatgcccgcggacaggctttgcgaactgatgcttgatgcccagcgcagggcatacggcaacggacttgaccccgaaacgctgcatccgtacatgtggctctgcaaagggcattattacagtaccctctcgttctataatttcccgtatgctttcggcggactgtttgcaaggggactttatgaaaagtacatgcaggagggcgcggcatttgttcccgtttaccgcaagctgctctatgcaaccccggtatgcaccgttgaggataccgcaaaagttgccggaattgaccttacggataagaaattctgggaaaacagcatgctttcctacaggcacaatgttgacgaattcgaacggctttccaaaaaactgaataaataa

SEQ ID NO: 662 - DNA, 1770 bp, Unknown
  Unknown gut bacteria
atgctctttgcggctgcctgtaaattcggtgatattgacttcgatgtgacaaaagctccgcagcagcaaacacaggaacccacgcaggaaccggcgcatgaaaagacggcggcggacgaagcatttgaggccgtggatcgtgaagtttttatatctgtagttacttcatccgggctcacttttcatcaattcgtgaaggatgcggcaagtttcggcattgccgaagaggatattgaacgcggatggggtgagctttcgcaggaggctgatgctgccgattttgcggaaaacgccgaaatgcgcaaaaagctttccgaaatcgaccgaagtcagctgtcctacaggaacagaatcgcatacgacaaccttgttctcaatctgaagctttctgatgaaattcatgcggtacccgatgcatattattataatgaaccgcttacagtgttcaacggcgaacacacgatgcttccgctgatgctctcgatgtatgaaatcagctcggcggaggatgccgaaaattatgtgctcctgcttgaagatgccccgcgctatatcggtcagatagagcagtttgaacgtgaaaaggcggcaaaaggactgtttatgacagaaaatgctttgaacaaggtccttgagtcctgcatcaagtttgcggaaacgggcaataactgttttcttatcggtttttttgaagacgaaatggcaagtgccgagttcgaaatttccgaacagcaaaaaacagctttgctcgaacgcagcagaaacagcattatcaacgaattgctgccggcatacagaagccttgcgaacactcttgaacagcttcgcccgcagtgcggctcctttgcgggtgcgtgcatgcgcggtgttgatgcaaaggattactatgctgccgcaataaaatcaaatgctgcctgcaatgccgagtattcgtcaatggccgatgaactcagtgaaaacatttcgagtgtttacgctaaattggtgaaaatcattctcaccgactcgaatgcaatgaaagattacgaaaagaatatgacgtccggcaatgttgaaaaggatgttgaatatcttaaggagcttatcgacggaatctatcctcaaattccggaacaaagcattcaatacgtcacgattcctgatgccgttgcggaggatttcagccctgccgcatatatgatttccgcattcgatgatccgacaaggaatgtcgttctgcttaacccgacggcggaggacgacacaatgctcttcacgcttgcacatgaatgcttcccggggcatctttaccaaactcagtatttccgcagcctcgacggactgcccctttcgcagcagctgtgcgcgcccacaggctattccgagggatgggctgttttttcggagctttttatctcgggtgtcagcaaaaaatacggagtgggcggctgcacgctgcgggaatacgaaagtgtgcttgcaaacattcttattcctgcatatgtgagcatcaaggtcaactgcgaaggctggacaacggaagatatcggcgactacctgaagtcgttcgggcttgatcagcaggaatacatcgatgttatatacgaatattcaattgatatgccgctgtatttcttcaactatgcaatgggctatgtgtacacaaacaagatttacgaaagcgtgaatcatcgcagcgacggagacaagacagcattcttcaaacgttaccttaacatgggaccctgtatgttcgacattctgtttgaagaattcggaacggaagaataa

SEQ ID NO: 663 - DNA, 1401 bp, Unknown
  Unknown gut bacteria
atggcaaaaaaacttacaggaactgtctcccaggttatcggcccggtcattgacgttcactttcccgacgggcggctgcccgcaataaacaatgcactcactgttccgatcggcaataaaacgctgacggttgaagttgctcagcatatcggcggcaacaccgttcgctgcattgcgatggaatccaccgacggcctcaagcgcggtgaaaccgttaccgacaccggagctgcaatcagcgttcccgtcggcaggaaaacactcggaaggatttttaatgttctcggcgaccccgtggacgaaaaacctgccccgaaggactgtgcacattgggctattcaccgcacgcctcccgcatatgcggagctttcctcttccaccgaaatccttgaaacgggcatcaaagtcattgacctgatctgcccgtatgccaaaggcggaaaaatcggtttgttcggcggcgcgggcgtcggcaaaacggttatcatcatggagcttatcaacaacattgccacccagcacggcggcatctccgtatttaccggcgtcggcgaacgtacgcgcgagggcaacgatctctataacgaaatgaagcaatcgggcgttcttgaaaaaaccgcgcttgtttacggacagatgaacgaaccgccgggagcgagaatgcgcgtcggcctttccggcttgacaatggcggaatacttccgcgacgaggagcatcaggatgttctgcttttcatcgacaatatcttccgttttacgcaggcgggcagcgaagtttccgcactcttggggcgaatgccctccgctgtcggctatcagcccacgcttgcaaatgaaatgggcgcattgcaggaacgcataacgtcaacaaaaaagggttcgataacctccgttcaggcggtttacgtgcccgcggatgacttgaccgatcccgcacccgcaaccacttttgcgcatcttgatgcaacaacggttttgagcagaagcattgcttcccaaggcatctatcccgcagttgacccgcttgagtcaacgagccgaatcctctcccgcgaagttgtcggcgctgaacactatgcaattgcccgagaagttcagcgcatattgcagcgttacaacgaacttatggacatcattgctataatgggcatggatgagctttccgatgaagacaaactgaccgtttcgcgcgcacgcaaggttcagcgtttcttctctcagccgcttacggttgcggagcagttcaccggttttaagggcaaatatgttccgctcagcgaaacgattcgcggtttccgcgaaattatcgaaggcaagcatgatgacctgcccgaatccgccttcctctttgtcggctcgattgatgaagcggttgaaaaagcaaaaaatcagaacttataa

SEQ ID NO: 664 - DNA, 1542 bp, Unknown
  Unknown gut bacteria
atgaaaaggaaggaagctttcgctgcggcgggagcagcggtcataaaaacggttatgaagattaaggcggctcggaattcaatcgaaaccgattcatccggcaaagaaaacacggcagtcaatgcgaacacggcggcgggggaggaaaagacttttctcggcacggaacctatcggcaggctgctgtttaagctggctgtgccgacggtcattgcgcagcttgtgaacatgctttacaacattgttgacagaatctatatcggtcatataccgggtgacggcagtgccgcgctgacgggcgtgggcgtgtgtatgccgctcatacttatcgtttccgcgtttgccgcatttgtggcctccggcggtgcgccgcgcgcttcaataagcatgggcaagggtgattatgactccgccgaaaaaattctcggcggctgtgttttgatgcaggttgtgatttccgccgtgctgacggtggttctgcttgtgttcggcagggatctgctgcttgcattcggtgcaagcgaaaacacgattgattatgcggcggattatatgagcatatatgcgataggaacgctctttgtgcagctgacgctcggcctgaatgcctttatcacggcgcagggctttgcaaaatacgggatgctgacggtgcttatcggcgccgctgcaaatatcgtgctcgatccgatttttattttcggtttcaaaatgggcgttcgcggtgcggcgcttgcaacagtcatttcgcaggggatatcctgcatatgggtcattttgttcctgcgcgggggaaaaacggttttgaagctgaagcgtgaaaacatacgctttgctccgcgcattatacttccgtgcatcgcactcgggcttgcaacgttcataatgcaggcaagtgaaagcgtgatttcggtatgcttcaattcatcgctgctgaaatacggcggggacattgccgtgggcgcaatgacgatcctcacaagcgtgatgcagtttgcaatgctgccgctgcagggcgttgcgcagggcgcacagccgattttgagttataatttcggggcaaaaaatgccgaccgtgttaaaaagacttttttccgtcttctcaccgtaagcctctgctattccgtcgcgctttgggctttcgtgatgctgtttccgaaaacctttgccggaatattcagcccgaatccggagcttgtaaatttcaccggtgatgctttgcgaatatactgcggtgcgctcttccttttcggaattcaaatcgcctgccagatgacttttgtttccatcggcaacgcgggctgctcaataatcgttgcggttctcagaaaatttgtgctgctcataccgctgatttatatcatgccgcagctgcttgcggataaaacaaatgcggtttacactgccgaaccggttgccgatgcaattgcggtaacatgcacggcgatactgttttcaatcgaattccgaaaagccctgaaaaaactgaattcggattccgcaggcggaacacaaaccgcaaaaacggacttgcgggtttag

SEQ ID NO: 665 - DNA, 996 bp, Unknown
  Unknown gut bacteria
atgttcggcgaggcattcgatatgaatctcaacacaaaaacacaatacactatccgccgcattccgcgcattgcggcgggattctttgcaatgctgacagcggccgctgcggttttgccttgtttcgcctgttcaacatatgctcaatcgcagcaaatccgtttcgacacgcaaacggcacaaccgcagatgcacaacgtaagggagcggtcgggtccatatttcacgctttccgccgcctccggtgcatcatccgctgtcggtgtgaacgttttctccgctgcatcggttcagccgacggccgatgttcccgaaaatcagtcttcagaaaataaaaagccatatgtcgggtttgaggagcatgtgagaacatccggctgctatgtcgtatgccctgttttcgtttgcagaaactccgtccttgttaatgctgccgtgaaaacagccttcgtggaatatgcgcgtgagcagcctgctgacaggtacataacttacgatgttatgtacaatgataacgacctgctttcaatcaaaatgtgcgtttatgttcccttcgaacaactcaatgcggattatgatgttccgaccgttaacggatatgcggtttttgaaacaagaccgataaacatagatatcttatcgggacggattctttccgttgacgattgtttcggtgttgcgttcagcgatgattttgcggcagatttcggtaaaaaagcatacgaaaccgcagtttcgaattttggtgatactgtcatttgtctgcctgaaccgatttattcggatcgcatgttcatgttctacgactgcggaattttgctctgctatcgaaaatatgaacttatcgccgatccgacaatcgaaccgacgatttatatcccgtcagaatggttcatcgagcagggcgcaaggtccgattcgcccatcggaaggcttttgttcgatgaaacagacaggcagccctcgccgagtgacggctatgaatttgctgattaa

SEQ ID NO: 666 - DNA, 3147 bp, Unknown
  Unknown gut bacteria
atgtacaaaaaagtttccgcctcgctcgactttgttccgagagagaaagaggttctggaattctggaaggcaaacggcatcttcgagaaatccgttgaacagtccaagggcaaacctgcttacactttctatgacggaccgcccacagctaacggcaggccgcatatcgggcatgttttgacccgctccatgaaggatatcattccccgctaccgcacgatgaaaggctttgacgtgctgcgcaaagcgggttgggatacgcacggacttcccgttgaacttgaagtggaaaagctgctcggactggacggcaaggagcagatcgagagttacggcgtgcttccttttattgacaaatgcaaggagtcggtttggaaatataaaggcgaatgggaacagatgagcgatgccgtcggttattgggcggacatggagcatccctatgttacctataccgatgattacattgaatccgtttggtgggcattgaagacaatcgacgaaaaagggctgctctataaaggccacaaaatcgttccctattgcccgcgctgcggaaccgcactgtcaagccacgaggttgcacaggggtataaggacgttaaggaagtttccatctttgtgaccttccccgtcattcccgatgcggaacacagctttgttgacggcagcgaaagctttattgcatggacaacaacaccgtggacgctgcccagcaatgtcggtctttgcgtcaatgccgacgaagactatgtaacagttctttgcggcgaaaaaaaatacattcttgcggctgagcttgttgaaaatgttctcggcgaggatacaaccgagcttgcacgcttcaaaggttcgcagcttgtcggcattcactataaaccgctgtttgatttccccgtcaaccacaaaggcagggatgcatggcgcattgtttcggacgattacgtaacccttaccgacggtgcgggcatagttcaccttgcccccgcattcggcgaagacgacgcacgcgtcggccggaaatgggagcttccgtttgttcagcttgttgacgcccgcggaaggctcaccggcggcaccccgtgggacggcactttcgttaaggaagccgataagcccatcattgccgaccttaaagcgcgcgaaaggctacttagggaacttccctatgaacacagttaccccttctgctggcgctgcgacactccgctcatctactacgcaagggaaagctggtttgtgaagaccactgccgtgcgcgacagattgattgaaaacaataaaaagataaactggattcccgaatccatcggcgaaggccgcatgggtaatttccttgaaaacgttatcgactggggcatcagcagggagcgctattggggaactcccctgcccgtgtggatgtgccctgattgcggacattaccatgtcatgggcagccgtgcggaactgcgcaaatatgctccggacacgccagaggatatcgagctgcacaagcccatgctcgacccgataacatttaagtgcgaaaaatgcggcggaacgatgcaccgcgagcccgttgttatcgactgctggttcgacagcggctcaatgccttttgcacagtggcactatccgtttgaaaacaaagaggaattcgaacgccgcttccccgcggattatatcagcgaagccgttgaccaaacccgcggttggttctatacgctgagcgcactttcaaccatcctttttgacaagcccgcattcaagaactgcatcgtgttgggacttgtttgcgacaaggacggcaaaaagatgagcaagcacgtcggcaatgttgttgcgcctgcggacgttttaacaaaacagggcgcggatgcggtgcgttggtatttctacaccgcctccagtccgtggctgcccagccgtttcagcggcgacgccgtaagcgagatgcagcgcaaatatatgggtacgctgtggaacacatatgcgttctacgttttgtacgcagatattgatgaatttgaccccacgaagcatgagctcgttcgcgaaaacctttccgtaatggacaaatggctgctttcgcgccttaacacgctcattcgaacagtggataactatcttgaaaacctccgcattaccgaagcggggcgcgaactgaaccgctttgttgacgacctttccaattggtacgttcgccgcggcagggaacgttattggggcaaggaaatgactgtggataaagaagcggcgtatatgaccctgttcacagtgcttgaaacgctttcccgcctcaccgcaccgttcactccgttcatggcggaagcaatttatcaaaacatcgtccgcacggtgaacaaccttgcaccggagagcgtacacctttgcgcattcccgatttgcgacgaaagcttcatcgacgcggaacttgaacgcagcatggacgaaattctgaaagttgtcacactcggaaggtcggcgcgcaaccttgcgaacatcaagaaccgtcagcccctttcggagctgtttgttcagggtgttgacgaactgcctgcccgatatacggagattatcgaggacgaattgaacgtgaaagtcgtccgctttgttaaggatgcttcctcattcataagctatcgcgtaaagccccaactgaagcttctcgggccgcgttacggaaagattttgcccaaaatcaatcagtatttgcagggagacggcataggcaatgcggttgttgccgcccatgcggaaggacgcgcttatgaatttgagcttgaaacgctcaccgtctcgctgaatcctgaagatgtgcttgttgacaccgtcaaaaaggaaggctttgcctcagtcggcgataacggcgtgaccgttgtgcttaacaccgcgctcacggatgaactgattgaagaaggctatgtccgcgaaatcatcagcaagattcagaccatgcgcaaagaagccgattttgttgttaccgacaggattataatcagcgtcgaatgcggcgaaaacctgcttgcggtgttggatcgcaattcggacgaaatccgcagaacgactcttgccgatgaactcactttcggcattccctgcggctatgtgaaagagtgggatataaacggcgagaaggtcgctctcggtgttaaaaaagcataa

SEQ ID NO: 667 - DNA, 2208 bp, Unknown
  Unknown gut bacteria
atgaaaaaaattctgtccttccttcttgcactcgcacttcttatcggaatcatcccgatgagttttgcaagcgcagcaaccttaaccgatgctgtgaaaagcaattacagcattgaaacaaccctgtctgacggaataatccagaagacagcaaaacgcacgttctttgttattgcaaaggacggcgacggcaacaaggtcactccgaccgcaactttcaacggcgatgcactctcccccacttgggacgatgcaacgcagacgagcttcactttgaactttactgttgaaggtgaaaacaccgtcgttgtttccgccggcgatgctgagttgacatacactattacctatcagcccgcagaagacggtgaatacgtcggtcaggcgatcttcagcatcgaagcattctccctcggtgaaggctacatcgttgaacccgtgcttaccgatatttatgccggtgactgcgctgccgcggtactgatgcgtgtgcttaaccgctttggattcaccgaatcccataccggcagcgttgaaggcggtttctatcttgcaacaattaaggacggcacgatacccaatatccccgtctctcccgtcaacgctcccgcagagcttgttgatgcgctttcgtcttggggcataacgcttgaagaccgatacagtgaaaacgaactcggcgaattcgactattgctatgcttccggctggatgtactgtcttaacaatgtgttccccaatgtcggcttttcagattcatatctgtccgacggcgatgttgtccgcgttcagttcaccgttgcctacggcagcgatatcggcggcggttatgcaatgggcggcagtgacaacacatccttctaccccgttgcaaacaaagataggctcagtacgcttatcgcaacgcttaacgaacacggcatcgaaattccggactctgccatgaatgccgcaaccgcgatttatgcaagtcaggaagacgtaaatgctgccgcagcggttctgcagcagcttgaagacgaatatcagcagaatgcccccgttcgcgatgttatagcaaagatttccgcaatcggagaggtgagccttgaaagcgcctctgcaattgcggaggcaaggcaggcatatgatgctctgactgtcgaacagcaagcccttgtcagcaattatgatgttctcaccgcggccgaagaaacactccgcctcctcattgaagagcttcccgtttcggcatctttctctgcacccgaaatcaccgcgatttccggtcagcaggtcgagattcccgtcaccgtcagcggcaagttcgaggcgcacacccttgaaatgcatatcggttacgacagcacaaaattaaccgttaatgaagtcgttcccggtgcaattctcgaaaacacttccatgaacgttatcgacttcaccacaacgcccggcacgatttatgtcggcgcactctgtgcggacgctcccatgacgggcaacggcatagatgaaaatgttctgctcaccgttaaggcgaccgtaaaccccgagttctccggcacaactcctgtcaacgttgatgtgaacagatttgttaatcttcctgtcggcggcacagtcaccgatattgaggttcatacaacgaacggttccgtgaacgcatcattgcccgaatacacgctgacctacaccgtcaacggtgagttctatgccgaacagacctacgctgtcggtgcagcaatcactgtgcccgaatacaccgtacccgaagggtacactttctccggttgggttgttcccgaaaccatgcctgccgaagacctgacggttgacgctgtgctttcaatcaatgtttacactgttacattcgttgacggactcgacggctccgcaatcgccgaagtctccgttgaacacggcagcaatgtcaccgcacctgctgcacctgcgcatgatggttatattttcaccggttggaacggcagccttgtcaacgttaccgaaaaccgcactgtcaccgctgaatacagccttctcggtgatgttgacggcgacggtgttgtaacttctgccgacgccctcaccgtgcttcgcatgtcccttgggattattgcaacgcccgtttccggcagccttgatttcagcatttgcgatattgacggcagcggcgatataacatccgttgatgcgctcctgataattcgcaaagcaatgcagtccgcataa

SEQ ID NO: 668 - DNA, 2403 bp, Unknown
  Unknown gut bacteria
atgtctgaaaggataaaaatgattacggataaagtgctgaaaacacttgaatatgataaaattcttaagaaactgcatatgcattgcggctgctgcgtgagtcgtgagcttgcagatgagcttcggccgaagacggaatttgatgatgttaatgcagaacttcgccttacaagcgaggcggaaacatactttctgcgcacgggttattcaccgattgatgatttcccggatattcgttcaacacttaaacgcatgaatgcggccctttatttaagctgtgaagaattgctgaacatcgcaaaagcactaaaggctgttcgagttgcgcgcgaacagctcacgccactgaccgcagcgaatgatggtgacaattcaacggatgaaattccgtgcgcgcttgcaaatcttgcgtgcgggcttgttgcgcataagtatattgaggatgaattgaatcgctgtattttgagcgaagatgaactttttgacggagcttcacctgcacttgccagaattcgccgcaataaacgcattgcaaatgaaagggttcgcgaaaagctgaacagcataattcgttcttcaacgtattcaaagtatttgcaggatccgttaataacgattcgcaatggacgttttgttgttcccgttaaacaggaatacaggcaacagattcccggacttattcatgaccagtccggaagcgggcaaacgctgtttgttgaacctgccgcagttgtggaactcggaaacgagtataaaaagcttgtaattgaagaacaagctgaaatcgaacgaattcttactgagttgactgcgcttgtaaaaccatcggcgaatgacatatacaccgaccttcaaaccctcggcattattgatctttgctttgcaaaggcgaagcttgccaaagaaatgaaggcggtttgcccgaaaacaaacgctgagggacgaattaaaatcgttcggggcaggcatccgcttattccgaattattcggttgttccgattgacataagactcgggacggatttcacgacgcttatcgttacaggtcctaacacgggcggcaaaaccgtaacgcttaaaaccaccgggctgtttactttgatggcacagtcaggcatgttcgtgcctgcaaatgtcggcactgaaattgctgtgtttgaaagtatttttgctgatatcggagacgaacagagcattgagcagtcgctttcaacgttttcgagccacattcgaaatattgtcggcatccttgaagctgcggacgacagatcccttgtacttttggacgaactgggagcaggaaccgacccgatcgaaggtgcggcactcgcaatgagcatacttgaggaactgcattcccgcggctgtttcacaattgcaacaacgcattacagcgagattaagacgtttgcactgacacgacccggaatggaaaacgcatccatggagtttgatgtcgataaactctgcccgacgtatcggctttttatcggcatcccgggcaaatccaatgcgtttgaaataagccgtcggcttggcatcgatgaatatatacttgataatgcaaaagcattcatcaaaaaagaggatacggattttgaagcaattctgtcagatgcagaaatgaagaaacgccgcgccgaggaagaaatggaacttgcggaacaggcgcgtgcagagcatgacaggcttgccgaggagctgaaagcggagcgggaaaaacttgaacgtgaaaaggcggagcttcgcgccaaggcaaaggaagaagcacgaaaaatagttgacgcttcccgccgcgagatggaacagataatcatgcagatccgtgctgttaaaaccattgatcagcgtgccgctgacaggattatccaacagggaagagacgctgtgcgcaaggcggagaatgaacttgccgaggacctaccgaaactgaaaaccggtgacggaaaacctccgaaaatggtcgtgcccgggcagactgtaagtgtcgtaagccttggaaagaacgcaacagtgctctcaaaaccggacaagaacggtgaggttcaggttcaggttggaataatcaaactttccgttcgattggacgatatcaggctgtcaaacgaaaaagccgaaaagaagacaaatgtcaaggttgaatataaccctgcaaacactgtcggattggagttggatattcgcggtatgctcgttgacgaggcaaagcctatagttgacaaatacctgctcgatgcacacctgcaggggttgagtgaggttaatatcattcacggaaagggtacgggtgcgcttcgctccggaatacagcagtacctcaagaaccacccgcattgcaaagcgttccgcaacggcaactacggagagggtgattacggcgttaccgttgtcactttgaaatga

SEQ ID NO: 669 - DNA, 2214 bp, Unknown
  Unknown gut bacteria
atggaattcacgggcacagtaaccggcataaagtttcgaaacgaggagaatgggtggaccgttctcaggataaagggcgatgacggagaagagttgaccgctgtcggcgtgatgccgtccgtgaacgacggcgaacgggtgaccgtgacgggcaacatgacggcccatccgatgtacggcgagcagatccgtgtgacttcatataaaaatgatataccgacttcggccgaagctgttcgcgcttatcttgcgagcggctttattaagggtatcggcgaggcgaccgcaaggatgcttgtggataagttcggcgcggaaactctcgaaattattaagaccgaaccgatgaagctcacaaaaatcagcggtatcgggccgaaaaaagcgaaaatgatccatgaatcctaccttgaaaaggcagcgatgcaggacataatcatgggtatgcaggagcttgggctttccattgcaatgacaatgaaaatatacaagctctacggtgaaaactgcgtcagcatggtgaaggagaatccgtacagtctgattgatgattttgaaaacgtcggatttaagacggcggataaaattgcatttgaggccggatatgagcgtgaatcggaatttcgtgttcgtgcgggcataaaatacgctctttcgcttgcaaggcaggaaggcaatacatgtctgccgcgggatatgttagcgatgtttgcggcaaacaacgtcctcggcgttgtgccggaacgggtggaagcggtgcttgaaaaaatgcttgaatcgagttctctcgtcgaaaagcgtatgggtgaacgcgattacatttttttgaaatatatgcattatgtcgaatcggattgtgcggctttgttttcaaatatcgtcactaatgttgatattctgtccctgtttgatatcgacggtgaaataaaacgactcgaaaaacaattcggcgtcactcttgctgctgcacagaacgaggcggtgaaacgcgccgtgacggacggagttctgatcgttaccggcggccccggaaccggaaaaaccaccattttgaaattcgttattgagattatggagcatctcgggctgcaaatcgagcttgcggcaccgacaggcagggcctcaaaacgcatcagcgacacgacagggcgtgaggcaagaacgcttcaccgtctgcttgaatacaattttaacaataattctttcaaccgaaacgcggattatcctgttgaagcggatgttattataattgatgaaatgtcaatggttgatgtcatgttgtttcactccctgctgaaagcggtggccaaaggcacacgccttgtaatggtgggcgatgtggaccagctgccgtcggtcggcccgggcaatgtgcttcgtgatcttgtgaattccgatgtaattccggtcataaggctgaatgaaatcttcagacaggcagggcgcagtcgaatcgttacaaatgcgcatcttataaaccgcggggaaatgcctgttttggataatattgatgaagaaaacgactttttgttttacgaatgccccacggcagatatcgcgctttcatccgtgctgaacctttgcggcgattatgcttatctcggcaaaataaacgaactgcaggtgctttcgccgatgaagggaaacatgctcggagttgtgaacctcaacactttgctccaggcggagctgaatccggcggcggatgacaaggccgaatttaaattcggtgaaatcaccttccgagagggtgacagggtgatgcagataaagaacaattatgatattcagtggagaaaaacaaagcttggtgcggacgacagcgagggagaaggtgttttcaacggcgatataggcacgattcttcgtgtggataatgcctcaaaattcattacggtgctgtttgatgatgaacgggttgcggattacaatttcaatcagcttgaagaaattgaccttgcgtactgcatatctgttcacaaaagccagggcagcgagttcccatgcgtagttcttccgcttgtgaacggtccgaacatgctttttaatcgcaacatcctgtacaccgccgtgacaagggcgcgcagcaaggtttacattctcggttcggtcggatgcattaaatatatggtgtcaaacacaaacgtccgcagaagatacagcgcactggaaacttttttgcgcgagagaaacgaaaccctgcccgacgtgtaa

SEQ ID NO: 670 - DNA, 957 bp, Unknown
  Unknown gut bacteria
atggaagcaaagccgagaataagcacattaacaacggctgaaaaagagatcgtacgcattgttccgcagcgatttcgcagtgcggttgagcagattcttgagggcggaagcgcggatgaaatcaggtttattattgacataccgatgcaggcggcgggcagacggggcgagcaagtttttttgcagcttaaaccgtttacaaaatcagaagcatgtgaaatgctggaggcaatatgcgggcattcggtttttgcacgcgaacaggagctgctgcagggctatgtgacgcttgcaggcggggcaagggtcggcatatgcggaaaacctctttatgaaaacgggaaagttacacgattgactgcggttacaagttttaatatcagaatcccacgtgaagttatcggctgtgcagaacgtttcattgggaggttctttgatggcagcatgcccttatcggcaattattgctgctgctccgggcgcaggcaagacgacatttctcagagattgtgcgcgttgcttatcggacggaataggtgttccgcgctcgctgcgtgttgcagttgcggatgaacgcaatgagctttccggaacaacggagggacacgccgccatgaatctcggtataaggacggatattatggaggggataccaaaggctgctgcaatcccgatgcttgttcgcagcatggcacctgatgtaataataaccgatgaactgtcgggtgcaattgatacggaggctgtttcggaagcggcaaaatacggcattgcggttattgcatcgattcatgccggaaatacggctcaattgagaagcaaagcttggctccgacacgcggttgaagacgggctgtttgcaaaagtttttttgctgagaagaacatcgcgcgaaatatcattgtacgagactgatattttagacgaaaacaaacggagacgaattacacggtgctga

SEQ ID NO: 671 - DNA, 2073 bp, Unknown
  Unknown gut bacteria
atgaaaaactatcaagctgacagcatccgcaatattgccgtcctcggccacggcggagaaggcaaaaccactttgactgaagcaatgcttttcaatgcagggcttctcgaccgcatgggcaaggttgacgacggcacgaccgtttccgactatgatcccgaagaaaccaaaagacacatttccatcagcgcagctgttgctccctttgagtggaacggaaccaaagtaaaccttattgacgctcccggtttctttgatttctatggcgaagtatacgaagcaatggctcttgccgattccgcaattatcgtttgcagcgcagtttccggtcccgttgtcggcaccgaaaaagcaatgagcatgtgcaaaaaggcaaatatgccccgcatgatcgtcatcaaccagatggatcgcgaaaacgcaaactttgacaaggcaatcgaaggcctgcacgacaagttcggcgttacctgcgttcccattcagctccccattatcgaaaaaggcgcatatgtcggttacgttgacctgaccaccatgaccgcaaagagattcgacggcaagggcgaaaaggaaatcgacattcccgcttctctcgcaggccgtgccgaagaattgcgcgaagctcttatggaagcagccgcagaaggcgatgaagagctcatgatgacctatcttgacacaatggaactcagccaggaagagatcattcgcggtctcaacctcggtattgcagaaggtgccgtaactcccgtttgctgcgtttccgcactgctcaacaccggcgttcacaccctcatgaacaaccttgttcactatatgcccacagctgacaaggcacccatccgccccgctgtcaacgcccgcacaggcgaagccgttgaaatcaagcgcgacggcaagtttgccgctcagatcatgaagaccgttgctgacccctttgtcggtaagatctccatcatgaaggtttatgcaggctccattgatgcaacctttgcagcatacaaccccaacgccgaaaagagtgaaaaatccggcgcggtttacatgatgcgcggcaagaacctcatcaacgttgacaagctctgcgcaggcgacatcggcgcaatggcaaagcttcagttcacaaacaccggcgatactctgaccgaccccgcagaacccgtcaagttcgcacccatcgagttccccgctccctgcatttctcttgcagtttccgcaaagaaacagggcgaagaagataaagtctttgcaggcatcaaccgcctcaccgaagaagatcccactatggagatcgagaagaatgcagaaaccggcgatgttcttatcaaaggtctcggcgaaatgcatattgacgttatctgcgcaaagctcaaaaacaaattcaaggttgaagcaagccttgcagatccccgcatcccctaccgtgagactatccgtaccatggcagaggctgaaggtaagcataaaaagcagaccggcggtgcaggtcagttcggcgttgttcagatgcgcttcgaaccctcccccacgggtgaatttgaatttgttaacgcaatcgtcggcggcgtagttcccaaggaattcatccccgcagttgaaaagggtctccgtgaagcaatggtcaagggtgttcttgcaggctatcccatggttggcatcaaagctactctttacgatggcaaataccatcccgttgattccaaggaagttgcgttcaaatccgcagcccgcctttcctacaaggctgcctgtgcaaaagcttcccccgtgcttattgaaccgatctatcgttacgaagttctcgttcccaacgaatacatgggcgatatcatgggcgatatgagccgccgtcgcggccgtctcatcggcaccaaccccacttccgagggtaccgttgttattgcggaagctcccttgagcgaaatgttcaagtatgcaaccgacctgcgcagcatgactcagggtcgcggttccttcaccagtgagtttgttcgctatgaagatgttcccgcaaacgttgctcagaagattatcgagtccgcaaagaaggacgacgaggacgacgaataa

SEQ ID NO: 672 - DNA, 2193 bp, Unknown
  Unknown gut bacteria
atgaattcaatacgcaacgggcagtttacggaagctttttccttcatcagtgctcatgttgcgccggagaatgccgttgacgacagcattgaagcatataaaaacacaataactctcgcgcagttcgaaaagcgttacgagagcctgttttcgctgctcggcgtgaacgatattgaatacaatattgctgaagagaacgtttcaggaaattcaaaaaaagtcattaaatacacaatgacatacaaaacgcaatccgcgggcgacctgacaaacgaatacgagatgactcttctgaaagagaataatctttggcgggttgtatggcagccgagccacatttttccggatatggcctggggcgacacgttcgacagggcaacgcttgcggcagagcgcggcgatatcgtttctcacggagctgttgttgcaaccaatgtccgccttgtgactgtttacgcgcttttaagcgaaattgcgccgaaaaatgtgcttacggatgaaataatgcaggaaaatgccggcatgagcgagcaggatgcggaaaaggaagcggacaggctttattccgatgcggagtatctgaatacacgcttctcggcggaattcgatgccgctgctgccgaaattgccgctgtgctcgatttggacgccgcagagctgcgaacaaaattcggaaagaacacaaacgagttcatcaccgtttatcaggcgatgcccgatgaagttaccgttgagcagcaggaacagctgaatgccataaacggagttcatgttgacaccgagcactacggttcaaagcggtattacccttacgggagcctgcttgcgcatacattgggctatatttcgttcgcaacatgggaggagatacagacatataacgagggacgcgatccgaatgacggattatatactactgacagcaaagtcggtaaaagcggcatagaaaagctttacgaaagggagctccgcggcaaggacggctattatttcttcatccgcggaacggacggagccgttaaaaaggtcatctatcgcaaagataaagttgacggcagcgatgtgatgctgacgatcgatttcaaattgcagcagcgcacagaggaactgctggatcttgtgcttttcggcacggacacggcgggtgcggtcgttgttatgaacccgaaaacgggagaagtgaatgcaattgcttccaatccttcctatgatttaaacaggtttataaagggtatgagcggcgatgaatacaaagcccttgaagatcaggagaatgagccgctcagaaaccgcgcaacaagggagctttacccgccgggatcaactttcaaggcgttcactgccgctgctgcgcttgatacgggtacggtgaatgagaattatgttttcaccggctatatcgataatgattactggaagccgaccggttacggggaatggctttggccgcgcataaaacgcacgcgcgtctatcaccgcacggaaccgatgaacatgacaaactgtatgctgcattccgacaatatttactttgcggatgttgcactgaaaatcggtcaggagaaattcattgcatattttaatgaaaaactcggcatggacaagtcgctgccctatgaattgggtgccgcccgctcccagctttacagccgcggcagcgtgatggacaacaaaatgcttgcggactccggatacggacagggccaggtgctcgtgacgccgcttcagcttgcggcaatgttctccgcgtttgcaaacaacggcgatatgccgaccccgcgaatcacggacggattatacgtaacggacggcgtggaatacaaatgcattcggaaaagcgaatactccgtatggatggaggacgcaatttcgacaaatgcaataaacaaaatagtcccgatgctccaaggcgttgtggatccgaacaaaaacggaacgggccgttcgctgcgtgtcacgaatgttgacgttgcggcaaaaacgggttcggccgaaatcggcaaagacaaaacccgcatgtattcatggtttgccggttttcgccttaacgttgcgcaggaggatgagcgtgttgtgatcgtaatgctcgatgttcccgattcgggcgcatactcatccctgaaatttcagatagcgcgcgagcttttgaaactggacgacacccccgatccgaatgctccgccggcggaataa

SEQ ID NO: 673 - DNA, 1944 bp, Unknown
  Unknown gut bacteria
atgttttcggctgcagcatcaacagatgagccgacggcaacggatgtaccgacagcaacaatcgcaccgacaccgacgtcagaaccctccgcaacagatgaacccgatgcaactccggttcctgtcacagtagaggatgcttttgcggatgtgtcaacgccctacattgcgcttatggaagccgaaacaggtgccttgttgtatcagcgggatgcctattcgcgtgctttccctgcaagcacaacaaaagttatgaccgcgattgttgcgcttgaaaacatcaaagacatgaaccgtgttgttacactcggctggcgtccggtttcgggctttggcccaacaagctccttaatgggacttaaagcgaatgaaaccattccgcttatggatattctttacggtttgatgatgcgttcgggcaatgatgccgcaaaagcgcttgcaatggagacttcatatgaggttttcgggcaggataccgaatcgtctgagttgattccgaaattcgttgaccttatgaatcaaaaggcagcggaactcggcatgaattcaacgcattttgttactgttgacggccgccatgatgataatcattacacaacggcatatgactttgcggtattgatgcgttatgcacttcaaaaccctgtttttgcaaaggtaattgccacggccgagtacgatgttgctcccacgaaccaacatccgcaggggatgcactttgaaaactccaacagactgatttcaaacaaaacaggcgataatcagagctttctttatcaatactgcatcgggggcaaaacaggcgagaccaactatgcgggttattgccttatcagtgcatgccgaaaggatgatattacactgattgccgttcaatttggtgacagcaacaacagcacaagcaaattttatcgttacgaagttgctaaaaaactttatgattggggatatgagaattattgcgcagtgcccgtaacggaattcgggctgcaatcagagttcgaaatccaaacggccggtttttcaccgtttgactcggactacggcaaattgaaagcaacagctgatctcagcggtttaatgattaaaggctccaaacagtacctcgacgcaataaaaagcgatccgtccggcgttattgtcaaaataaacaccgataaggccgttgctccgattaaagcaggcgatgttgtgggagcggttgaataccttttttacgcacagaatccaataaaagttgatcttgttgcaatgcgtgatgttgcagcttcatcggaaacaacaattgaaccgcatgtcacggcatttatttcatcaacacctccgccgggaagcggcaaaaactgcaatctcagttttcagcgcacgccgggcagcgatcaatacagcgtttgggtttattacgatcacacattatacacaatgaatagcattgagtggcattatctgtactgtgacaatggggtttttcgtgctgcagcaactgcggacacaacttcacgcatcgatctttaccgtcgtttttacgacagcaacggttctgcttattatgtattaactgactttgtaacggatggtgcatcatatgttgttgtttcggacggcatggccctttgttcggacagccgcgacggaacgcgctcggctgttgctgttcaaatcggtgcaaatgatacgataacagccggtgttacagacaagatggtctggcagtttaacagtcaaagcaacggatattacataagcaacggttcgaaatatctgtcccgtaaggcaggcagcggtgtcattttctggattcttgtgttcgtccttctgcttgtgataataatcttcatccgcattcttgcgcagcgtataggcggaggacgtcgcggcaggcgtcgcagagcttcgacgttccggtccacaggcggacgacgcagaaggcgcagggcgtga

SEQ ID NO: 674 - DNA, 1407 bp, Unknown
  Unknown gut bacteria
atggttttttcaagtctgctgttcatcttcatctatcttgttgtaactttggcactgtattatgcagtgcctaatcgcgtttatcgaaacgtaattctctgtgttctcagccttattttctacggctggggcgaaccgagttttgtgcttttgatgatattctccatagcgttcaactggcttgccggtttgcttgtcggaaaatatcgaaacaacaaaaaacgctgcaaggctgtactcgttgcttccgttgtgctgaaccttgcgctgctgggcgtattcaaatacacgggctttgttgttgacacgctgaaagccgtttttccgttcatgcgcagctatgcaacgccgataatacctctgcccataggcatttcgttctataccttccaggcaatgagctatgttatcgatgtttaccgcaacgacacatctgttcaaaagaaccccgtgtatttcggtacatatgtcgcactcttcccgcagcttatcgcgggcccgatcgtgcgctatcgcgacattgcggatcagcttgaaaacaggcacgaaaacgttgctcagtttgcttccggaataaagcttttcactgtcggacttgcaaaaaaagttttgcttgcaaatcagcttatcgctctttggaacgttctccgcgaaagctccgcagccaacggtgttctcggttcatgggtcggaatcattgcatatacactgcatatctatttcgatttcggcggctattcagatatggcaataggtctcggccgaatgttcgggtttgagttcctcaaaaactttgattacccctatatttcccgcagcatcagcgaattctggcgcagatggcatatctccctttccacatggttcaaggaatacgtctacattcccctcggcggcaaccgccgcggacttgcgcgcaccctgcttaacaccgcaatcgtttggatgctcaccggactttggcacggtgcaagctggaatttcgtgctttggggagtgtatttcgggatcatcatcattatcgaaaaactgttcctcgggaaatatcttgaaaaggcccccgcattcctttcccacctgtatgcgatattccttttcaccttcggatgggttctgttcgacttcacggacatggggcagatgcgtgatttcattgtttcgcttttcaacggcggcagtgtcggcttgatttcgcatgatgcattggtttatgtgcttgcttatcttcccgtgctgatcatttcaatcattgcctccaccccgttggtcagcaaccttcataaaaaaatcgaaaacagagcgtggtgcggctatgccgatgcggcacttgtgctgattgcgctggttctctgcactgcatcgctcgtttcaagcggatataatccgttcatctatttccgattctga

SEQ ID NO: 675 - DNA, 1173 bp, Unknown
  Unknown gut bacteria
gtgaattggatacgcgaaaaacataatgtaattttaggaggtttacaaatgcccgaaacgagaccctatatcccgtgggatgttatcacaaatttcatgaaagatgcgttcatgggctatggcgttcccgaaagggatgcggaaatctgcaccgatgttcttgttgaaagcgacagacgggggatagagagccacggctgcaatcgtttcaaaccgatttatatcgacaggttcgaacagggaatattgaaccctgtcacaaatattgaagtgctgcgcgaaacgcccacaacgcttgtttatgatgctcataacggcatgggcatggttgcgagccacagcatgatggaaaagctcgtcaaaaaagcgaaaacttacggaatggcagccggtgcaatccgcaactccagtcattacggtattgcgggttattgggcaatgatggcaactcgggaaaacatgataggcttcaccggaacgaatgcaaggccgagcattgcgcccactttcggcgttgaacccatgctgggaaccaacccgttcacaattgcaatgccgactgatgaaccgttcccgtttgtgattgactgtgcaacatcgatcacccaacgcggcgaaatcgaagttcttgcaagacagggcaaacccacaccggaagggcgtgttatcgggcgggacggaaagtttatgaccgacagcgatgaaatccttgcggcacttttgcgcggcgaagaaagcttcctgcacgtcggcggatataagggatacagctatgcaaccgtggttgaaatcctttccgctgcgcttgcacagggcaactacatgaagatgctcaccggcattgcggaggacggttccaaaaaaccgcatgggttggggcattatttcatggttttcgatccggaagcgtttatgggaatcgatgcgttcaaaaagactgccggggatattctgcgcgctttgcgtgcttcgaaggttgcgcccgggcgcgaacgtatatacacggcgggagaaatggaatatctgaagtggctggatcgaagggacaagggcgttccggtcggcgaatcggttcagcgcgaactcgccgccgttcgcgataaactcggtctttcgcagtacgtttttccgttcgaaagggaaacttcggccgaaatgaatccggataaatga

SEQ ID NO: 676 - DNA, 1353 bp, Unknown
  Unknown gut bacteria
attatgtcaaaatatttcggcacggacggattcagaggcgaagcaaacaaagcgctcaatgttgaacatgcctacaaaatcggccgttttttgggtgcatactacggacgggagcataaatgttccgttgttatcggcaaggacacaaggcgttcgggttatatgttcgagtgcgcattgacggcgggactgacggcgagcggcgcggatgcgtaccttatgcatgttacaacaacgccgagtgtttcgtacatcacgcgcaccgatgattttgattgcggcatcatgataagcgcaagccataatccctatttcgacaacggtattaagctgctgaacggggacggcgaaaagatggagcaatacgttatcgatgaaattgagcgttatctcgacggcaaaggtgcggagattccgtttgcgaccggaagtgatatcggaaaagccgttgactatgcggcaggacgcaaccgctatatcggttatcttatcagccttgcaacccactcctataagggtatgcgcatcggccttgactgcgcaaacggaagcacgtggatgatggcaaagagcatttttgaaactctcggcgcggaaacggtcgttatcggcaatcagccgaacgggctgaacatcaacaacgactgcggctcgactcatatcgaggggctgcgcaggcttgtgaccgaaaacaagctcgatgtgggcttcgcgtttgacggcgatgcggacaggtgcattgcggtcgatgaaacaggcagagtgattgacggcgatcttatcctttatatttacggaaagtacatgaaggacagagaaaaacttgccaacaacaccgttgtaacaaccgtgatgtccaacttcggactttatcgcgcatttgaccgtgccggtatcaactacgaaaaaacggatgtgggcgacaaatatgtttacgaatgcatgaggaaaaacgggcatttgctcggcggcgaacaatcggggcatatcattttcagcaaatatgccgcaacgggtgacggacttttgacggcgataaagcttatgcaggcgatgcttgcaaacaaacagccgctttccgtgcttgctgctccggtgaagatttatccgcagctgcttgtgaatgtgcgcgtttcggataaggaggcggtgcttaacaacgatgtcgtcaaaggcagtgtgcgtgaagcggaggaggctctgggcgacaacggcagggtgcttttgcgcaagagcggaacggagcctgttattcgcgtcatggcggaggcacagacagcggaagaatgccgcaaggttgttgacggcatagtcgatgcaataaagcgtgagggccttgcacagcaaaaatga

SEQ ID NO: 677 - DNA, 183 bp, Unknown
  Unknown gut bacteria
atgttccttgaaaaccgtatagtgaaccaagaagagatgctcgagagagcagatcaagcgcaaacaaacaaaagtaattttgagacgaccggcggtctgtcggatgacgaagtcgcgagacagacgcaaaagaaagaagagcaaaagcgcgagcttttaaaggattttaactcaagagtttga

SEQ ID NO: 678 - DNA, 2079 bp, Unknown
  Unknown gut bacteria
atgcctcgcaaaacaccccttgagatgacgcgcaacatcggcatcatggctcatattgacgcgggcaaaacaacaacgaccgagcgtattctgctctatacgggcaaaattcaccgcgcgggcgaagttcacgagggcgcagccaccatggactacatggaacaggagcgcgaacgcggcatcaccatcacctccgccgcaacaaccacctattggcatgattgccgcataaacatcattgacacaccggggcatgttgatttcactgttgaagtcgaacgctccctgcgcgtgcttgacggtgcggttgcggtattctgtgcaaagggcggcgttgagtcccagagcgagactgtttggcatcaggcggaacgctaccatgttccccgcattgcctatgtcaacaaaatggacatcgtcggtgctgatttctttaacgtcatggacatgatgcgcgagcgtttgggagcaaaccccgtcgcgctgcagcttcctatcggcagtgaagcagatttccgcggcgttatcgaccttgtgcgcatgtgcgcagaggtctattacgacgatgacgggtttgacattcgcaatgagccgatcccttcggaatatcttgaaaaagcggagcaataccgcaccgctttgatagaagccgttgccgatgaaagcgacgaactgatggagctttaccttgcgggtgagcccatccccgaggatctgcttcgcagtgccataagatccgcaaccatcaacaacaacgccgttccgacctgctgcggttcatcctatcgcaacaagggtgttcagccccttatggacgcgatcgttgattatctgccgagtcccttggatcttcctcccattgaggcaacgagcagggacggcaaaaaaacgatcgaggtcacggcggatgattccgcaccgttcgctgcgctggcgttcaaaatcgttaccgattcattcgtcggcaagcttgcattttgcagagtttatgcgggttcgctcaaagtgggttccgttgtgtacaatgcaaacaagggcaagcgcgaacgtgtcacaaagcttttgctcatgcacgcggacagccgcaccgagcttgacgaagtctatgccggcgatattgccgcatttgtcggacttcgcgagacggtcacgggcgaaacgctttgcagcgaaggcaaaacgctgctcatggaatcaatggattttccggagccggtgattcgtatcgccatcgaatcaaaaacaaaggcaggtcagcaaaaactcagcgatgcgcttgcaaagcttgcagaggaggatcccactttccgttcctattcggacgaggaaacaggtcagacgatccttgcgggcatgggcgagctgcatcttgacataatcgttgacagactcattcgtgagttcaaagtcgagtgccgtgtgggcaaaccgcaggttgcatatcgcgaaagcatcacaaaaaccgttcgcaccgtcggcagctacatccgccagaatgcgggcaagggcgtttacggccactgtgccgttgagtttgcgcccggcgcgcccggcagcgggtttgtgttcgaaaatgccgttccgccttccgtgcttccgcctgaatacgttaaggctgttgaaaaaggcattcgcgaggcatcgcgcagcggttcgctgggcggatacgaagtcgttgatttttccgcaaagcttgttgacggcagcgtgaacgagcttgaatcatgcgaacttgcatacaaaattgcgggaagtctcgcattccgcgaagcgtgtgaaaaaggcggctccgtgctgcttgaaccgttcatgaagtgcgaaattgtcgttccggacgagttcttgggcgatgttatgggcaacatcacggcgcggcgcggcagaatcgacggggttgaaatgcgcgcgggaggtcagcagtgcatcaatgcgctttgtcccctcagcgaaatgttcggctatgcaacggatctgcgttcaagaacgcagggtcgcggaagcttcacaatgcatttcgaccactatgaagaggttgccaagaaccttgttgacaaaatccttggcattatctaccagtaa

SEQ ID NO: 679 - DNA, 2370 bp, Unknown
  Unknown gut bacteria
ttggctattaagtactatgaaaaaatgcccgttgtgcctctgcgcggcttggttgtgatgccccacacactgctgagctttgatgcaggcagggacaagagcgttgccgcgattgaaaccgccgccgaaaacgacgggttggtgtttcttaccgcgcaaaaagatccgaaacttaccgatataaccgcaaagcagctgtatgagatcggctgcatttgcaaaatcaagcaggtaattaaactgcccggagatactgtccgcgtcatggcggaaggtgtatgccgtgcgcttgttgacggtttcacgggcgaggaaccctttttcagcgcgaacctttacagttgcgacgatgaagagcaaaccgaccccgaagcttcgtcactccgtccgctcgtttcgaaaaaatgccgcgattaccttgaactgatcggagtaaacagcctttccgaagcatttgaggttattgagaaaagctccgatgatactgcatatatattcaggcttgcaaacataaccttgaaaaaatacgaggatcggcagtgttttcttgaacaggaggacagtgcctcgcgctgcataacgcttttgaacattattgcacgcgagcaggagttcacaaagctcagcaaacgcattgaggcgagtgtcaagcagcaaatagaaaagaatcaaaaggaatacttcctccgcgaacagataaaggcaattcgaaaagaattgggtgagaacgaagaaacggaagccgatgagttccgtgcaagactgaagaaacgcacgtttcccgatgaaattcgcatccgacttgaaaaagaaatcgacaggttcgcaacccttcctgccggttcacacgaaacaccgtccctgcgaactttcatcgattgtctgttggacatgccttataccgaaatgagcgaggacaatcttgatattcaaaatgcgcgcaggatacttgacgaggaccattacgggcttgaaaaagtcaaacagcgtattcttgagtatcttgcagttgcgaaacttaccggaaaggtgaacggtcagatcatttgctttgcgggccctccgggtgtaggcaaaacatccatttccgcatcaattgcaaaggctttgggccgcagctttgttcgaatgagtctcggcggaatcaaggatgaagcggagattcgcggacacagacgcacttatatcggagctatgccaggtcgcattatttctgcaatgcggcaggcgggaaccgtaaatccggtcattctttttgatgaaattgataaattatcccgagattacaacggtgatccggccgctgcaattcttgaagtgcttgacggagcacaaaactttgctttccgtgatcactttttggagatgccgtatgatttgtccaaggttctgttcataacaacagcaaacaaccttgccgatatcccccgcccgcttctggacagaatggaagttatagaggttccgagttatcttgcgaccgaaaagatcgaaattgcaagacagtatttgattccgaagcagctcgaaaagcacggactgaagaagagcatgctgaccatcggggatgaggagatttccgaaattgtcaattgctacacacgcgaggcaggcgttcgcagccttgaacgctgcattgccgcagtttgccgaaaggctgccgttgatattgcaaacggaaaaaaacggattcggctcagcaaatcgaaaataaaggaatatctcggtgtgtctcggtacagctttgagcctgcggataaagagcctgaaatcggactggtgaacggacttgcgtggacaagcgttggcggtgagctgttagaaattgaggttgaagcgttgaaaggcacgggtcagctccagcttaccggaagtctcggcgatgttatgcaggaaagcgcacgcactgctattacgtgcatccgcgcacacgcttccgaactgggactgagcgatgatttcaatcagcatacggatatacatattcatgttccggaaggtgctgttccaaaggatggtccgtccgcagggatctcactcatgacggctgttgcaagtgcactgacaggcattccggtgcgcgcaagacttgcaatgacaggcgaaatcactctcaggggccgagtgcttgcaatcggaggtttgcgtgaaaaactgcttgctgcagcacgcgcaggcataacaacggtgctgcttccggagcaaaatcgcaaggatattgctgaagttcccaaggatattattgatgcactgcaaattgtatttgtgcataacgccgaggaggtgctgaatcaagctctcgtccatatgcccgacagcaaaaaaatccttcccgtgcatgaagcaatgttggtcggtgcacctgcgtaa

SEQ ID NO: 680 - DNA, 672 bp, Unknown
  Unknown gut bacteria
atgcagcttaaagacattgcagaagaaatgcagcagcggtcaatggcagcaagagactgggttttccaggtactgcgcaccgcaatcatccgcggggtgcttcccggcggaatgccccttcgtcaggacgaaatctccgcacagctcagcgtcagccacattcccgtcagggaagctttccgccagcttgatgcgcagggtcttgtccgcatttaccccaacaggggtgccgttgttacaaagctcacccgtgaggagcttgaaaatgcaatggacacccgcatcatccttgaaatgggtgcgattcgtgccgcgattccgctcatgacggacgaatgcattgaaaaggctgccgtcattcttcaggaatgcgaaaccgaaaccgatgcaaacaagcttgaggatcttaacctccagttccatttcgctctctatgaagcaacgggcaacactttcctgctccagctcatcgaacagctccatgcgaacgtggatcgttatatccgtccctactattccgcaaccgaagtcagcgcgcagtccaagggcgagcactacaagctccttgatgcatgtcgtgcgggcgacagcgaatatgcggcggcaatcctccgcacccaccttgaaaagaccaaggtgctttcactcaattcgcccatccttcagagctga

SEQ ID NO: 681 - DNA, 1386 bp, Unknown
  Unknown gut bacteria
atggataataacggcagcaacgccgcaattcgcggcaaggttcatttcatcggcatcggcggctgttcgatgaacgggcttgcacagattctgcgcgggcgcggattcgaagttcaggggtcggacagcacaacatctcccttcacaaagcggcttgaggaaatcggcattcccgttttcatcggacatgatccgaaaaacgttgaaggctgcggcactgttatatattcagccgcaataaaacccgacaacccggaacgcgtccgcgcacgcgaactcggcattccggaaatcgagcgttccgttgctctcggcattatcagccgaagctatcgcgaagtcatcggaattgccggctgccacggcaaaaccacaattacctccatgcttgcactcattgccgaaaacggcggacttgatgcgaccgttcatgtcggcggcatggttgatttcctgcacggcggcattcgcttgggttcccatgacctttttgttaccgaagcatgtgaatacgttgaaagctttttgacgctgcatccaacggttgtgcttatcaacaatatcgacaacgatcatcttgactatttcaagacaatggataacattgtcaatgcgttccgcaaatttgttgcaagaatgcccgccgacggtttgtttgtcggctgcaccgacgattcgcatgtgcggcaactgctggacgaattcggcggcagaaaaacaacatacggacttgacctcaccaattcgccggattattaccctgcggatgtgcattatgatggactcggctgcgcttccttcgaccttatgcaccgcggggaaagactcggaagggtcacgcttcatgttcccggacagcacaatatgctcgatgcaattgcagcatccgccgttgcacttgaacacggcacggatattcaaacggtcataaccgcacttgcccgattccgttcggtgcagcgccgcttcgaatactacggcgaacgaaacggcgttcgtgttttccatgattatgcgcatcatcccgccgaaattcgcgccgcaatggactgcgcactgcgcactccgcacaaaaagctttttgttgttttccaatgcaacagcttcacccgcgcaagaacgctcttcaccgagaacgttgactgtttcaggggcgcggacaaagtgcttgtgcccgatatttaccccggcagggagaaggacgacggctctgttcacgcacgcgacatggttgcgggcatcaatgccgaaacgagcaacgccgaatacataccgacttttgagcagattaacgattacctgctgcacaatgctgccgccggagacatcgttctgacgctcggaagcggcgatgtttataaacaaaccaaactttttttggagtaa

SEQ ID NO: 682 - DNA, 2775 bp, Unknown
  Unknown gut bacteria
atgaacatcatgaacaaagtcactttgcaggcgatgaaaaagaacagggttcgcacgatcgtaacgataatcggcataattctttccgctgcaatgttcaccgccgtaacaactttctgctcaagtatgtacggctatatgcgcgagtactttgcatatgacaaaggcgactaccatgtttcgttcagcggctgttcaagcgaaacaatagataaaatcaaagccgacgagcgcgtttcaaaggccgctgttgcaaagcccataggttatgccgaagccggttcaagcaacgccgacaagccctatttgtatgttcttgaagcggatgaaagcttcatgaaaaatatgcccgttcatcttacgaacggcagactgcccgaaaatgaaaatgagataattcttcccgcacatcttcaggcgaacggcggcgtatcacataaaatcggcgacagattgaaactgactctcggcaggcgcgttgcggaagacgggtcggagcttggacagaacaacccgtattcgtacgatgaggaaaagctgactgcggacagaatttgggaatatgtcgttgtcggtttctatgaacgccccgggttcgaagaaatgattgctccgggttacaccgcactgagccttctttccgaacccttgcgggaaggtgaaacttatgatgcctatatcctgatgaaaaatccgagaaagaatcttgatgcgtttgcagaaaggctttcgggatctttcactgaggcatcctatcaagcgagtctgctcacaatggacggctattcggtgtttaacaattattcgaatatgcttgtgaggcttgccgcaattttctgcgtgctgattttcatcggctcggtttcgctgatttacagtgcattttcaatttctgtaagcgaaagaacaaagcagttcggcttgcttgcttcgatcggtgcaacccggagccagataaggcggtccgttcttttcgaagcatttgcgctgtgcgtatgcggcatacctatcggcctttttgtgggcatcggaggtatgggactgacgctgtggctttgcggagatttgttcaaatccgtactcgacgcaccgttcggcatgagcttttccgtttcgtggcaggccgttgccgttgctgtggcggtcgcggtgttgacagttttcgtttccgcatggataccgtcgcggcgtgcaatgaaaatttcacccattgaagcaatcaggcaggcgcgggatgtgaatgcgggcaagaagaatgtgcgctgttcaaagcttttcattcggcttttcggtgcagaaggcatgcttgcaaaaaaatactatgcacgcagccgcaaaaagtatcgcgcaacgatagcttctcttgcaatgagccttgtgcttttcatctctgcaagcggtttctgcatgtatctcacaaagtcggcagatgacgcattcacggaaaaaagctacgatataggttatcgggatttgtcggcgcagaattatacggagtttgccgcaggcgcccgagaatactttgatgagataactttctgcctgaacacgctcgacaacagctttgtgtacctgccggagggagacacaacggcggattacaaagcatacacaaaagcgcagcgcagcgcacatgaagggctgctcaaagttgaacaaaactgttttgcgtattacattgatgatgcggcattcggacggatgctgaccaaaaacggcatcgatgccgatgcttattttgcagccgaagaaaaactgcccgtcatgctcaacagcggttacgatgttgtttattcgcaggataacggcgaaaacaacagaagaacatataattacagctttgtttcggatggggtaacgaccctgatgcgggcaaaacccgcaccgcagctcgacggatacattttggacggcatgttttggtccggcaatgaaatgggagagggcgttctgcaatactactattggcccgctcaaggggaagatgctgacggcggaagcagctccgacggggaaaactcctccgatggggaaaatttcgaatcctcaggatttgattttttcggaaggcccatagaccagcccgtgcgcccggttgaatatgaagaaatacatattgcagcaaccgtcaaaaccgcacccgcagggattgacagcggacgcgcaatgaagctcattctgccgttctccgcgttccaggacaaaaaggcattcaatgaggggttcatgaatgtctacatctgcgccgatgacccggacaaggcggagaatgatgttaaatccgtatttgaaacccgtggaatcgaatttgcgcctcaaaggctgtacaaccgcgcggaggaggaacgaaccgtcagcaacatgataatccttgtgaaggtattctcctatggctttatagcgttgatttcactgatttcggttgcgaatgtgttcaacaccgtgtcaaccaatgttgcacttcgccgccgtgattacgcaatgctccgttcgctcggaatgacgaacaggggaataaaccgaatgatgaactatgaatgcctgctctacggaacgcgttcgctgctgttcggtttgccgctttcggtcggtatgacctacctttgctacctgtccgccgcggaggctgcacagatgagcttcacaatgccgtggacggcggttgcgattgctgtagtcagcgttttcatggttgtgtttgtttcaatgctgtactcaacaagcaggttaaagcgcgaaaacccggttgatgcactgaaggatgaaaacatctga

SEQ ID NO: 683 - DNA, 2415 bp, Unknown
  Unknown gut bacteria
atgaaaaaacttatctcgcttctcatcgccgtgcttatggtattcgggcttttgcccgtactgtcggccccggcgacacatgcttccgccgactcatccgacggatacggcgattccaaatccgcctcgcatccggctgatacacttcgcggattcagctatttttatcacgactcaaaattcatgggcgggccttacggctgggtctcaatggcgtccggcaatccggaaggcgcaagcttcatatccgactttacggaaagcggttacgttgccggtgaattttataacggctacgtttacggctatcgctatgcggaggaaagcaattaccacttctgcaaagtgaacgcgttcacttttgaagaaaccattctcggcacatccgaagccgttgccgccgatatggcatacgactattcaaccgacacaatgtatgctgtcagcggcgatcttctctgcacggtaaatctttcggacggttcgcttaccgaggtcggtttcgtcggccccgatgcaatgcttgctctcgcctgctccaccgacggacagctttacggtatcggtgacgactgcaatctttatgcaatcgaaaaaaccgagggcatgggcgaagtatgcggctttacgggcgtcattgcggacggacttcaatccatggcatgggatcacaataccgacacgctctattgggcaagctgtgcaaccactccccacctttttacctattatacaaccatgggcaatctctgtgagctgaataccatcgacggaaccgcaaccgttatcggcaacatttacggcagcaagatgcaggtcacctgcctgtactccgttcccgatttttatgatgcgcccgaattcccgctcacggatatgcaccttagccttgacacttcatacatggtacccggacagaccgcacagctttccgcatatatggaacccgcaaatgcagagcgcggagtcacatgggcaacgtcaaaccccaacatagtccgcgttgacaattgcggcaaaatgaccgcagttgcaaccggaacggcacttgtaaccgcccaaagcatcgacggcagcaagataaaaacctgcacggtgaacgttgtttcgagcacggacggactgacccttgatgatgcagtcaacggaacgggttcgaactatacttataacaatgcagcaaattacccctttgaaacagagattcgcgacggcaggctctgcgctgcttcaacgatgaccgttcagggtgaagcactgcttcaagttgacctcggcactcttaccgcaggcagcgttgtgcgttttgattggaagacggacacacgttatatgttccacggctggattctttggttcaataacgactacgttgcaaacctcacaggttcaaccggctggctcacatacgaatatgtcattcccgtaacggggcaatatgtcatcacatggaatcttcacaaggacaactcccccgttgacggctcaaacaagagctgggtcgataaccttgttgttgaaagccaaagcacttcaccggtggaaggtgtcaacgttacccccgaaactgccgagatgtacaccggcggacagcttgcgctgaatgcagaggtttacccctcaaatgttgccgatgcaagcgtttcctggagcagcagcaatgaatcggttgcaaccgtcaattcgaacggcgttgttaccgccgttgcacccggcaccgccgatatcattgcagcaacaaccgaaggcggctttaccgacagctgttcccttacggtcgttgattccgccgttattgatgcgccaatcagcgatgcacttaacgtttcgggcggttcacttgttttctcgaacgataccgctcatccatgggcggttgacagcgaaacttttgcggggagaacggctgcaaaatcaactatcaacggcatggcgggaacttcaacaggcatcaggctcaatgccggaacacttcatgcaggcgacaggctcagttttgactggctggcaagcagcgagggcggcacttgggactatgcggcattcattgccaacggaaatgttgaagcaacgacgggcggcaccgacaacgattgggcgaacttcatctatacggtgcccgcagacggtgaatacatctttgaatggacatatcaaaaggacggatcacgcgatcagggcgatgactgcgtttatgttgacgaggtgtgcattcttccggctgtcggcgttttgggcgatgttgacggagacggaaccgttacaatatccgatgctctcatgataatgcgcaatgccatgcagctgcttgagttcactcccgcacaggccgcagctgcggacatggacggcgacggacttatcaccgttgaagatgcactcaccgcacttcgcgcggccattaccgtgcgttaa

SEQ ID NO: 684 - DNA, 1017 bp, Unknown
  Unknown gut bacteria
atgaaagtattgcttaccggcggtgcgggatatatcggttcgcacaccgcagttgaattgatgaacgcaggctgtgatgttgttattgcagatgatttatcaaactcttgccgcgaagttgtgaaacgtattgaggaattgggcaaaaaacctgttcgtttctatgaaattgatgtgtgcagcgaggatgcgctcgaacaggttttttcagaaaatgatattgatgccgtgatccattttgcggggaaaaaggcagtcggggaatcggttgcgaagccgttgatgtattacaaaaataatctcgatgcaacaatgaatttgcttgaggttatgcagcgtcatgatgtaaacaagcttatcttcagctcatctgcgaccgtttacggcgtgccaaaagtcgttccgattgacgaaaagcagcccacatggtgcaccaacccttacggttggaccaaatacatgagtgaacaaatcatgcgggatgtttgtgcggcaaatccgaaactttcgatagttcttctccgctacttcaatccgataggcgcacacgaaagcggcaggatcggcgaagatccgaaagggattccgaacaaccttatgccgtatatatcgcaggttgcaataggaagacgcgaaaagctctccgttttcggcaatgattacgatactcacgacggaacaggagtgcgcgattacatacatgttgttgatcttgcaaagggtcatcttgccgcactcaaatatgcgcaaaatgaaaacggctgtgtcgaaatcaacctcggtaccggcataggctacagcgtgcttgatatcgttcacgcttttgaaaaggcaaacaacattgaaattccgtatgttataaccgaacgccgtcccggcgatatcgatgcctcgtttgcagatgcacatcttgcggctgagcttttgcattggcatactgaaaaaacgcttgaggatatgtgccgtgatacatggcgctggcagcagatgaaccccaacggttatcgggaggaataa

SEQ ID NO: 685 - DNA, 1227 bp, Unknown
  Unknown gut bacteria
atgggcgaaaacaaaatgcttatgcgtttttgcggcaaaacacccgtcgagctttgtgttgaagctttttgcggaattgccgatgaagccgttattgccgtttcgcccgacacggaggaaattgcacttacagcggcaaaattcgcaccctaccccgtgaaaatcgttcgcggcggaagtacgcggcaggagtcagtattcaatgccgtccgcgcagcatcgggtgcgatcgccgccgttcacgactgtgcccgctgccttgttgacagagaaaccattaaagccagcctgcgtgccgcagagcaatacggctgcggcattgcttccgtgcccgttgcggacacagttcgtttcggcgataccggagaaacgcttgacagaagcaggcttcttgcggcacaaactccgcaaagctttcgcagagatattcttttgaatgcatacagcaaggccgtcggcagcttcacggatgatgccgacctttgccgctcaacgggagtacagctgcatttttctccgggcagcaaacagaatctgaagctcacaacgcgggacgatattccgtattttgagtttttgctttcaaaacgcagtgagcggaatctcccctcgggcaatgtgtccgcaagatccgctgcggagccgcgctcgggaaacagcccggctttgtcagcaacggaggtaagtaatatgttcagaatcggcatcggcgaagacacccaccgccttgcagccgggcgaaagctcatcctcggcggcgttgaaattccgtttgaactcggactgcttgggcattccgatgcggacgcacttgctcatgccgtgattgatgccctcctcggcgcatgcgcactcggcgacatcgggcagcattttcccgacagtgatgaagcatttcgcggcatatcgagccttttgcttgcaaaagaggccgctgcacgcattcgctcggcaggctttgaaattgtgaatatcgattccgtgataacggctcaaaagccgaagcttgcgcccttccgcgaagcaatgcgtgcaaaccttgcagaggctctcggcgttccgccggaaaatatcggcgtcaagtttacaacacccgaaggaaccggtccggagggtaatcttgaatgcatcaccgttcgtgctgttgcagcggtgcggaaagtgcggatacagtgccgatacggatgcaaaccgactcaagcttacaacatgcaaaatgacttttga

SEQ ID NO: 686 - DNA, 1347 bp, Unknown
  Unknown gut bacteria
atgcagatatatttggaggattatatgtcagaactcacaaacattgaaaacggcaaagtcaagctcagcctcaaaatccccgcagaggattaccgcagagcattggaaagtgcgtaccgcaggaccggtgcacattacaacattcccggtttccgcaagggcaaagtgccccgcaaggttattgaagcaacctacggcgtgaacgttttttgggatgaggaattcgattcactcgttcaaagcgtttattccgatgcgcttgccgaacacaatctcgtgcccgagattcagccgaacattgagttcaccgaagtatccgagcaggacggcgtcagcttcaccgcggaagttgttctccacccgacggtcaaactcggccaatacaagggaatagaagcacccgttattgaatataatgttacggacgaagaagtttccgcagagattcagaaaaagctcaacgagatggcgaccgaagcagccgttgaggatcgtcccgttcgtcagggcgatatcgtaaccctcgattttgcgggattcatgggcgatgagcagttcgaaggcggcactgccgaaggctataagctcaaaatcggttccggctccttcattcccggatttgaagagcagatggtcggcatgaacatcggcgacgagcgtgacatcaacgtcaccttccccgaggattaccatgcggaaaaccttgcgggcaagcccgttgttttcaaggtcaaggttcacgcaatcaccgaagaaaacgttcccgaactgaatgatgaattcgttcaggatatttcagaatgctccaccgttgacgaatacaccgcttacgttcgcggcgatcttgaaaagcgcgccgccgaaagagcaaagaacgagcgcaccgacctcatccttcagaaagtcatcgaaaatgcggaagttgaaattcacggcgatatcgtctccgcagaggttgacatgcagatcgacaggttcgacaagcagcttcagtccttcggcgcagatctcaagagctaccttgaatacgcacacctttccattgaagatatgcgcaaggattatgagcaggccgctcagcgtcagctcaagtcccagtacgttatgatggcaatcatcgatgcggaaaaactcgagcccaccgacgaggatttccgcgaggttatcgcaatgagcgacactgcaaagcagcagcattgggatgacgaaaaaatcgatgccgaacttaaggacaaccgcatgaaatatgccgtatccgcgctttacaacgccgcagtcaaaatgcttgttgcaaacgccgttgttcccgcagcagctcccgcggaagaagcacccgcagcggaataa

SEQ ID NO: 687 - DNA, 1254 bp, Unknown
  Unknown gut bacteria
ttgccggctgatttcggcacggcattgaaatcgcagaaatatttcaaggttttaacggcaatgactgaaaaaaacaaaactcaggaaatcattacggaagcctcctcacaggggcttacggttaaacagcgggtgcagatcggcaaccgccgcagtgtcaaacggcgcaggaactttgttctgccgctggtctgtttcgcggtgcttttcgcgctgatgttctgcatcggcagcatcgaatcaaactccgccgcttcggcaaaatcccccgaaggcacgcctaacagcgggcttcagctcaccttcctcggagatatcatgatgggaaggtacatcgggcaaatgtgcgatgacaagggctacgacaggctcttcagcggcatttccggcatttggagcaactccgaccatgtttttgcaaactttgaaaaccctgtccgcacgggcgacacaagcggctatcaaaaacggcttgacggtattccgcttatcgcaagcgagaccgccgtgctcagtatgcaggcggcgggcatcgatgttatcgggttttcaaacaaccactgtttcgactacggcaaggcagggtacgacaattcacgcgcgtttttcgacagcatcggtctgacccatgcaggtgcaactccggatgacacgcagcccgatgttcctccgtacacagtcataacggccgaaaacggcaaaaagatcggtttcatcgccatcacctcggtttacagccccgaaaccgcgcacggcggagtgctgacaacaaaccatttcatgttctatcgctatatcaccgcttccgcacaggcaaacgacctcacggttgtttatctgcacagcggcaatgaatacaccgccatactggatgacaagcagcaggatgttgcacacagcatcattgacgcgggcgccgacatggtcattggctctcatccgcataatgttcagcctgtcgaactgtacggcaacggcattatcttttacagcctcggcaactttatcatggatcagagcaacacattcacccgcgacggcatcattgttcaaaacaacgaatccgaagacgggcgcaggtattttgaaaccatacccatccgcatcgatgacggctgcccgcgtgtaacgacaaaaggcttctatacgcgccgcatcaaccgtatacttaccaagctgctcgaatccgaaagctttacggaaaccgctgacgggcatattattattgaacttccgccgaaagtaaacttctga

SEQ ID NO: 688 - DNA, 2052 bp, Unknown
  Unknown gut bacteria
atgcacagcgatgagttgtccgaaagggcaataacttcattaaaaggaataggtcctgcgcgagcggagcaattcgctcgcatggggcttttttcgttgcgggatttgcttggatttatgccgcgcggctatctggatttttcacgtgaaagatgcatctctgatattgaggacggtgaagcggcagccgttcgtgttgaattcatcggtccggcaagaacgatacgcgcaaaaaacggaacggttgtaacaaatgtttcaatcggcgattcgtcgggaaatatgacagcggtatggttcaatcagagctttatgcagcgaaacataccgcgcgaacccggaggatacatcctcggttttatggacaaaaagcatggcgcaaaatttgtgcgcgcagtgttttcggagacgctgcccggcgtgcttcctgtgtatcctcttgttcgcgggttgacacaaagtgttgtcagaaatgctgtccgtgcagcacttgatgcctgcggcacgggcatgatgcaggagaccttgccgcgcagtgttctgtcggaattcaatctcatttcgcttaagcatgcaatacattccgtgcattttccgcatgatgcggaagagcttcgacaggcgcggcgcaggcttgcttttgaagatgcgttgatgcttacgattgtgctgcaaatgcttcgacaggagcgcggcagagaacgtggcattgcatttgaaacaggcggcgttcgcaatgagttcattgaaatgcttccgtttgaactgactcccgcacagtgcagtgtaatggatgaattggaacacgatatgtccgctccccgcgcaatgaaccgtctgattcagggggacgtcggttcgggaaagacggtgcttgcaatgtacgcaatgtatattgcgatgaaaaacagacgtcaatccgttttgatggtgccgacagaaatccttgccgaacaacattatgttcagcttcagcgatacttcggagaaaaatgcgcactgttgacagggaaaacaactcagaaagaacgcattcgcattctgaacggcattaaaaacggtgagattattgcggtaacaggcacacacgccttgattcagagcaatgtagagttttataacgtcggccttgttgtgacggacgagcaacataggtttggcgtgcatcaacgcgcattgctgaataaaaaagctgaatctccggatgttcttattatgagcgcaaccccgattccgcgaacgctttcgctgatactgtacggtgaccttgaaatttcagtagtaaacggaatgccgttgggacgaaagccgattttgacacgacttgtgccgctgcaaaagcgcgtttcgatgtatcgctatattgaaaactgtgtgaaagagtcgggcattcaggcgtatgttgtgtgcccgcttgtcgatgagcaggatgaacaaaatgaatcggaattggctttttgcggggttccgtccgcaaaaggtgtttttcgggaactgtcgcaaaacctaagcattcctgtcggtctgctgcatggcaagatgaacggaaaactaaaaacttccgtgatggagtcctttcgcaccggggaaatcaaactgcttgtttcaacaacggttattgaagtcggtgtggatgttccgaatgcatgcataatggtcatagagagtgcggatcgtttcggacttgcgcagcttcaccagcttcgcggccgtgtcgggcgcggcgaaagggaaagcttctgctttcttttgccttcttcggagtcaaaaagtgcaaatgcccgtctcaagctgatggtgcagaccaatgacggctttgagattgcggaaaaggatcttgaaacgcgtggtcccggcgagcttatggggatgcggcagcatggtgtcagtgagttcgcggcagcggcattggcggcggatctttcaactttgaatgctgcaagagattgtgcacagcggcttttgacgaatccaagcatggatgactgcggtattgctaaccgtgcaatgaacagattccgtgctgttcgtgaccaaatcagcattaattaa

SEQ ID NO: 689 - DNA, 1476 bp, Unknown
  Unknown gut bacteria
atgcttgacaaacaacagcaggcagcgataggatttgcctacataattgaaaatttgcagacttgttcccccttcggagaggagcttgcgcggaatacccatgcgtatccgtgtgaagagaatgcgcggctttgccgcgaactggaaaacgttcgcctgcttgcggaaacgatccgcagcgatgccgcaagggaggcactgtccgccgccgagcgtgcgctcatgcagcttaaagatgttcgccgttcggtcgcgcgaagccgcgaaatgacgcttacagacgttgaattcttcgaaattaaacgttttttgataaggcttgatgcgcttgcggaggcattttcaaagattccctgcggcgaaaggctgaatgaaatcgatattcaccctctgccgcgcgcgctttcaatagtcgatccggacggaatgcgcgcaatgacttttcgcgtgagcgacagcgcatccgcggagcttgcgaaaattcggcgcgagcgcaaacgggttgacgccgaactgcgccgagatcctgtcgaggggcgggatgcgcttgaagcggaaagaactctgcttgccgcaagggaggagagcgaagaactgcgcatccgcacggagatgacaagagcttttgctgcacattccaacgaggcggagcaggtgattaaaagcattgcaaggttcgattttgcgcttgcaaaagcaagacttatgtgcagcaggggcggcagcattccgaaagtttatgcaaacgggcagcgggttcttcttaacgaaatgattaacccgcagacagccgacgcactgcactcgtcggggcgaaagtttactccggtcagcatcgaacttttatccggttcaaccgttatcacgggcgcaaacatgggcggaaaatccgttgcggtcaaaacgcttgcgctgaacgtgctgcttgcgctgtgcggtttccccgttttttgcagggaagccgaattgccgcattttgccggcatacacttgctctgtgaggatatggaggacagcttgggcggactttcgagcttcggcggggagatgattcgctttgacggcattctttccgaaataaaaaccgaaagcactgcactcgttctgcttgatgagtttgcgcgcggaacgaacccgcacgaaggtgcggcgcttgtgcgggcggcagtgaagtatttcaacaatcgacgcggctgttttgcgctgataacaacgcatttcgacgatgttgcatgctgtgcgcccatgcattatcaggtcatcgggctcaaaaacgttgaacctgccgtgcttgatgcagcattggcgggaaacgatgcttcgagggcttccgtgctgcctaagctcatggactacggattgtatcgcgttgcaagcgatgtgaatccgccgcgtgatgcgctggcgatttgcaaggcaatgcgtgtttccgatgagttcatgcgctgtgtaaatgcggaggaaacaaaacagtga

SEQ ID NO: 690 - DNA, 1638 bp, Unknown
  Unknown gut bacteria
atgaagttaagcgtgttccgaacggggattgcggaaaacacaggcttaaacctttctgctgaaaccgtatcgctcggagtaattgcaattccaaacgtgcaatgcatcggaggcaggataacaatggcggatttgtatttcagatgcggaagcaaaagcgaggctgacagccttgtcgagtcggcgcgggaatttgccgaaaaacatgaaatgtcaatagaacatgtaatttttgaccgacaggacgggcggacaattatgctgaacatgtatgccgattcggccgtgtacagggagccgacaacgctcctcgttcgcaattatgcctgcctcggcaattcggagatacaacggcttacaatgcataaaaaacttgtacgaaacgggctgacggtcgtttttgaaggcggaagcccgattgcggatgaaagaaagctgattctccatacaataaaatcctattacagctgcggcgatgaatgggaacggaaatatgccggggaaagtcaatcggcacaagtgcggacggagccttttcccggggcgaaatacgcaatgccggtgccgttcggatacagattcgaaaacggagcaccgattgcggatcccgctgagtccgttgttgtgcggaagatatttgaaatgtacaggcacggaaccggtgttatcgaaattgccaaggaagcgaacaggcttttggcggatatcaggaatgaaaacggacagaatacagccgatgccaagccgcttacgcgtcacaacgtgtatgcaatggtcgaaaacaacagatatttcggtattgaggaaaaagacgggtttgcaccctatcccgcaatcgttccgaattaccttcggctgtatgcagcgcgtatcaacagacaaagaaaggaaaaggcggaagcggggcacagatttatgtttgcaaacatcctgcccgtcggcctcggaacagttttgcaaacggtcaatattgcctctccgtacaagcctgaaatcaggttttattgtgaaaacggcaaaataatcgttgatgccgtcaggtttgaaaatgcgatttacgatgcattgtggatgcagctgagaaacggaagcgaacgaatggaaagagctgttcgcagatacattgccgaaaacaggaaaacggcggaggcaacccgaaacgatgtttacagcagactggaaatgattcgcgaggagataaaccgcatcggtgaaaacggatggagcgaaagcctcatgccgcatatgaatcgtgcaggctgttttgacgatttcaaaacggcgtacgacgagctgagggaagagtttaggtgtgcgcagctcgaatgcgagcttttgggcgttacaggcgttcaaatttcaggtttttttgctcatgccgccgatattccgatacagtgcgcggaggaaattcggtttttctcctccgtattcattaaaaacatcctgattgacgaggaaagaataacaataaaaacacttggcgaagagtggggcgatgcatcgatgccttcaaacggcgtagtgcggtttgcgaagaatcaactgaaccattccgacacggaacgtttcgattcggactgcaaaaatcacgaatgcagcaccgaagacgaaaccgtgcacaatgtgacgggatga

SEQ ID NO: 691 - DNA, 1074 bp, Unknown
  Unknown gut bacteria
atgatcgttgtcatacctgcatatgagccggatgaaaagcttttgcgtcttgtggacgaactgaagcagcaaacggactataaaattattattgttgacgacggcagcaagaatgcggaaagcaaggatgttttttcaaagcttgaagcggattccgctgttacagtgctgcaccataaagtcaaccgcggcaaaggccgcgcaatgaagactgcgtttgaatacataaaggatgcggggttttccgatgacggtgtaataaccgttgatgcggacgggcagcaccttataaaagatatcgtggcagtcagtgaaacctgggcaaagaacccgaatgcgcttgttctcggcagcagacgtttttccggcaaggtaccgctccgcagcagattcggcaacggtgtaacacgcggcgtgtttgcgatttcaacgggcgttcgcgtttacgatacgcaaacggggcttcgtgcgttctcaaccgaaaagcttgatgacatgctcaaaatcggcggcgaacgctatgaatacgagattaatcagctcctgacatgcaccaaaacgcatgtgccgataatcgagcacaccatagagaccgtgtatcttaataagaatgagacttctcatttcaacactgtaaaggattcgtggcggatatacaaaacgatttttacgttcgttttttcaagctttgtcagctgggctgcggattatatccttctgcttgtgttcaatgcgatactcggcggcattacgggcggtgcggcggtcaggcttctgtcatttgatcttccgccaaagttcttcgcgcttgtcggagcacgcacgataagctccttgctgaattacttccttaatcagcggcttgtttttcaaacaaagtccaagggcagtgtcctgcgctattacatccttgttgcggcgctttttgcgttgaactacggtctgcttcagcttatgggaaaaatcggcatcgcgctctggcttgcccagataatcgcacagcttgtgatttacccgctgagctttgtaattcaacgaaaatttgttttttgcgagaaaaataccgcagcataa

SEQ ID NO: 692 - DNA, 2376 bp, Unknown
  Unknown gut bacteria
atgaaagcatttcgcaaacccatcgcattgcttgtggccttgctgatggcaatcattcctttttgcggctttgcagaagccggccccgttcgaaccgagcttgacgacgcattgaatgttccgggcggaacactcagcttttccgatggcggaacagaatatcccatgcaggctgtcacagttgatgagcgtgtctgcgcaaagacaacaaaccaaaccgtcggcagggcaacctcctctgtaacgctgactgcaagtgttgcggcgggcacggttttgaaatacgacatcaaaaccagcacggaacctacctacgacaaattcacgctcaccgtgaacggtgccgtgattgcagcgcacacaatgcatggcataaacgattggacggaaaagtcctatgtcgtgacagaggcaggcgacttcactttcgttttcggttataccaaggattcttccgttgacaggaacgaggataccgtctggttggacaatatccgctttgaagagcctgtttccgtgacgggaatcgaacttcccgcaaatgaaaccgtctatatcggcacgccgctcacgcttgttcccgttatctctcccgaaaacgcaacgattcaaactgttgcatgggcaacggacaacgaagaggttgcaaccgtcaacgcggcaggcgttgttaccgctgttgcgcagggtgaatgcaatatcacggcaacaactgccgacggcggattcaccgcaacaactcatataaccgtccctgcgcccgtatcgccggaatccgtcgaattgaatttcaccgagggcgatctcgcggcgggcagctacgttaccaatgtttttgcaacagtacttccggaaaatgcatacgataaaacggtaacttgggaatcttccgacacaagtcttgtgaccgttacctccgagggcaaaatctccgcaatgagcaatgtaagcggcaccgtcgttgtcactgcaacgacagcgaacggcctttcggcttcaatcacaatcaacgttatcgcgcccgatgatatgcccgggcttgcggatttttcgttcactcccgctgaagtggacaccgactacaccggcgttattgcgtggaacgttgttccccacctgcgcttcccacggtcaacggcaacaacaagcttcctgtcaaccaccaacgctgtcggatacgaatttgagcttgttgaaggcaaaacatacgatttcctgacttattcgcccaacgggctgcgcttcgacacatatctcaacgttatcgcacccgacggcagctatcttgtttgcgacgatgaatccgcagggctcggattcggacagaaacttgatgttactgcaccgatgagcggcacatatcgcgtgcttgtttccgcttatcattattacggtgccggcgaatacggtctccgcgttgcggaacatccgtacattgcgccgaccggcgttgagtttgcggcggacagcacggaactccccatcggcggaacggagcggcttgtttacagccttattcccgcaaatgcaacaaaccaaaacgtaacgttcacttcctccgatgagtccgttgtgaccgtcagcgagaacggcattgcatccggcgttgcagtcggttcggcaattatcaccgtaacaaccgaagagggcggatttaccgacacgattaccgtcaacgttgtgaaccgcacggttctgttcgaagaaacatttgacaacagccccaacgacagatgggttcgccgaacgggtgctgcaagcgatacctattggtatttctcaaacggtgcaaaggcacatggcggttcgggcggttttgcggcatccgactcctttgatgaagactattccgcaagccccgacaactggctcatctcccccgccattgagctttccggagacagtgcggtctatactcttcaatatttcgtctcctgcgacggatttgccggtgaacattacgaactcagactcagcacgaccgataatttgaatacgagctttaccgaggtgcttttgagcgaaacactctccaacacttcatatgaggcgcgcgttatcgatctctccgcatataaaggacagacaatttaccttgcgtggcatcactgcgattgcacggatgttatgtccctcctgcttgataccgtaacggttatcggcgcgggcggcgaaacccccgaaccggttcccggtgatgtaaacggcagcggcgcgattgaaacagcggatgcactcctcgttctccgctatatgctcggcatggaaactcttacggaggaacagcttgcagcggcggatttcgacggcagcggtaccgttgatcaggcggatgcactgctcattcttcgcgctgcactcggaatcggcgcataa

SEQ ID NO: 693 - DNA, 1215 bp, Unknown
  Unknown gut bacteria
atgagtttaaacgataagcccgccgccgaacgggtgcatatcggctttttcgggttgcgcaatgcgggaaaatccagccttgtgaatgctgtcacgggacagaatcttgcacttgtttccgatataaaagggactacaaccgatcctgttcaaaaaactatggagctgctgccgataggtcccgttgtcatcattgacacgcccggcattgatgatgaaggtgagcttggctcaatgcgtgttgagcgtgctgaaaaaatgctgcaaaaaactgatattgccgtccttgttgcggatgccgctgcgggtcttggcgaacacgaaggcaggcttatgcgcatttttaccgataagaaaattccgttcgtcattgtcttcaacaagtgtgaccttttgagcgcgattccgaagagcaaaagtaacagcctttacgtaagcgcaaaaacagggtttggaattgacgagttaaaaaatcgactcgggtcacttctgccttccgccaaacacgaaagaatgctcatcgaagacttgatatcgccgaatgacattgttgttctcgtaacgccgattgatgaatctgcgccgaagggacgacttatcctcccgcagcagcagatgatacgcagcatacttgatgcagccgctgtcaacattgttgttaaggacacggagcttgaagctgctctcgccgcaatcgcacgcaagcctaaacttgttatcaccgattctcaagcgttcggaaaggtcagcaaaatcgttcctgaagacatattgctgacgtcgttctcaatcctgtttgcccgttataaaggtgagcttgaacctttcacggcaggcgcagcaaaactcaacatgctcgcagacggcgacagggtgctgatttcagagggctgcactcatcacaggcagtgcaacgatataggaacggttaaaatgccgggatggataaaagagtatgcaaaaaaggagttgttctttgatttcacctccggcggagactttccgagtcttgatgagcttcgtaaatatgccttggttgttcactgcggcgcatgtatgcttaatgagcgtgaggttcattcaagacttgaaaaagctgaaaaagcaggtgtcagcattacgaattacggcattgcgatcgctcaaatgcacggaattctgcggcgttcactttcgccttttccccaattgctgcaaaaactgcgggagcgttaa

SEQ ID NO: 694 - DNA, 1827 bp, Unknown
  Unknown gut bacteria
atgtgcggcatagtcggctatataggagaaaagaaagcaactcccatccttttggacgctttggaaaagcttgaataccgcggttacgattcggcgggaatagctctcgtgtccggaaaaggaataaacatttttaaaacacgcggcagaattgctgatttacaaaaaataatcgatgctgctccggcagatgattcctgcgtcggcataggtcatacccgttgggcaacgcacggcgaaccgtccgatttgaatgctcatccgcacagatcgaagagcggcagagttgcggttgttcacaacggtattgttgaaaactatcttgaacttcggcagtttttgatcgaacacgggcacagcttctcaaccgagacagattcggaagttgtttccgaacttattgactactgctataacggcgaccctgttgcagctgtccgcattgccgaaagcaagataaagggctcgtattcgttcgggatactgttcaaggattatccttggcagattatcgccatgcgcaaggacagcccgcttattataggcgcaggcagaggcgagaactttattgcgtccgatgtccccgcaattcttaagcatacacgcgatgtatacaggcttggagagcgtgagcttgcaatactcacaaaggacggcgttaccgtcattaattcttacggcgaacgtgtaaattgcgtttacgaacacattgactgggatgcaagtgcagccgaaaagtgcggatatccgcactttatgattaaagaaatcatggaacagccggaagccattgcaaaaacaattgctccgcgcatttcgaacggcagaatcgaactcggctttaaacatattactgccgaaatgctgaaaaaggtgaattcgattaagatcatcggctgcggttcggcttaccatgtcggctttgttgccggttatttcatgcgtactgctctgcgcattcccgttgaatctgttctcgcttccgagttccgttatgacgatccgatagttgacgagaacacgcttgccattgttatcagccaatcgggcgaaactttggatacgctttacggactgcgcgaagcaaaaaaacacggagcaaagaccattgcaatcgtgaacgttgtcggcagcacaattgcaaacgaaagcgaagatgtcctttacacttgggccggtcccgaaattgccgttgccacaacaaaggcgtacagcacgcagcttgtgcttatccatcttttgatgctgtgcattgcgcaagctcaaggcaagatgtccgaacaacagatcgcgcatgaaatcgaatgccttgaaagaatacccgagcagcttaaattcatgctctcgaacgttgagcaggttcagttccttgcatcgcagtttttcaacgggcgtgatatgttcttcatcgggagaaatgtcgattacgcactttcccttgaagcatcgctgaagcttaaagaaatttcttatattcattccgaagcgtatgctgcgggagagctgaagcacgggaccatttcactcattgagaacggtacgctcgttatcgcactgtgtacatacaggccgctgctcgaaaaaatgatctcaaacatcaaggaagtcaaagcacgcggggcaagtgtcattgccgtcatcaacgaagaccatgcacagactgaaaccgttgcggactatgtgataagaattcccgaatgcgaaagcattgcaacaccgtcgctgacaattgtgccgctgcagttgtttgcatattacattgcttcactcaaagggtgcgatatcgataagcccaggaaccttgcgaaatccgtaaccgttgaataa

SEQ ID NO: 695 - DNA, 1806 bp, Unknown
  Unknown gut bacteria
atgaaaagatcaagcctgttcagaataattctttatattgtgtgcgcaatcacggtgctgctcgtgatacttgttgcgtgccttttttccgttgtcgggcatgaaatgtacgccggaatgaaaattgacgaactgaagccgaaagcgcagtcaatatcgcagcgcgtgacaaagctgtatgaatcaaacacggacaaacgcacgcttgcgaggatgctgcatctcggcgaattttccgcatcggatgcaacaatttacataatcgaacctaacggtgcggttgttacaacggcagaacaggatgagtacgaccaaagcgttgaaaccgtccgccgctgcttccaaacggtcattcagggggaagaaattgctcttccgtcaaccgatataggaattgttgtcggcacgccggtgtattccgattcgggtgatataatcggttccgtgatacttgttgtcggttcaaaacaggctgaaagcacgcttgcaaagcttgcggtggaactcggccttgcaatgctcggcattgcacttttgatgcttattccgatagttatcatattcagcaaggtaacaaagcccattcggcacgtttcaaacgttgcgctgcaaatggcggggggagacttgaccgttcgcgccaaggaagagggaagcaacgaatcgcgtcaccttgcgcaatcgttcaatattcttgcggaagctcttcaaaacaatattgacagccttgttgttgagcgcaacaggctgcgcaccgtgcttgacggcatcggcgagggcattatttccgtggataaaacgggcgttgtcacgcattacaactccgcttccgtgcagcttttgggcgggaaggaaaatacccaccccgcagcggcggccggttatccgaaaattgctgccgtggcgatagaagctcttgatacggacgaagtgcgcaactgtgatttcacgatcggcgaaaggatgctccgcattgcggcaaccccgattcacgaggagaacggttcgcttttcggtgcggttgtgctgataacggacgttaccgaaagcgagagacttgaacagacgcgaaaggactatgttgcaaacgtcagccatgagctgcgcacgccgcttgcatccattcgaagccttgcggatgcgcttaacgacggaatggtgcaggatgaaaaggacagaaaacgttactacggctatatcctgcgcgaatcgatacgcctttcaaaccttatcaacgacctgcttgaactttcaaggcttcagagcggcggcgttgcgttctcaaagggacgggttgaactttatgaaattgcatacgatgttgcggacaggatgaacgatgcggcggcacagcgcggcaaaagcgtgcggcttgaagctcccgagggcgaatactatgcgtacacaaatgccgaccgcattgagcaggtgctcatagcattggttgacaatgcgataaaacacggaacggacggctgcactgtcagcgtgaacctgtttgaaaatgcggaaaagaatcgctatgagtttgttgtcagcaatcccgcggaagttgatcctgccgaccttgaacatctgtttgaacgattctacaaagcggatcatgcgcacacgggtgacggcaccggactcggccttgcgatagtttccgaggtgcttaaccttttgggcgaaaaaatcgatatcgagtatgagaacggaatcattgcgttccgtttcacggccgaaaaatgcagcacgccgaaaaaacaccgcgccttgcagaaggcggagaataaaaatgaggacggggaaccgacggcctga

SEQ ID NO: 696 - DNA, 4476 bp, Unknown
  Unknown gut bacteria
atggaagaattgaatatgtacgaaaacataaatgagcacggcggaacacccggctcggctgcgccggctgatgctccgttggacgatcttccgccggctgacaatttctccgaaatgacggctgatgttccgtggagggatgatccgccggacggggggtattattcgtactcggagtacggggaatccggcatcgatgagtgcaggcagcccgattccgtgcgtgcaaaaaatcaaaaagaaaattcagcagagaagaaaaagaacggcggacactcaaaaaagaatcttgccgttgaatatcttgcaaacgggacggtttcaataaagtctgccgtgcgcagcaaaaaaacgggcgaaatcagtgttgatgtcgagtgtgcgcgcctgctgctgcctgccgaaacggaggagctggaaaaaaacatacaggcggagcttcaatatcaaacggtcaaatgcagctttgactattccgaggttgttgcgcggcttgtcggcggagaaggcgaaccggaactgctgcttctggatctttggtgtgaaactgcaccgcagcttgaaccgatactgcgccgttcccgcgttgaacggcacggaggcgaatatgtattctttgttccggaacggtacacgcgtgcagtgtctcaggcggcggcaggtgattttcgcgcatttgttgcgcacagttacggttggaatacgccgctgcgcattgttgccgatgcaaatgcggatgacggaatcgatcttgccgaaccggtcgtaaagcgcgattggggcagtgcggcagctttgaaaaaacccgtcaaaacgcagcgcaagaacattaaaaagctttctcccggcgatattgtttacggaaaagaaattctcaaacctgaagttcagcgcatggcggatctggacgataaatccgggcgcgtcactgtaaaaggaacaatactgagcattgaaacatttgtttcaccaaagcgcggaacggttataatcacggtttttataaccgacctcacaaactccgttgcggtaaagctatttcccgatgaagcagcaaaggcgcgaacttcacagctgcttgaaaaagcaaaggaggagggcgcggcactgatggtgcgcggctggttcaggtacgataattatgcccgtgattactgtatttttgcggacgatataaaccgttatcccgttgagcgcagaactgatgcatcagccgaaaagcgcgttgagctgcaccttcacacaagaatgtccgcaatggatgcaacggcggatctggacaaagttgttgagcttgccgcaaaatgggggcatacggcaattgcaataaccgatcacggcgttgtgcactctttcccggaggccaaaaaagccgccaaaaagaacaacataaaggttatattcggctgcgaaggctatctgcttcccgattgcgaacttgttccgcttgaaagggagtattgtgccgttgcggtgacatatttcggaagcggcattcacgggcgcgtgtttgatatcggcgcagtgaagttcgattcgttcgggcgcgttatttcaacattcagaactccggtgaaccccggcgtccctcagcttccgcgcattgcaaagctgacgggctacacggatgatgatattgacggtgcacctctgctttccgaagcggtgaatatgctttcggattttgcgggaggggcggcgcttgttctgcattgcccggaacagcttgatctgctgcatgaactgactgccgcggcagggcacggaaaggaactcgggctcagcaaaaactgcgtttcgggctcaatgctgatgcagtatctgcgccgtgacttaaaggcggaggaaagacagcttccggagctgaatgcgggtgcggcagcggaatggacagcaaaaaacacggccgatttgctgagcaaatgccgcgagctgaatgtttcgacggttccgctgattgactgcacgataaaaaatcttcacaagcagaaaacgaaccacatagtgctgcttgcggcaacgcagcccggacttaagaatctgtataaattggtttcgtattcaaaccttgaccatttttataagacaccgcgtattccgcgcagtcttctcaacctgcaccgcgagggtattataatcggcacggcatgtgaggccggtgagcttttccgtgcaatggtggacggaaaaagcgaggaggaattgctgaagatagcttcatggtacgattaccttgaaattcagccgatcggaaacaatgccttccttgtgcgcgaggggcttgcaaaggatgatgaagagcttcgcgatttcaaccgccgtattgttgcactcggcgaaaaactgaacaaacccgttgttgcaacgggagacgttcattttatcgaaccggaggattcgattttccgcgcaatactgatgtgctctcagaatttcaaagacgcagcggttcagccgcctctttatttcagaacaacggaagacatgcttgcggagtttcaatatctcggcagtgataaggcgtttgaagttgttgttaagaatacaaatttgattgccgatatgtgttctcagctccgcccgtttttggacgaaaaacaaacttactcgccggaacttccgggcgcggcggatgaacttaagggacttgccctgaacaccgcacacgagctttacggggatccgctgccggaaatcgtccaaaaaagactcgataaggaattgaactcaatcatcggcaacggttactcatcactctatatggttgcgcagaaactcgtttcaaaatccctcagcgacggctatcttgtcggttcaaggggttcggtcggttcgtcctttgttgcacaccttgcagggataaccgaggtaaacgcgctccccgcgcattatcgctgcccgaattgcaaatacagcgaatttcccgatgtcggcgatgactcacgctgcgggattgaccttccgccgaaagattgcccgaactgcggaactccgctgcgacgggaaggatatgaaattccgtttgaaactttccttggtttcaagggtgataaaactccggatatcgatcttaacttttcgggcgaatatcagcccgttgcgcacaagtttacggaggtcatgttcggtgagggccatgccttccgcgcgggcacgatttcgggcgttaaagataaaaccgcatacggttatgtgctgcactattgcgaggaatacgggctgaacctttccgaagcggaaaaaaaccgtcttgcaatgggttgcgtcggcacgcgccgaacaacggggcagcatccgggcggcattgtgatcgtcccggaagatttggagatttttgacttttgtcccgtgcagcatccggcggaaaaaatcgatgcggaaagcataacaacacactttgacttccatgcattggacgacaaacttgtcaaacttgacattctcggacatgatgacccgacaacgctgcgaatgcttcaggatataacgggaatagatccgaagagtattccgctgcacgatgaagaaacaatgtcaatctttaaatcggatgaggcactcggaatatcccttaaggagctgaaatgcgatgtcggcagcctcggcattcccgaattcggaacgaactttgttcgcggaatgctgatggatacgcgtccgacaacaatggaagagcttgttcgtatcgccggactttcccacggcacggatgtgtggcttaataatgcgcaggatcttgtgcgggacggcactgcaacgctgatggaggttatatgcacacgcgacgacattatgaactatctcattgcgcacggcggagaaccctcgctgtcgttcaaaacgatggagagcgtccgaaaaggcaagggacttaaacccgagatggaggatgcaatgcacgagaacaatattccgcagtggtatatcgacagctgcaaaaaaatcaagtatatgttcccgcgcgctcatgcagcggcgtatgttatgatgtctttccgcgtagcatattataaggtgcattacccgcttgcgttctatgcggtttatttcacggttcgtgcggataaatttgatattgaacagtgtctcggcggcgcggaacgcgtactcggcaatcttgaggagcttaaggcaaaggataaacttgaaacaaaggacgaggaacagatagttatccttgaaatggtctacgagatgaatctgcgcggaatcgagctgctcccgatagatatttacaaatcgaaagcaacgcgtttcactgttgaggacggcaagcttcgcccgccgttcaatgctattgccggcttgggcgataacgccgctctgctgattgaaaaaggcgcggagggaggacgattcatttcccgcgaggagtttgtgaagcgtacccgcgcaaattccgccgtgatggaaaagttggatgccctcggatgccttaacgatttaccggacagtgatcaggtctcaatgttctga

SEQ ID NO: 697 - DNA, 1995 bp, Unknown
  Unknown gut bacteria
atgcaaagaataggcgtttttgtatgccactgcggcacaaatattgcgggaaccgttgacgtgaaagcggttgctgcggcactcgggaacgagccgggcgtcgttgttgccgaggattatcaatatatgtgttctcaggcgggacaggatttgataaaaaaagcaatccgcgaaaataatcttaacggagtggttatctgctcatgttcaccgcgcatgcacgaggcaaccttccgcaaaacagccgcctctgcgggtctgaacccatacatggttgaaatcgcgaacattcgcgaacagtgttcatgggtgcataaggatatgccgacaggaaccgaaaaggcgatcatactcggaaaagcagctgttgcaaaggtcaaccttaatgcaccgcttacggcttccgaaacgcccgtcacgaaacgtgcgctcgtgataggcggcggcattgcgggtattcagactgctcttgatattgcagatgccgggttcgaagttgatattgtcgaacaaaaacctacaatcggcgggaagatggctcagctcgacaagacttttccgacgctggactgcgccgcctgcattctgactccgaagatggtcgatgcagctcaaaatgaaaaaatccgaattttcacatattcggaagtgacggaagtccatggctttgtcggaaatttcgatgttaccataaagaaaaaagctcgctacgtcaacgagaacatttgcaccggctgcggcgcatgtaccgaaaaatgtcccatgcggaaggtgccgaacgagtttaatctcggcatggacaatcgcagcgcaatttatatcccgtttgcgcaggcaattccgaaggttgcaactattgaccccgagcattgcatgatgctgaaatccgggaaatgcgggttgtgttcaaaagtatgcacggcgggtgcaattgattataaagcaaaggatgaattcataacggagaaatacggcgcaatcgttgccgcaaccgggttcaatccgatttcactcgaaaagtttgatgagtttgcatattctcaatccaaggatgttgtaacgtcgcttgaattcgaacggcttatgaatgctgcggggccgaccaagggcacgctgcttcgcccgagcgacggcaaacatcccaaaaccattgtttttgttcaatgcgtcggttcgcgctgtgcggcctgtgcggataagggcaaggaatattgttcgaaagtctgctgcatgtacacagcaaaacatgcgatgctcacaagggataaatatcctgatacggatgtttatgttttctacattgatgtgcgcaccccgggaaagaattttgatgagttttaccgtcgtgccgttgaggagtacggcgtgcactacatcaaaggcatggtaggcaaggtttcgcctgagggggacaagctgaaggttcaggcatcggatttgattgcggggaaacagctgcatatcaatgcggatatggttgtgcttgctgcggcaatggaaccggataaatccgcaaggcagcttgcaactatgcttactgcaagcatggataccaacgatttcttcaccgaagcgcatccgaagcttcgcccggttgaaagtccgacggcaggagtgtttctctcgggagcgtgtcaggggccgaaggatattccggagacggtcgcgcaggccggtgctgccgcaagcaaggtcataggtcttctttccaaaaacagactgacaggcaatccctgcgttgcccattcggacgagatgatgtgcaacgggtgttcaacttgtgaaaaagtttgcccgtacggtgcgattacatacattgaaaaggaattccgtatgccggacagaacgacgaggatccgccgcgttgcaagcgtgaatgaggcggtgtgccagggctgcggtgcatgtaccgttgcatgcatgtccggggcaatggatcttaaaggctttatgaacaaacaaatcatggcggaggtggatgcaatatgccgatga

SEQ ID NO: 698 - DNA, 2175 bp, Unknown
  Unknown gut bacteria
atggacagattgaccgctgccttcgaaaaaaagtttccgaaggaaaaaaccgaattattagtaaaggcaattaattttgcaaaatcggttcatgctgaccaaaaacgcgaatcgcaggaaccttattatattcatcccgaagccgttgcgctcattctgctcgatatggacatggatgcagacacggtcattgcgggtctgcttcatgatacggttgaggatgggcacgatatcaccgttgaaaacattgcacagatgttcggcaaggacattgcccgaatggtggacggcgttaccaagctgaccaacagcaatctttcccacatgctgtcaaaagaagacagacaggccgaaaatctgcgcaaaatgttccttgcaattgcaaacgatgttcgcgttgttgttatcaagcttgcggacagactgcacaacatgcgcacactcggttattgttcaaaggaaaagcgtgttcgcaaagcacgggaaaccatggatgtttacgctccccttgcggacaggttcggaatgggtgccataaaagtcgaacttgaggatttatcgttcagctatctgatgcccgaagaatgccgccgccttcagtcccttatcgaaccgaagcaggaagaacgcatgggactgctcaaaaaagccatgcacaagcttgaaattgcacttaaggatgccggaatcaaagcggaagtcagcggacgcagaaagcatatttacagcatctatcgcaagctgaacataaaaaaagtcggactgaacgagatttatgatcttgttgcacttcgcataattgttgataccgtgcaggactgttacggtgcgctcggcattgttcactcgctttggcgtcccttccccggcaggttcaaagattacatttcaatgccgaaaaccaacatgtaccgttctttgcacacgtcgcttttcagtgatctcggaatgccgtttgaggtgcagattcgcacttgggaaatgcaccgcactgccgaatacggtattgccgcacactggatgtataaagagggcagaacacggcaggatgagctggacacaaagcttgcgtggctgcgtcaacttgttgactatgattccgatgcaaactcaacaaaggaatacgttgacaacgttcgacacgattttttctccgactatgtttttgttctgactccgaacggcgagattatcgacctgcctctgggctcaacgcccgttgattttgcttaccgtattcattcgaacgtcggcaaccacacacagcacgcaaaagtcaacggtgcgcttgtgaagcttgactgcaagcttaaaacccacgatgttgttgaaatcattacgaacccgcaggcaacgccgagccgcgactggcttaactttgtaaaaacatcccaagccaaagcaaaaatcaaacaatggttcaaaaaggcgaatcgtgaagaaaatattgtccgcggcaaagaaatgcttgccgacgccgcaagacgacaggggcagaagcttgccgaccttacgaaggccgaattgtgcaaacctctgttgaaacgcttctccatgaacgaaatggatgatatttatgcggccataggctacggcggaattacaaccgggcaggcattgcataaactgatggaagcccggcgaaaagttcagcgagaggaggagcttgcgcgcaaacttgaagagcaggaacacgctcccgcaaaaagttttgacgcaaacggaagagccgtcattgtcaaaggcgaggccaacatggttgttcgctttgcgcaatgctgttctcccctgcccggcgatgaaattttcggatatatcacgcgcggcagaggtgtttcgattcacagcagaaactgcccgaatgccgcagcactgcttgccgatgcggacaggataatcgatgtttcatgggcggacggcgaaagtgcaaaattccccgtaacaattcatatcgtcgcttcggaacgcgtcgggctgctgatggatatttcacagatgctgatgaacatgaaaatcaacatcaatcttgtcaacgcaaagcctgttgaggacggcacaaagatcgaagcaaccatggggtttcaggtccaaaacgccgagcatctcgacagcattataaaaaatcttatgaaaattaacggtgtaaaatccgtttcaagggtgagatccgtatga

SEQ ID NO: 699 - DNA, 2901 bp, Unknown
  Unknown gut bacteria
atgaaagattgcataacaataaaaggcgcacgggagaataacctgaaaaacatagatttaactgttccgagagataaactgattgtttttaccggactttcgggttccggaaaatcttcacttgcgtttgaaacgatttttgcagaagggcagcggcgatatgtcgagtctctttcgacatatgcccgccagtttttgggccaaatggacaaacccgatgttgattacatcgaagggctttcacctgcggtttcaattgaccagaaaagcacatcaaacaacccgaggtcaacagtcggtaccgttacggagatttatgactatctgagacttttttttgcgcgtgtcggcgttccgcattgtcccaaatgcggaagggaaattgcgcgccaaagcatagaccaggtggttgataaagttaaactgctcccgttacgttcaaggatactcatcgttgcgcctgtaatacgtgcaaaaaaaggcgaacatgttaagctgcttgaacagatacgtaaagacggctatgtgcgcgttaagattgacggcacggtttacgatatcaatgatgttcccaaacttgacaaaaagctcaaacacagcatcgatgtcgttatagatcgtcttgttatcaaggaaggcattgattcaagacttaccgattcgttggaaacagcatttgcgctcggcgacgggctcgcaaaggttgatatcctgcccgacagggatgcggcagaggagaatattcccgctgaaaaaaaggccgcaaacgggggaatcatcgttgaggacggtgtggaggagctgcttttttctcagaattttgcctgtcatgagtgcggtatcagcattgaagaaatgtcaccgcgaatgttctcgttcaacagtccgttcggtgcctgcccggactgcaccggccttggttatcaggaaaaaatcgatccgctgcttgttgttccggatgattcgctgtctttgaacaaaggtgcgattgccgcaatgggatggaattccgcaaacggaattgcaagcatgtatttgaaagcactcgctgacgaatacggtttttcgccggatacgccgtggcgcgaactgcccgaagaaatccgcaaggtgattctttacggtacgggcggaaagagaattcatgttgagtacgaaagagattacggcggcggttttttcgaaacggaattcgaaggcgttatacccactcttgaaagacgttatcacgaaactcaatccgattccatgaaggaagcttacgaagcatttatgagcaaaataccctgtccgacatgcggaggaaagcgacttaagcccgaagtgcttgcagttacaatcgggaataagtcgattgcggacgtgtgcggcatgtccataaccgacgttcttgcttttatagacgggcttgtcctttcggaatcagaaaagattattgcctcccgaatttacaaggagctgaaggccagactgcgctttcttgtcaacgtcgggttggaatatctcacactttcacgctcggcatcaggcctttccggaggagaggcacagcgcattcggcttgcaactcaaataggctcgggccttgtcggcgttctctatattttggatgaaccgagcatagggctgcatcagcgtgataatgaccgcctgcttgcaacgctgaaaggactccgtgacctcggcaatactcttattgttgtcgaacatgacgaagataccatgcgcagtgcggattacattgtcgatatcggcccaggtcccggcgtgcacggcgggtatgttgttgcacagggcagcgttgaggatataatgaatgctccggaatccataaccgggcagttcctgagcggcaagcgttttattctcattccggaggaacgccgaaaaccgtccgatgaacgttggctttgcgttgagggttgtcgggaaaacaatcttaaaaatatcacggtgaaaattccgctcggcgtattcacatgtgtaaccggcgtctccggttcgggaaaatcaagccttgtgaacggaataattcgaaatacattgctgcgaatgctcaatcgggcacggacaaaatcaggcgagtttgacagtataagcggagttcagtatcttgataaggtaatcgatattgatcaatcgcctatcggcaggacgccgcgaagcaatcccgcaacctatgtgggcgtttttgaccttatccgtgaagtgttcgcaatgacgcccgatgcaaaaatgcacggatatacaaacggtagattcagctttaacgttaaaggcggacgttgcgaatcctgccgcggtgatggtataataaagatagagatgcattttttgcccgatgtgtatgttccatgcgaggtatgcaagggcaaacggtataatcgtgaaactctggaagttcgataccgcggcaaaacaattgcggacgtactcgatatgacggttgagcaggcattggagttcttttcggcgcatcccaaaattgcgaagaaattgcagacgctttttgatgtcgggctgggctatataaaactcggacagtcctcaacaacgctttccggcggcgaagcgcagcgcgtcaagcttgcgaatgagcttgctcggcgcgatacaggcagaacactgtatattctcgatgagccgacgacaggattgcatgttgctgatgttgaacgattgctttccattcttgaacgcctttgtgacagcggcagcagtgtccttgttatcgagcacaatctcgacgtaataaaaacggcggattatatcattgatctcggacctgagggtggagatcgcggcggcagcattgtggcttgcggaacaccggagcaggttgcgcttgttgagagcagctacaccggtcagtatctcaagaagattttatttaataaataa

SEQ ID NO: 700 - DNA, 996 bp, Unknown
  Unknown gut bacteria
atgcagcaaataacccaagattatcttgcaaacaaagcaaaggagcttttgaacagcggaatctgcagcagagttttcggctggaaaagaggcgaatttgattacgaccttacgcccgctgttttcacgacagccgaacaaatagacagggaatttgtttacaacggcttttgcgccgcaaacttctcaaaataccttgttaacgaaacgcgcagggacgccggcaaagttgcggtttttttgaaaccgtgcgacagctacagctttaatcagctgcttaccgaacacaggttcgacagagaaaaggtttacgcagtcggcataccgtgtgagggaatgactgatatcaacaaggtcaggcaggcggttgacggtattgcaaagctcacctttgacgaaaacggaaatattatcgttgaaactctttacgacggaacagcaacactcgacagaaacgagtgtatgcttgaacgctgcattcactgcaaatccaaacgctgcgttgtttatgatgagcttctcggggagaatggtgaagttcttgacgattcccgctttgatgaggtcaaaaaacttgaagcaatgacggcggatgaacgatttgcattctggcagggtgagctttcgcgctgcattcgctgcaatgcctgccgcgatgcatgtcctgcatgtacctgcgagaaatgcgtgtttgacaatcccgcatcaggtgttgaaaacaaagcagccgcagattctttcgaagaaaaaatgtttcatataatccgtgcgtttcacgtcgccggacgctgcacggattgcggtgagtgttcgcgcgtttgcccccagcatataccgctgcatcttttgaatcgaaagtttataaaggatatcaatgccttttacggcgaatatcaggcgggcgcggaagaaggcagcagagccccgatcgtgaactacacaaaggacgatatcgaaccctcggctgcggttgaaaggagcggaaacaatgcgtaa

SEQ ID NO: 701 - DNA, 1065 bp, Unknown
  Unknown gut bacteria
atgaagaaatttgatctcaacttttacagtgggaaaagagttctggtaacaggacatacaggatttaagggaacatggctttgccgcctgcttctgaatatgggggctcaggttaccggatattcactgcagccgcctacagaaccttcgatctttgggctggcaggcatggacagacagatgaacagtataacaggcgacatccgaaatctggacagacttctggaagtgttcagagagaacaggccggaaatagtgctgcatctggcagcccagccgattgtgcgcgaatcttataaaaatccggtatatacttacgaaacaaatgtaatgggaactgtaaatatactggaatgtatccgtcagaccgattctgtgagatcatttcttaatgtgacaactgataaggtgtaccacaaccgggaatgggaatggggatatcgggaagatgatccattggatggatttgacccttattccaacagtaagtcatgctcggagcttgtgactcacagctataaaaattcatttttcatggatggagcgcctgctgtttcgactgcaagagcaggaaatgtaatcggaggcggagattttgctgcagacagaattattccggactgtatccgggcagctctggagggaaagcccataccagtaagaaatcctcattccacaagaccgtttcagcatgtgctggagcctttatatgcgtatcttatgattgctgccatgcagtatgaagaaagcagatattcgggatattataatgtaggaccggatgacagggactgtgtgacaacaggagagcttgtagatcttttctgccgtgcatggggggatggacagacttgggaaaatcattttgtgggcggacctcatgaagcgaatttcctgaaacttgactgttcccgaataaagagtgtttttggctggaaaccggcctgggatgttcgtactgctgtagaaaaaacagtggagtggacaaaggaatggcaggcggggcaggacataaacacaattatggacagacagatccaggagtttctggctgatataaaataa

SEQ ID NO: 702 - DNA, 1431 bp, Unknown
  Unknown gut bacteria
atgcgcaaaacaaaaattatttgtactatgggtccgtcaactgataaagaaggaatacttgaacagcttgccattgaaggtatggatgttgcaagatttaacttttctcatggtccccatgaggaacagaaaggccgtcttgaaagattaaaggcgatcagaacaaagatcaacagacccattgctgcgctgctcgatacaaagggaccggagatccggattcaggaatttgaaaaaggcaaggttactgtaacagaaggccagaagtttattctgactgcagaggacatccagggaacagaagaaaaggtatctgttacctacaaagatctttataaggatgtgaagcccggcgacagtattctgatcgacgatggtctgatcggcctgaaggttgaaaagatccaaggaacagaaatccactgtgtggtaataaacggaggagtgatctccaacaaaaaaggagtgaatcttcccggagtaaatgtaaacatgccgtttatcagcaaaaaagacagagaggatatcctttttggaatcaaagagggctttgactttattgcagcttcttttaccagaacagcagaggatgtgctggagatccgtaagattctggatgaaaacggcggccgtgacattaatattattgccaagattgaaaatcagcagggcgttgataatatcgacagcattatggaagtggcagacggaatcatgattgcccgtggagatatgggtgtggagattcctctggaagacgttcctgttatccagaaagagatcattaataaggtttataatgcaggcaaacaggtaatcacagcaactcagatgctggattctatgatgaaaaatccaagacctacccgtgcggagacaacagacgtggcaaatgccatttatcagggaacaagcgcgatcatgctttccggtgagactgcagcaggaaaatatccggtagaagctcttcggaccatgataaagattgcccttcgtacagagagcgatattgcatataataaagaatttaacattctttccagagatcatggaactaccacaaacatgacgacagcgatttcccatgcaacctgtatgactgccattgatcttggcgcaaaagctattattacagtcagccgttccggaaacactgcaagaatggtttccaaataccgtccgggctgcatgatcgtaggatgctcgccggaggaacatacatgcagacagctgaacatgtcctggggcatcacgccggttcatattaaagaagagtacagcatggaaatccttctgctccacgctacagaggcggcagaaaaagccggttatgtagaaaaaggcgatgtggtcgttctgacagcaggagttccgctggggcgttccggaaatacgaatcttattaaggctacagtagtaggagagtattga

SEQ ID NO: 703 - DNA, 942 bp, Unknown
  Unknown gut bacteria
atgggatatcccggaggctgcgtaataggaaaacgtccggttgatcagcatttgtatgtgctgcgctgtctgggagcctgggtggaagaaaaagaaaacagtctggaagctgaggccggatgtctgaaaggggcagagattgtttttggaaaaatcagcgtaggcgctacagagcaggggattctggccgctgtcctggcagaggggcatacggttctcagaaactgtgccagagagccggaaatcgtgtggctgtgcagatatcttcgcagcatgggagctgaaattcagggagaaggaactcactgtatcagaatcacaggcgtaaaagaattaaaagccggaaatatgcagattcctcctgatcgtattgtggcgggaacatatttatgtgctgcagcggcaacaagagggaagatcacgatctccaatccgcctgagggagagatggatgcatttcttgaagtgtatgggaaaatgggtggacaatataaccgcaggagtggtaaactaatagctgacggaagcggaacggcatttccggtaccgtttctggaaacggatacgtatccgggttttcccacagatcttcagtctcctctcatggcagtactgacaaccattccggggaaaagccgcatacgggaaaatatctttgaaaaccggttcaggattgcagaggaactgaataaaatgggtgcctctgttgctgtttccggcagagaggccagtatacagggaggaacctgtctcaggggatgtacagtgagagccagagaactgcgagggggagcggcgttgcttgtggcagctcttgcggcgcagggggagactgtcatcgaaggatgttcctttatttaccggggatatgagcatatatgtgaggatctggcgtctttgggcgcgcagatagaagaggatacaggaactgcatttttatga

SEQ ID NO: 704 - DNA, 1230 bp, Unknown
  Unknown gut bacteria
atgaccatttccatgattggaatagatcacggtcgtgcaccggtggatatcagggcattatttgcctttacaaagaaaaacgcaggggaagctatggaaaagctgaagcatacagcaggcatacatggctgtgtgattctttctacctgcaaccgcctggaaatctgggcaagccatgaagaagatcaggagctttccctgtatcagtgtctttgtcggctaaaaggagtacaggaagtttcctatgaaaaatattttgttacacgaaaggataaagaggcggcagctcacctgttttatctggcaggcgggctgaagtctcagattctgggagaagaccagattcttactcagattaaagatgctctgaatcttgccagagaacattttacctcggacagtgtgttggaggttcttttccgtatggcagtaactgcaggcaaaaaaattaagacagaggcgcctcttgcccacggaaatccttctgtgatccatcaggcagtctgttctctgaaatctcagggctatgaaataaaagggaaaacctgtatggttatcggaaacggagaaatgggaaaggtagctgcccagacactccgtgaggcaggggctgatgtgacggttactgtgcgtcagtaccgaagcgggattgtggagatcccggagggctgcaaaagaatcaactatggcgagcgaatggagtatcttcccaaatgcgatctggttgtcagcgcaacggcaagccctaattttacattaagagaagaacagttttctgacctcacacttccggaagagctgatccttctggatctggcagtgccaagagacattgatcctgctcttggaaagcggaaagaaatcagactttacgacatggacagcttccattcgtctgaaatatcttctgagcagagtgaaagcatccggaaggcagaacagatcgtagaagagcagatggaggaattttatcagtggctggagggccgggatgtgattcccaggatccaggagatcagagaggatgcggtacaggatctgaacctgcgcatcgaaaaaatcctcaaaaaaacaccaatggaacaaaaggacagagaaagcctgcttgaagcagtggatactgctgccggaaaggttgtgaataagctgatcttcggtttaagggatagcctgaatcaggaggtttttctggaatgtgtggccggattggagaagctttatgaagactaa

SEQ ID NO: 705 - DNA, 693 bp, Unknown
  Unknown gut bacteria
atgaaaaaaaaggacaataacacccagcgtggggctattatggtggaagccgccatttattttcctattaccattgccgttgtgatggcagtgatttattttgggctgtttaaaatgcaggaaagctattttttctttcaggtagagagagcagccatggagcttgccagagagaccgcttatccggggtatgataagtttactccggataagcctatggaaaatacaagagtggattttgactgggaggatggccccactgaatcacaggtaaaaaactattacagctcctataaaggctctgcctccaacatttatcgctgggggctggacagtgaagcaaagcagagggctgccgcttatcaggaagcactgaaaaagcacagcgctttgttttccatgggaaaaacagaagcctatgtagggctggaaaattcatttctcagtaaatcagtgcgggcagagctgcgctatgtgattcccacgccgggaatcctgcgctttgtgggagtcagagatgacattacgatttatgcggcagcctaccagccggtaatgaatactacggattttgtccggaacattgatcttgcctgggatatgggcagctttcttttagaaaagctgggaatggaggggcaggctgaaaagttcagtcaggcctttgacaaggtaagtaatattttattttag

SEQ ID NO: 706 - DNA, 1518 bp, Unknown
  Unknown gut bacteria
atgaaccagtcatatttaattggaattgatattggaacaagcgcctgtaaggttgccctttttgaccggagcggctgtgtgctggcagcagccaacggggattatccggtgtattacccaaaggagggctgggcagagcagaacccggaagaatggtggagtgctgtatgcggggctgtccgtcaggtgatcgaagaggcgtctgttgctccggaagagattgcgggagtggggattgacggtcagagctggtcagccattgccattgaccggaacggacatgtactgaccaatacaccgatctggatggacacaagagcgcagtctatctgcgaccgtctcaacgaggaaatcggtgcagaggcaatctttgaggtggcaggaaactcccttcagccatcttatgctacagcgaagattctctggtataaagaaaaccttccggaggtgtatgccaaaattgacaaaatccttcagtccaacagctttattgcttttaagcttacaggagcggtaagccaggatctttcccaggggtacggacttcactgctttgatatgcggacaggcaagtggaatgaggctatgtgtgaaaagctggggatccctgtagaatttttgccggaaatcgtcccatgtgaccatgttgtgggaacagtaacaaaaaaagctgcagaggaatgcggacttgcagaggggactcctgttgtggcaggaggtctggatgcagcctgcggaactctgggggcgggggtgatcaatcccggcgagactcaggagcagggcggacaggcaggcggtatgagtatctgtcttgacgagtataaggctgatccccgtctgatccttggcttccatgtagttccgggtaaatggcttctccagggaggtactaccggaggcggcggtgttatgcgctggtttgagcgggaatttgcggactatgagcggatgatgaaaaaggaaacaggagtttcgtctttgaatcagcttaatgagatcgcagaaaaaatagctgccggaagcgatggactggtatttcttccgtacatggccggcgaacggtcacctgtctggaatccttatgcaaagggcgtattttacggacttgatttttccaaaacaaagggacatatggtccgtgcctgtatggaaggtgtggctctttctctccgccataatctggaagtggcggaaagtgcaggtgcccgggcaaacgttctccgcgctatgggcggatctgcaaactcacttctctggacccagatcaaggcagatattacaggcaaaaagatcgtagttccggcttctgatacagccactactctgggagcagcccttctggccggagtaggaacaggcttctatcaggactatgaggaggcagtaaaggaaaccgtcagtgtaacaagaacccatgagcctgatctcagggtgaaagagatttacgacaaaacttatgaaacctatttggaattgtaccggtctctggccggtatgatgacaaaacatgaataa

SEQ ID NO: 707 - DNA, 2058 bp, Unknown
  Unknown gut bacteria
atgcagacagaaaaatccggacaggaatatctggaacaggtgcttgcatgtcttgaaaaaaggctggaagaagtaaatgcttccattgaggccggcgtcagagaaatcgaggacatgcatgaatactactgggaaaattatacagaaatggaccagtacggatatgaggaatttgataacagacaggctcttctggcccaggtaaatgccaatcaggagcagcttcttctgaggaaaagattccgcaatatgcaggattccccgttttttggcagggtggattttatttatcagggagatgaggagccggagcagttttacattggaatcggaaatctggcggaaagagcaggaagccgtcctcttgtaaatgactggcgtgctcctgtcagcggccttttttatgattatgacaaagggccggcttcctacgaagctcctcagggagtttttgaaggggagataagctctaaatggcagtataagatccgccggggaaagcttgtttatgaatttgaaagcgacattaaaattgatgatgatattctgaaagcagagcttggaggaagcggagaggttcagcttaaaaacattatccgtactattcagaaagagcagaatgccattatccgcaatacagaggacaggatcatggtgatccagggaacagcaggaagcggaaaaacctctgtggctcttcacagaatcgcttatcttctttaccatgaccgcaaaaacctgaaatcttccaacattctgatcctttctccaaacagtgtgtttgcagattatatctcacatatcctgccggagctgggagaagaaaatatccgtgaaatgagttttgatctttttgcttacagagagctgcaggatgtggcagcagactgtgaggacaagtacgatcagattgaaaaggcagtaaaaaatccggatacctggaaacagtacagagaaaaacagtctccggaatttgtttcacggctgcagggatttatgatgagccttgaagatgaactgatgaatttccgggatgtggagtataaaggctgttccataaaagaatctgagatcatccgcctgttttatttcaggtttcaggacattccccttttatccagaatggaagctgttgcagaatattttatcgaccaggtggaaacactgagggacagagacctttcagaggaagaaaaggatgaggtaacagaaaagtttctgggaatgtatggaacaagagacttttatgtcctttacagccgttttctggacagagaggggtttcgtcctctgcccagacgtcccctggaaaaacgaaggctgaagtatgaggatgtttaccctgttttatatctgaaatatcatttgacccggtgcagggagcatcgggatatccgtcaccttgttgtagatgaaatgcaggattattcctggatccagtatctgatcctgaagaagctttttccatgcagaatgaccatactgggcgacagggctcagaccatggaggaaaagcagcaggatgttatgaagtttctgcccggaattttcggcagaaatatcagaaaaatctatatgaacagaagctacaggaatacagtggagatcgcagagtatgcaaaccggcttgcggggattaccggtatggaactgtttgagcggcatggagagcctgtacgggaagaaacatttgaaagtacagaaaaggctttaaatgaagttcttaaaatctggctcagagacagggatcgcctggagacaggggcagtgatctttatgacagaaaaggaagcggaagctgcaggggcttatctgaagcagaagctggaaacggaagcgccggagcagagggatacgatttcttatcttgaccggaacagcggaaagttttgtaagggcctgacagtcactacgttttatcttgcaaaaggtctggaatttgacagagtatacggtgtgtttatggattcagacaaaagcccgctgaaaattcaggcagaatatattacggcaaccagagcgcttcatgaactgtttatgtatacagtcagaggctga

SEQ ID NO: 708 - DNA, 1512 bp, Unknown
  Unknown gut bacteria
atggcaggaatagcgggaaaatatctggtaggcgaagaaactaagcttaaggttatgacaattcttttgtttttgctgatactgtttgtggctgtgctttgtatgagtaagaagcaaaaaaatccaggtaaaattttttttacttttgttatgtgcatgaatgttgggtgtgttctcattaatgcgcttgatgtcaggacgagagaagctgatgcaaatagatttatccaacaggggagtgcgcaaagacaattggaaaatattccttctgcagaactgggggaattttcagaggaaaaaaattcctggcgttatgatgaggaagaaactggagaaataaaaaactccacattacagacaggactgtatgggacatctttttatttcagcatggcgaatccatatgtggcagaatatcaaagttcattatactggaataatacccaggagcaaagttatcgtggggcagataaaagaagtgcgttggagattctgggaggagtaaaatattttgtcactccaaaagaaaggaagggacctggtgcttatcaggaaaagaaaaattatgtagcaggcgaaaaagaatttattatatgggaaagtggaaagaaactaccgtttgtatttgcatacgataaatatattggcagaaatgaatttgaacagttaaatatagaacaaaagcagcaggccctgatggaagcggtagtattggagcgggataaagatattggtgattgggataaagagtatattgtttcaaatgatgcgaaagaaccagaaacaatatggacttccagaggaaaaatcaaattagaagaaaacatgatccaagtacaggaacgaggggcaacgctgaacattcagacagatattcagtacgagggtgaagtatatttaatttttgaggggcttgagtatgaggacggagcttccagtggtatttccagaacgaaatccaaaattacaattaatattactcagaacaaaataaaaaagaaaatagtttttaataatgcaaacgaattcgcggaaaataatggaaaaaataattttctgtgtaatttagagatgaatgagcctggaaaaaaagaaatagagataaagtttccgtataccggaacctatcgctttaaaaatatcagagttgttgttcagcctgtggagaaaataataaaaaatgcagaaaactcagagaagggtgttgatggatgggtctgtgcagatgggaatgaggtaaaagcttctctggagttagaagagccgcgtctggtatgtctggctgtaccttttgacaaaggctggactgctgttgtagatggaaaaaaggctgaacttatgcaggccaatataatgtatatggcattgccgttagaagagggaaaacatgagatagaacttcattattccaatccgtttatttgcacaggtgcaatcatttctgtcattggtatactgggggcagtgatatgttgtataacaggaaattatgtaaagagacgaagaaaatag

SEQ ID NO: 709 - DNA, 1539 bp, Unknown
  Unknown gut bacteria
atgaaaaaaaataaaaatatacctctcaatctcagagaaaaaagtaattcccggattgcctttttctgctctgtgacagttctggtcattctggttgtccttttcctccagcttgactacaatctgatacagaagcctgcagaaactgcaaaaaaagaagctgcaataaaaaaagcagaagcagaaaaaaaggccaatactccggaagtatctaccgccactgttatcgctgtaggagacaatctttaccatggaagtctgatagagtccggccagtatgaatccggaacatggaattacgagcatatctacgagaatgttaaggatgagatccaggccgcagatatagccatgatcgaccaggaaactgtatttaccacagaccacagtgcggtcagctcctatccttcctttgccacacctacagaagtaggcgacgctctgatcaaggccggctttgacgtcattgaatcagccaccaatcacattgatgactatggtcctgactacatagaacagactctggatttctggaagaccaactatccggaagttcctgtactgggcatccattccagtcaggaagatgcagatactgtaaaaacactggaggtaaacgggattaaaattgcttttcttgactacacctacggaactaacaacggagattatgtagacggaaaagattatatgatcgatatttttgaaaaaagcgaagttgcttctatgatccagaaagcaaaggaagacagcgactgccttatttttgtcgctcactggggaaaagaggacgaaaccatgcctaccgaatatcagaagcagtgggctgcctttctgatggaacagggggtcgatgttgtaatcggcggtcatcctcatgtacttcagccatatggacgcatgtctgacgataacggaaacgaaatgctgattttttattctcttggcaactttgtttccactcagcaggagcttccggagctgctggaaggcatggccggttttaccatccagaaatctgtgctgaaaggaaaaaccactgtagaaattctggatgccactgtaaagcctatggttatgcactataataaagatgagggcgtctttagcccatatatgctggaagactacaccgaagatctggcatctcagcacggagtgcgggacatcattggtgatgaattcaccctggataatctccgaaaaaaattcgatgagatcatgtccatgaatgtggagccgtccaccagaaccaatcttctggaggtttcctttgactatgaactgaacatgacggattccaaaggaaattatgtagaagatacatggtctgtcagctccgatcagtattatgaacagcttggaagttctgataatacctcttctgatgataccggcgaaggttccggggagaattcagacggaggatctgacagctatgataacggttccggggattcctctgaggaaacagaagatgatggctatgatgacagttccggagattacgactccggctatgaagatgaggaagcttaa

SEQ ID NO: 710 - DNA, 1785 bp, Unknown
  Unknown gut bacteria
atgcgatctctcgctgtctatttaaaaaactacaaaaaagagaccatactcgctccctttttcaagtttctggaggttgtctttgacctgatggttcctgttgtgatcgctcatatgatcgatgtgggaattgcagaaaataaccgcggtgtcattatccggagctttttgattctgatccttatggcaggcgcaggtctgactgtcagtatcaccgcccagttttttgcagcaaaagcaagtacgggatttgccgcagagcttcgtcagtctgtgtttgatcatgtacagggactttcctattctgagcttgaccgtcttggaaccgccaccctgatcacaagactgaccaatgatatcaatcaggtgcagaacggactgaacatgggactcaggctgctgcttcgcagcccttttatcgttctgggctccatggttatggcgtttaccattaatgtacgctgcgccctggtgtttgttgtggcaatcccggtcctctttcttgttgtttttgttattatgtatctcagcattccgcttttccgtaaagttcagggaaagcttgacagagttacaggtcttacaagagaaaatcttaccggagtccgcgtgatacgggctttctgccgggaaagagaagctgtaaaagattttgacgagagtaaccgtgaactgaccaggcttaacgaatttgtgggacggctttctgcgcttctgaatccggctacctatgttctcattaacattgccactgtttttctgatcagcgcagccggagtccaggtaaatatgggcagtatgcagcagggagaaacagtagctctttacaattacatggctcagatgatcgttgagcttattaagcttgcctctctgatcatcacactgaataaggcagccgcctgtgcaggccgtgtagctgatattctgaacgtccagtcctccatggattatgtaactgaaaccaaaacacagccagtctcagactgcgcagttgcttttcaggacgttaccttttcctatgccggaaccaaggctcccagtctttccaatatcagcttttccgtaaaaaaaggccagacggtgggcattatcggcggcaccggaagtggaaaaacaacccttgtgaatctgatctcccgattttatgatgcagatcagggaacggttcttcttaacggtcaggatatttgtaaatattctcaggcagatctctgcagcaaaatcggaattgttccgcaaaaggccgtgctgtttaaaggtactatccgggaaaacatgaagcttggcagggaaaatgcttctgatgaagaaatctgggaagctctttccatggcacaggcaaaagaaatcgtagaaaaaaaacagggacagcttgattttactctggagcaaaacggaaaaaatctttccggcggccagcgccagcgccttaccattgcccgggctctgatcaaaaatccggaaatcctcattctggatgacagcgccagcgctcttgactttgccacagatgcagccctgagaaaatcgcttcacacgctcagccacaaaacaaccacttttcttgtatcccagcgttcctcaagtatccgtcaggctgacctaatccttgttctggacgacggaaccctggccggtcagggcactcatgaagaacttttaaaatcctgcgccccatacagagagatctttttctctcagtttcccgatgaaaggaaaaaatatgacgcaatgcaaaataccggagaacttcccgcaaaaggaaaggaggccaattcatga

SEQ ID NO: 711 - DNA, 1800 bp, Unknown
  Unknown gut bacteria
atggaaagaatgaccgtacaggaacggcttgccgctcttcgaagcctgatgaaagaaaaacatgtggacgcttatctggttcccacagacgactttcatggctcagaatatgtaggcgattattttaaatgcagaaaatatattacaggatttaccggttctgcgggaaccgcagtaatcacttccgatatggcgggactttggacagacggaagatattttatccaggctgcccagcagcttgagggaaccactgtcacactttttaaaatgggagagccagaggttcctaccatccatgaatttctgaaggataagctgacggaaggcatgtgtcttggatttgacggaagatgcgtaagcgctgcggagacagaggaactgaagtctcttcttgcagacaagaatatccgtttttccgtagaggaggacctgatcggagaaatctggaagaaccgcccggagctttccagtgagccggttatggagcttgaagaaaaatgggcaggaaagtcaagggcagataaatgtgcgcagattcgtgaaaaaatggcggaaaaaggcgcagatgcctttatccttacctctcttgacgatattgcgtggcttttaaatatccgtggaaatgatattcactgctgcccggtagtgctttcctatcttgttatgacacaggatgagatccttctttttgccaatgagaaggcttttgatacagcggtaagaaattctctggaaaaagacggcgtggttcttaaaccttataatgacatttaccagtatgtaaagactattccggaaagcagaacggttcttctttccagaaaaaatgcaaacagccgcctggtaagcagtcttccagacagtgtgaagattctggatgaggaaaaccttacccttcttccaaaggccatcaaaaatcctgttgaagtggaaaatgaacgcattgcccacatcaaggacggcgtagctgtgacaaaatttatctactggctgaaaaaaaacgtaggaaaaacaaccatcacagagctcagcgcggcagaccatttatttgcccttcgcaaggagcaggaaaacttcctggacaacagctttgatcctattgtttcctatgcaggccatgcggcaatctgtcactacagcccgtcgtcggaaacagatattcctctggagcctcacggactggcactgtgcgatacaggcggacattatctggaaggttccaccgatatcacaagaacggttgtccttggcccggtaacagaaaaagaaaaaaaatattttacccttgtgctgaaaggacacctgaatcttgcagcagcaaaattccgttatggatgtacggatcttaatctggattacattgcaagagaaccattatggcagttaggtgaagactataatcatggaaccggacacggtgtgggatatcttctgaatgtccatgaagggccaaaccgtttccgctggaaaacagctcccggccagtccgcctgcgttctggaagagggaatgatcacctccaacgagcctggctattatgtagaaaatgaattcggcatccgccacgagaatctgatcgtgtgtaaaaaagcagaaaagactgcttacggacagttcatgtgctttgagaacctgaccatggttccttttgatctggacggcattgttccggagcttttatcagaccatgaaaaagagcttttaaaccagtatcacgcagaagtttatacaaagatttctccttatctgaatgaggaggaaaaacagtggctgaaagaagctacacgagaaatctga

SEQ ID NO: 712 - DNA, 1452 bp, Unknown
  Unknown gut bacteria
atgaacaaaaatggggaagcagagaagaaacaggattatcgtgtagagaaggattctataggaacaaaggatgttccacagaatgtgtattatggagtgcagtctctccgcgcagcagagaactttcatatcacagggctgaatatgcatcctgagatcataaacagtcttgcgtatattaaaaaagcggctgcaattaccaattgtgagatcggtatgctggataaaaagaaggcaaaagccattgtacaggcctgtgatgagattctggaaggaaagcttcacggtgactttattgtagatccgattcagggcggcgccggaacttccttaaatatgaatgcaaatgaggttattgccaaccgcgccatcgagattctgggaggagaaaagggtgattattccatcattaatcccaatgatgatgtaaactgtgggcagtctacaaatgacgtaattcctacagccggtaagatgacctctctcagacttctgaaaaacctgaaaaaagaacttcttcgtttacataaagcgctttgtgcaaaggcaaaggaatttgatcatgtaatcaaaatgggacgtacacagatgcaggatgcggttcccattcgtctgggccaggaatttaatgcatattctgttgcagttatgcgtgatatccaccgtatggacagagcgatggaggaaatgtgcactctcaatatgggcggaactgctgtgggaacaggaattaatgcagatgaagcatatctcagaagaatcgttcccaatctggtagaggtttctgatatggaatttgtgcaggcctatgatctgatagacgcaacacagaaccttgacccgtttgtggctgtgtccggagctgtaaaagcctgcgcggtaactttatccaagattgcaaacgatctgcgcctgatgtcatccggaccaagagcaggttttggggagattaaccttccggctaagcagaacggctcttctattatgccgggcaaagtgaatccggttattccggaggtggtcaatcaggttgcatttaatgtcatcggaaatgacgtgaccatcactatggcggcagaagcgggccagcttgagctgaatgcatttgagcctattgtattttactgtatgttccagtctattgatacgctggcttatgcggttcagacatttgtggataactgtgtaacaggaattacagcaaatgagacacgctgccggtatctggtagaaaacagcgtgggaatcattactgcgatctgtcctcatgtgggatatcagaaagctgcggacattgccaaaaaagcaatcaggacaggagagtctgtccgcagtctgatcctgaaagaaggacttttaaatgaagagcagcttgaccatgttcttgaccctgtaaatatgacagagccgggaatttcaggaaaagagattctcatggcaaatgataaataa

SEQ ID NO: 713 - DNA, 1368 bp, Unknown
  Unknown gut bacteria
atgtacagctatattcttattatcctgcttgtaggcgccgggatctatttcaccgtcaaaacaaaaggcgtccagttcagagcgctgaaagaagccattaaggtggttatggagccaaaggatgatgaaaaatcaatttcttcttttcaggctctgatggtttctactgcgtccagggtgggaaccgggaatattgccggaatttccacagctctttgcattggcggagcaggagctatgttctggatgtggctgatcgcgcttctgggaagcgcatctgcgttcattgagagtacactggcgcagatctataaaagaaaagctgctgacggaagctcttacggaggccctgcatactatattcaggctgtgctgaaaaaaagatggctgggagttttgtttgcggcagttcttatagtaacttatatgggcggcttcaacatggttgctgcttttaacatttcagattctttccgcagatatgatttctatcagccaggaacaacaccacttgttataggtctgattcttgcagttatttttggcatttgtatttttggcggcagcaaacgcatatccaaaattacagaagttattgtcccggtaatgggaatcttttatatagcggtttctctgtttattgtgatcacacatctgaatcttcttccgggagtgatcgtatcaatttttaaaggcgcgtttgatatttctgcaattttcggcggatttgcaggttcagccgtcatgcagggagtaaaaagaggtctgttttccaacgaggccggtgtgggctctgctccaaatgccgcagcttctgcgggtgtgtctcatcctgtaaagcagggacttgttcagatgctttctgtttatattgatacaattgtgatctgcagtgctacaggatttatgcttctgtgttccggagtagtaccggaagagggaattgccggaatgccttatgtgcaggaggctgttgcaggttctctgggaggttttggttctgtatttattaccgttgctctgtttttatttgcatttaccacactgatcggaaacttttattatgcggaaatggggcttcgctacatttgtgacaaaacaccgaaaaaaatgatcatgaacatattccgtatcgcagcagctctgatcgtatgtatgggagcaactatggatttcagcgtagtgtgggacacagcagatgtacttatgggcctgatggcgcttattaatctgccggtaattgtgcttcttgcgaaaccggcgcttcgatgtatgcaggattatttcaaacagaaaaaatcagggaaaaatcctgtatttaaagcaaaggatattaatctggaaacaaagacagatttttggaactga

SEQ ID NO: 714 - DNA, 1320 bp, Unknown
  Unknown gut bacteria
atgtttatgataaaatgtgatcttctgataaaaaatacagttgtaatgactgattatgaaacagtaaaaacaggaatggatatcgggataaaaggggagaggatcctttttgtatcagaaaaaggaacagaggaggttcaggcgcagaaggtgatccggggagaaggaaagctttttatgcccggatttacagacagtcacatgcacacaggccagcagcttttaaaagggctggttctggatgcaaagccgattatctggacaagagtcatgcttccttttgaaagtaccctgacaccggaaaaaatgagactttccgccaaaacagcagctctggagatgatccggtgcggcaccacctcctttgtggatgcaggcagctattatatggacgcggcggcagaggtttatgaaaaaagcggactgagaggctgtctttccgtttccacaatggatgaagccggtcttcaggaaagcatttccatgaatgcccggcaggcggtaaaggagacagaccggctttatgatacctggaatggaaaaggaaacctgaaggtttattatgcgctccgggctttaaactcctgctcggatgagctggtggagctggctgtttctcatgccggggaaagaaacgcaatgtttcaggctcatatgaacgaatatcagggagaggtagacgggatcataaaaagagaaggaatccgtccctatgaataccttgaaaaaaagggtgtgctctcagaaagatttctgggcgctcacagtctgattctttcggaagaagaaaaggagtttatcagagaaaaaaaggtaaaaatctgtcactgtccgttcagcaactgcggaaaagcagttccggatacccctgatctggtaaaccggggaatcataccgggatttggaagtgacggagcagcccacggaggtttaagcctgtggaatgaaatgaggatcttccgttctcttatgaatatttaccatggtgttcccaaacataacccaaaagttatgcctgcagagctgcttttccgaatgatgttcgagggcggggcagccgctgtagatgagatgggacagtgcggaagaatcgaggaaggctgtaaggctgacatgatcggcatctgtctggagacagcgcggctgatccccagtggaaatcttatttacactatgtttgagtgcggagaggcaggggatgtcagtgagatgatcgtaggaggaaaaattcttatggaaaacagagagataaaaactctggatgaggaaaaaatcctgtttgaggcaaatcagtatatgaaaaaggcaggtgttctgtaa

SEQ ID NO: 715 - DNA, 1092 bp, Unknown
  Unknown gut bacteria
atggaacacaatatcttaaacgttcgccgtgagggagaattttattatcctatttattttgaagaagactttgcagagctgtgcagcggactgaaaaaagaaaacctggtgggcagaagggtttgtattgtatcagattccaatgtattccccctatatggagataaggtaaaaaaaatactggagtctgtggaagaatctgtggatgtttttgtctttgaggcaggagaaccaaataaaaatcttgataccgtccagaacctgtaccgcacactgatcgaaaataaaattgaccgtaccggctttctgattgccctgggaggcggagtaaccggagatcttaccggttttgccgctgccacctatcttcgcggcattgatttcatacagatccccacgacgctgctggcgcaggtagacagcagcgtaggcggaaaaacaggggtggacttccagcagtacaaaaatatggtaggagcttttcatcagccccggcttgtatatatgaatatgaatactctgaacacccttcctgaaacagagtttatctgtggaatgggagaggttctgaaaacaggtctgatctgcgacagtgaactgtttcgttctgtatgcaggcagaaaaagcagatccgggggcttgacagtcaggttcttgcttctgtgatccgcagatgctgtgagatcaaggccggtgttgtagagcgggatccgaaagagcagggagaaagagcgcttctgaatcttggacataccataggacacgccgtagaaaagcttatggattttcagcttcttcacggacagtgtgtggcagtgggaaccatagccacagctgcaatatcccggaacagaggactactgtcagaaaaggaataccaggagattctttgcggatgcagggatttcgggcttccggtttccgtacaggggctggatccggaaaagatcctggaagcaaccagaaatgacaaaaaaatggaacagggtcatattaaatttatccttatgaaaggaatcggcaacagctttatagataaaactctttcagaccaggagattcttaagggtattcaggagattttacaatga

SEQ ID NO: 716 - DNA, 930 bp, Unknown
  Unknown gut bacteria
atgatatatgaaagtatacctcttgccaaagatctttctgtagaaaaaatttataccatccattactttgaatactgcaatgacttttcctatccgggtgaacagcatgatttctgggaatttcaatgtgtagataaaggaactgcccggattcaggcagatgaagaagttcatgtccttactcacggtcagataatttttcaccgtcccaacgaatttcacaacctgtcggcaaccggaaatcatgcccctaatattgtagttgtttcctttgcctgtaattctccctgtatgagtttttttgaaaaacagattctgaccctttcggatacagagcgaaccctgatcggaaaaatcatcgctgaggcccggcggtgcattgcctctcctcttgacgacccctatcttcataaaatggaattaagaaaagacagccctgtgggttcccagcagcttcttgttctttatctggaacagcttctgatacatatgctccgaagatatactacacaggtaccgcactgtgtcagaaacattggcgacccctcatttgaatcttctgcctgccggaggatcacccgttatctggaggatcatatctgtgaatccctttcccttgaagcaatctgccatgacaatctcatcggaagatcccagcttcagaaaatcttccgtgaggaatacggctgcggagtgatcgactttttttctcatatgaagatcaattttgccagacagctaatccgggaaaatgacatgaatttcacacagatctcggaatttctgggctattcctccattcattatttttccagacagtttaaaaaactctgcggaatgacgcctacagagtacgcgctttctattaaagccatctccgaacgtcctcagaattctgaaaaagacataaaaaatggagccgatgactaa

SEQ ID NO: 717 - DNA, 813 bp, Unknown
  Unknown gut bacteria
atgaaaaaattacataagcttccgggttttctgcctgtacttttatgtctggcaggaatcatgtggctgccggtatctgtacaggcaaaggtatatgacaattatgggattttaaatgaggaagaaataacagcactggaaaaagagcttgcagagattgaagaagcctatcagtttgagaccgcatttcttattacagacaatgtgggagaggagatggattatcgtcagtatgctgcccgttttatgcagatgaaccaggtgggatacggagaaagcaatgagggattatgtgtgtttcatcagccggatgcccggaatatcaccattgtattccggggaaaggcccaggatcagtttacagaaaaaatccaggacaggatgctggatcactgcacagagaagctgaaaaaggacgatactctgggcgcgtatcaaagtattgtaaaggatctggagcagggactttcccgtgtcagtcagggcaaaaagatccgccccatggatatctttgatacgcctctgaccctttcgcttctgaagtggcttctgatttccatagctgcaggcgcagtgccggcttttgcagcatcctggtatcagaagaatcggatgaagacaaatgtgatccagacaaatgcagatctgtatgcagaggcagaggaaacacagttcagtcagatgagagacatgtatatacgcagagctgtgaccagaaggagaaaaccggaaaataaaggcggaaataacggttcttccgactcgtttacaagcggaggagaaagcttttccggatccggcagaaattattaa

SEQ ID NO: 718 - DNA, 1767 bp, Unknown
  Unknown gut bacteria
atgaaaaagccaaagaagaagctggtgattggagttggagcagtagcagtggtggcagccggagcaattgcagttttgggaaatcccggaaaagaaggggaaacacttccgaaggtggaggttgtggaagctgtaaccggagatgtgcagcagacggtagaggccagcggaactgttgtaagtgaggaagaaaaaacgtatttttcaccggcaaatgcaaaggttgatgaagtttcctttaaagagggagaaaccgtaaaggctggaacaaagcttgtagaatttaatatgaaggatcttgagagagaagagaaaaaggctgaactgaatgtgaaatcaggaaagcttgacatgcagaatactctcaataaatctgacaaagcggtaaagaaacaaaaggatgcccagggaaatgtagcttctctggagcagcaggtggcagcgcagaaaaattatgtggcaagcctgaaatcacagctggctcaggtaacagcagacgctcaggctcaggcggcagcagaggcagccagaaaggcggaagaggcaagaaaagctcaggagaaaaaacagcaggaaattcagcgtcagtatgaggaagcagtgagaatttatgaaaatgagacgcttcctgcataccagaacaggctgaatgagctgaattcagcagcagatcaggctcttacagcttacaatcaggctgagaatacatatcagatggcatttactgcctggtcagcagaccagagcccggaaaatacagaagccctttctcaggcagaggcggacagaagcaatgctcaggtagaataccagaatgttcaggctgtttatgaggattacaaaactcagatgccgccggcgcctcttttatctgactttacaggcgcttctgatctggtgacagacggaaccggcagtgatttcagcgatacgccttccggggatatttccggaggaactgtgtcagtggatacttccggaattgaaatagcgcttgaacaggcaagcagcgatctggcagagcttcagtcagagcttgcgtctcaggaggcaattgccgaggcagatcccaatgcagtaacaaaagaagaaaaggaaaagatgaagatcacaaataatctttccgaacttgaaaaaatgtctgcaaaagaactggtagagtctgcaaaaaatggcgtaacagcagattttaacggagttatctcaaaagtaacggtggtagagggctctacagtaacccagggaacggaactttttactttgcagaatacagacaaagtagatgtggatgtcaatatttccaaatatgactatgacaagatccaggaaaatcagaaggcagagatcactcttgcaggaaaaaaatatgagggaactgtaacatctgtcagtcatattgcaacacagaatgaaaagggagcttctctgatttccgcaagggtaagaatagaccatccggatgaaaacgtatttcttggggtagatgcaaaggttaccattcaggcagataaggcagaagatgttcttgttcttccggcagaggttgtgaatatcggtaaacagggatctttctgttacgttcttgaggacggagtgatcgccaaaaagaatattgaaaccgggctgagctctgatgactacatagaggtcaccgaaggcattgaagagggagacactgtgatcagggatattggaacacttcaggaaggaatgcctgcagaggctatggcgtccggtgatgccgcagtgacgggagaaggtgcctga

SEQ ID NO: 719 - DNA, 954 bp, Unknown
  Unknown gut bacteria
atgagtaggaaatggaaagagttttcaggaattgcccttttgaaatgggcggcgctatttgcagtggcatttgtgctgtctctgcctgtaacagcagagaccggatttgcggcaaataattacacagtaacagttgcttcaggataccttgctctgagaaatgcaaaagcctacgattcatccaatgagatcggagagctgtataccggggatacggtggatgtaacggattcaagtgggtctacttactggactgtttattctccaaagcatggaaaaacaggatatgtgaacagagcgtatctggcaaattcagcaggctccagaacagtaaaggtagacagcggttatcttgccctgagaaacgacaaggcctatgacagcaaaaatgaggtgggcaagctgtataccggagataccgtacagatcgccaacacaaatgatgacacttactggctggtatatgctcccggacttggcaagggcggatatgtaaacaaaaattatcttcagggcacctcttccggcacttcaggagaaacaagaacagtcagcgtaagcaagggctatcttgctctgagaaatgccaaagcctatgattcatccaatgagattggggaactgtatacaggagatacagtacagctgatcgacaccagcgacgctacctactggtatgtatattctccgaagcttggcaaaaacggatttgtaaacaagaattatctgacaggaggttcttcttcctcaggaactgttacaaaaacagtcagcgtaagtaagggatatcttgctttgagaagtgccaaagcctatgacgcagccaatgagatcggggaattatataccggcgatacggtacacgtaacggataccagtgattcaacctactggtatgtatattctccaaagcttggaaaaagcggatatgtaaataaagattatctttactga

SEQ ID NO: 720 - DNA, 1017 bp, Unknown
  Unknown gut bacteria
atggcagaagtaaaatttacggaagaaaagaagcttaaggctgcgccgggatttcccatggcagttgcgtcactgctggtgactctggcgggaattcccatgtatgttctgggagctacctggtttggggcagataagccggctggcggagtggttcttgcagtttgtattgtgctgggcgtacttttgaatgttggcggaattattatgttctgcggactgaaggtaatccatccaaatgaggctcttgtgctgactttgttcggaagctactatggaacactttataacgagggattttactggatcaatcctttctgtgaaacagtaggcccggcagcgcagactattgataatgaggaaaagcagagtaatgcaaaatccggttccattaacattaatttaagcggcggaggcgcgagggcagcatccaaggcagtttctcttaaaaccatgactctggacaataaacgccagaaggtcaatgacgagctgggcaatccggtagagatcggtaccattgtgatctggaaggttgcaaatgccaccaaggcagttctgaatgtagagcagtatgcagaatttctttcgatccagtgtgatgcagttaccagaaatgctgcaagaaattatccttatgacaatggcgactgcggcgaaaagactcttcggggaagctgtcaggaaattgcggatatcatgcaggcagagcttcagtccaaggttgaggaagccggacttgagattctggacgtaaggatcacccatctggcatatgctccggaaatcgctgctgcaatgcttcagagacagcaggctgcggcaatcattgacgcccgtcagaaaatcgtggaaggagccgtgggtatggtggagatggctttgaatcagctcagtgaaaacaatgtggtggagcttgatgaagaacgcaaggcagctatggttagcaatcttcttgtagtactttgcggaaataaagatgcgcagcctattgtcaacagcggctcaatctattaa

SEQ ID NO: 721 - DNA, 1257 bp, Unknown
  Unknown gut bacteria
atgatgattacattcaacgataatgaaaaaaaattaaaagacgatctgaacagggatatcgccctgccggcagttgtccatgaaagaattaatacagcctaccgcatgatcgaggaacatacggtcaaacagaaaaaaaagacccttaatccctaccactggatgaaaacaggggcaaaggttgccggaggtctggcagccgctgtggcagttggatttattttctgcgcagccaacccggttatggcaagagagcttccgctcatcggaggaatttttgaacagcttcaggataaagtaagctttttcgggaatttctcggataaggcaacctctcttgaagagtctgccgctccaacctcagatacagagaaacttccggagacatcttccgctgatgaaactccccgggaaacagttttcacaaaaacacaggacggactcaccataaccctgtctgaaatttatgcaaacgatctgacctgctatattacggtaaaagcagtcagcgaagaaccgttcccggatactctgatggatcaggacggaaaaccatgcatctctcttgtaacagaaccccgatacagcttcctggaagatacgggtatgaatcctggtatgcagtatatcaatccggaaggagaatttacggatgaccatacctacatagctattttacggctggatactcagtttgaagataccgctgaatttgaacagaaatatcaggaaatggtggatgagattcttgcagaaatggggattaccatggatgatatcaatgatgaaacagaagaaggccatgctaacctggaagaatttaacgaccgtgttttagcacggggcggcgctctccagtctcagtatgtcaagcccattgttactccggaaacttatactctgaacctgacctttaaggaatttatcggagacaaagcagaacctgaattctgggacagtggatatacccaggaggaactggaagccatgtcagaggcagaatttcaggaaattatgaaccagatgccggaagaatattctcagaatcccaataaatatcagaattactggtttaaaggggactggagctttgaaatcccggtaacagtagataattccctgacggaaactctggaaatcaatgaaaccaatgaagaaggcatcggacttgcctccattgccagaacgccttatgaaatcaccattactcctttgtataaagaaggttctgacagcgactgtttcctggttgctctg

SEQ ID NO: 722 - DNA, 693 bp, Unknown
  Unknown gut bacteria
gtggcagaaatactggtttgtgatgatgacaaggcgatcgtggaggcaatagagatctatctttcacaggaaggtcatcatattcttaaagcttatgacggagaggaggctcttcggacactgcgggaaaatccggtagatctgctgatcattgacgttatgatgccaaagctggacggaatccgggcgactcttaagatcagagaggaaaacccgcttcccattattattttatccgcaaagtcagaggacgcagataaaatcctgggcctgaacgtaggggcggatgactatgtgacaaagccctttaacccattggagctggtggccagagtcagatcccagcttcgcagatatactcagcttggcgctgtatctcagaaaaaggaaaatgtttacgtaacaggcggactgactgtggatgatgaccgcaaagaggtctgtgtggacggagaaccggtaaagctgactcccattgagtacagaatccttcttcttctggtaaaaaatcagggaagagtattttctaccaatcagatttatgaaaatatctggaacgaagaggcaatagcggcagacaatactgtggcagtccacatccggcatatccgtgaaaagattgagatcaatccaaaggaacccagatacctgaaggtggtctggggactgggctataaagtagaaaagctttaa

SEQ ID NO: 723 - DNA, 915 bp, Unknown
  Unknown gut bacteria
atggatttaaaacagctgcagtattttgtgacctgcgctcagaccggctctgtcagcgaggcggcaaaaattttatattccactcagcccagtgtcagcaaggtggtaaaggctttggaggattctctgggaatgcagctttttgagcggcttcccagagggatccgtcttacgcctcagggaagtcaggtatatcgttatgcctgtaaaattgtaggcgaagtcacaaagctggaagccatggcggaccacggtatgacaaaatggctcaggatttccgcaaatccaagctcttggttcgccactcattttgtggatttttataatgagaattatgacagaaattatcattttcagatttacacggcaggagttcggacagtgatggaacgcgtccgggactatctggatgatgtggggtttgtgtatattctggaacggcagaaagaggactttttttatgaactgtccagaaacaggatggaatttattcccctgcatgaaacagaagccattgtttatccgggaggaaaatcctttctttacggaacagaaaaagagagcctgagctatgaagagcttgacggagttcggctggttcagaactatcaggacgaattttttgatattggagccgccgaaaacaaggagagcttttcctggaaaggcctggatatttctgttattacaaacagcgattatattatggaaaggcttttaaaaaacagtgatgtggcaaatatcagcggaagctatctgtcagagaataagaaagatacacttcccggaatcccgttgaaaatggaaggaagccgggtgatcttcgggtatgtcagacatcggggagaagagatggacagcagtttaaaggaattcatctgttttctggaagaacgaatcggaagcggtaagtaa

SEQ ID NO: 724 - DNA, 1182 bp, Unknown
  Unknown gut bacteria
atggcattttatatggattacagcacaaggatctacaatatttatctgaaatatatagcgccggaggatatgcatgtatactctattgacgaggtgtttattgacgccactcactatctgaaaacctatggtatgactgcccgtgagcttgcaatgacaatgatccgggacgtgctgcagtcaacaggaatcaccgctactgcagggatcggaacaaatctttatctgtgtaaggtcgcaatggacattgtggcaaagcatatagaacctgatgaaaatggtgtcaggatcgccgagctggatgagatgtcctacaggaagcttttgtgggatcatcagcctcttacagatttctggagagtgggaaaaggctacgaaaagaaactcagggccaacggtatttttaccatgggggatgtggcgcgctgttctgtgggaaagccggaagatttttataatgaagagctcctttataagctttttggaattaatgcagagcttctgatcgatcatgcctggggatgggaaccctgtaccatccaggatataaaaagttacagaccctccagcaacagtgtaggttcaggtcaggttctcacctgcccctacagcttcgaaaaagccagactggtgatccgggaaatggcagaccttctggccctggatcttgttgacaagcgtctggtaacagaccagctgacccttacagtgggatatgatattgagaatctgaagaatccggagaaaaaatacagcggggaagtaaccacggaccgttatggaagaaaaatccccaaacatgcgcacggaaccattaatctgaagcagcagacttcttctgcaaaaaaaatcgtaactgctgtgatggagctttacgacaggatcatggacagagagcttctgataagaagaatgtatctggcagccaacaaagtggttccggaggaaatgatacaggaaaaggaaacttttgaacagcttgatctctttacggattatgcggcgctggaaaagcagaagcagcaggaagaggctgtgctggagcgggaacgcaaaatgcaggaagccatgctggatattaagaaaaaattcgggaagaatgcaattctgaagggaatgaatctgcaggagggtgctacggccagagacagaaattcccggatcggaggtcataaggcttag

SEQ ID NO: 725 - DNA, 711 bp, Unknown
  Unknown gut bacteria
atgtttaggaaaattggggaagaacgggcgtttgatggaatattgaagcagattattgacaatatccagacagggaagctgaaggctggagatgctctgccggcagagcgtactatggcggagaccatgggggtttcaagagctgctgtaagagaggtgttaagagcactggagcttctgggaattctgaaggcagtgcctggaggaggcaattatataacagaagatcttgatacctggctgatcggacctctgtccatccttttccagctgaataatggttatgtccgccagaaccagcagcttcgtgcagcacttgaaagggaaaatgcaattcttgctgcaaaaaagtgtacgcctctggatgcggcagagctgtggatgatcattgccaggctggatgctgctgaagatgagaagatgaggggtgagcttgataaagaacttcatcagaagattgcaaaaattgcagacaatcccatgatctacagtgttctggctgctgcggacaagctgacagagagtatcatttccggaatcagagattatatcatgcataaaaatcagtctgccgctgttgtggatgagcagcatcacaggctggtggaagcaattattaacggagatgtggaagcggcagagaggtgtatgtcggagcatatggtcactgtggagaaatttatgtcggaaatgcttcgggaagaagaatga

SEQ ID NO: 726 - DNA, 1491 bp, Unknown
  Unknown gut bacteria
atgcaggtattatataaaagtaccagaggtaaaaaagaagaaacagtaaccgcctccatggcaattttaaaggggctttcagaggatggaggtctgtttgttcctacgtccattccaaagcttgacgtacctatggaccgtctttcagaaatgacctatcaggaaacagcctatgaggttatgagccgttttcttacagattttacagaagaagagctgaaagactgtattgccagagcttatgattccaaatttgatacagaggagattgctcctgtaaaaaaagcaggaggagtatatttcctggaactgttccatggttctaccattgcgtttaaagatatggcgctttctattcttcctcatctgatgacaactgcagccaggaagaatcatgtaaaaaatgagatcataattctcactgcaacctcaggagatacaggaaaggctgcaatggccggatttgcggatgttcccggaacaaggatcattgttttttatcctaaaaacggcgtcagcgccattcaggaaaaacagatggtcacacaaaaaggtaaaaacacctcagtggtgggaatcacaggaaattttgacgatgctcagagcgcggttaagaggatgtttaatgatcaggagctggcagcagagcttgacagaaacggttttcagttttcctctgccaattccattaatatcggccgtcttgtgcctcagatcgtatactatgtttatgcgtatgcaaaactggtaaaagcaggagagatcaatgccggtgaaaaaatcaatattacagttcctaccggaaactttggaaatatccttgctgcttattatgcaaagcagatggggctgccgattcataaactgatctgtgcttccaatgaaaacaaggttctctatgatttcttccggacaggaacctatgacagaaaacgtgagtttatactgaccgcttccccttccatggatattctgatctccagtaacctggaacgtctgatctaccgtcttaccggagaggattcccaggcgtgtgcggagcttatgagatctctgagcgaaggcggagaatatacgatcaccgaagaaatgaaaaagggactggaagatttttacggaaattactgcagcgagggagaaacgagagaagccatcagcgctacatggtacggcagcgattatgtgatcgatcctcatactgcagtggcagcaggggtataccagaaatatctccgggaaacagaggatgccactcctgttgtgatcgcctctacagcaagcccgtataaatttgcaaaaagtgtaattacggctatttctgacagatatgagggactggatgattttgcactctgtgacgcgctgtctgcgctcagtggagtcagacttccggcagcagtggaagagatccgtacagcgccggtgcttcatgatacagttgtggctccggaggacatgcctgcagccgtaagaaaaatcctcggaatctga

SEQ ID NO: 727 - DNA, 675 bp, Unknown
  Unknown gut bacteria
atggactatcatttgtgtccctcaattttatcagcagattttaaccgtctgggtcagcagatacagactctggaagaggaaggagtaaaatggcttcacattgatgttatggatggagattttgttccaagcatctcttttggtatgccggtgatccgttctatccgaaaagagtcaaagatgttttttgacgtacatctgatggtatctgctccggaacgttacattcaggactttgtagactgtggagcagattcgatcaccgtacatgcagaggcatgtgaagatttggaacgtgccattgagctgatccgcgatgcaggagtaaaggttggcgtttccatcaagccggcaactccggtaaatgatatcagccatctgcttgatgatgtggatatggttcttgtcatgacagtacagccgggctttggcggacagaaatatctgaacgagtgcacagaaaagattgaagagcttcgtgaactgattgacagagagcatgcggatgttgatattcaggttgacggcggaatcaatgatgaaaccatggaaacagttatgaaggccggtgccaatctccttgtggcaggatcttatgtatttaacggagatcttgcttccaatataaaacatattacaaaaagaatgcagcatattaaagaagagattgaatga

SEQ ID NO: 728 - DNA, 2100 bp, Unknown
  Unknown gut bacteria
atggaaaaaaatattcccgaactgtatggaagccttgtttttaacgacaggatcatgaggaacaaattacctaaggatatgtacaaggctctgcgcaaaaccatccagaacggcacgcatctggaactggatgttgccaattctgtagctgttgcaatgaaagaatgggccattgaaaacggtgcaacccattatactcactggttccagccaatgaccaattttacagccgaaaaacatgacagttttatttctcctgcaggagacggacagatcattatggatttttctggaaaggaactggtaaaaggagagccggatgcctccagctttccatccggaggacttcgtgcaacttttgaagccagaggctacactgcatgggatccgacttctccggcttttatcaaagatcgtactctttatattccgacggctttctgttcctacagcggagaggctctggacaaaaaaactcctcttctccgttccatggatacgctgaacagagaagccgtgaagattcttcatcttcttggaaataacgagataaagcatatcaataccaccgtaggtccggagcaggaatactttctggtagataagaatctttacaatcagcgaaaagacctgattttctgcggccgtacactgatcggcgctccggcgccaaaaggccaggaaatggaggatcactacttcggaactctgaaaccccgtgtatctgcctatatgcacgatctggatgaagagctgtggaaactgggaatacctgcaaaaaccaaacataacgaagttgctccggcacagcatgaacttgctccggtttttgataccaccaatgttgccgtagaccacaatcagcttacaatggaaatcatgaaaaaggttgctgaccgccacgatctggtatgtctccttcacgaaaagccttttgagggaatcaacggaagcggtaagcacaacaactggtccatgatcaccgacaccggcgtaaatcttctggatcccggcaaaacacctgccgaaaacacacagtttctggtatttctggtagctgttatcaaggccgtggacgactatgcagatctcctccgtatctcagttgccagcgcgggaaatgaccatcgtcttggcgccaacgaggcaccgcctgctgtagtttccatttttcttggggatgagctgaccgacgttctcagggcaattgaaaatgatgaatatttcagcagtcatgattctgtgcagatggatatcggtgccaaggtacttccgcatttcattaaagatacaactgaccgaaaccgtacttctccttttgctttcacaggaaataaatttgagttccgtatgctgggttcctcatcctctgtggcaaaccccaacatcatcctgaatacggcagttgcagaagcacttcatcagttttcagaacagcttaaggaggtccctgctgatagaatggaaacagctgttcacaatcttctgaaagaaacggtgactgagcacaaaagaattatctttaacggaaacggatatacagatgaatggcttaaggaagccgcagaccgcggactttataatctggtttccacaccggatgctctgcctcattttacagatactaaaaataaagagcttctgatctcacataaaatttttacagaacccgaactttattcccgctatgagatcaagcttgaaaactatgtgaaaacacttcacattgaatcctgcactatggcagagatcattcagaaggatctgatcccggctgtctgcacctatatggaacagattgctcacacagccagtctgaagaaggctgtcgttccggatatctctgtctccggcgaagctgaacttctgaaaaaactgacggcactttctgaaaatatgatgacagaactttccgccctgaaatcagataccgcccgggctcaggaaacagcggatcttctggaaagtgccagaatgtatcagaaaacagtcctcgcagatatggataaactccgcagctttgcggatgaagcggaaacactgcttcctgaagctgttcttccatatccgacctatggaaaactactgttttctgtataa

SEQ ID NO: 729 - DNA, 1272 bp, Unknown
  Unknown gut bacteria
atggttatggttgataaaaaggatcaggactatccatttataaaagagacaataaaagaacggcccatagataaaaagacagtgctccgcaggctggcaatggctgcatcctgtggaattgtattcggaatttgtgcagttgtaacggtaatggcttttgtgcccaatatattcagacagtttgaaaaagaagcgaaaaaaccggagacggtacagttatcaccgcctgccggctcagaattcgccagaggaacggatacacagacggcggaaagtgttcagccggaagaggaggaagatgcagattcagcagaccatttgaaaaatgtgtataaaaccatctgggacattgcagaggaaccgcgcaaggctctggttcaggtgaccggacttacggacacagaggatttactgaacgattccctcctcacttatggggatgaagaaggtattgtttttctgaaaaacaaagatgcgttttatattctgactacatcggatgagctggaaaaagcggagaaattcaaaattacattttctaatggagtgatggcagagggaactctgtgcggagcagatcccaggacaaagctggtagtcgtcagggttccggtaaaaaatgtagaagaggaatacagggatgagattactgcagtgactctggctccgcaggacgaccgtcagcagacggagccggtgattgcgatcggaagtccaaatggagataccaattcccttatttacggaaatattaccgccatttccggaaagcttactatcccggatgcagaatatacactgatcacaacgaatatggccgccggtaatgacggaggcggtgtgcttctggatatggacggaaagatgattggtattattctggatcatgaggaagaaaaaagctgcgtgatccgtgctgtatcggtggcacagcttggaactcttctggaaaagctttccaacggagaacccatctgctatgcaggactgatcgggacaacgatttctcaaatacagtctgagagcagagatattccgggaggggtttatattgaccgggtagaaagtaattccccggctatggttgcaggcgttcagagcggagatattcttcaccggattaacggagaagaaattaccacaatgcgggaatacagtatccggcttcagagtatgaaaccgggacagcaggcagaacttacagtatatcgcaaaaatccatcaggagaatatgtggacgtagaattagatgtactgataaaacaaaaatag

SEQ ID NO: 730 - DNA, 678 bp, Unknown
  Unknown gut bacteria
atgcaggaaaatttaactttagaacagcagaaaaaagagctgcaaatgactttatcaaaattcacccatgaaatacgtaatccggtagcattgattcagagtgaactccagatgctcgcttccgctcatccggaactgaattcttatgacggctggtacggtatcatggaaaatctggaatatatccgggagctgctgaatgaactgtcccgttacaacaacgcagagcatctttcccctgtacagacagatattaccctccttttaaaaagtattatccgctctttccgccctgcgctggactaccttgggatcactctggaaacagatattccccagacccttccccttctttgtctggaccagacaaaaatccatcaggcgcttctgaaccttctcagaaatgcccaggaatccattcagcactctcacggcgttatctctgttacggcagccgctgttactgacggcatctgtatttccgtccgtgacaacggatgcggaatgacagacagccagataaaaaatgtattcaatcccttcgttacctacaagcccacaggaacgggacttgggcttcctgtcacccgccagatcattgaggcgcacggaggcagtctgaaggttcgaagcgtaccgggtaaaggcactgaatttcagatctttttccgcctgtga

SEQ ID NO: 731 - DNA, 693 bp, Unknown
  Unknown gut bacteria
atgataacagaaaatctggaacaggtgagaaaaaacattgacgaggcatgcagaatggcagggcgtgacccgaaagaggttactttgatcgctgtaagcaaaacaaagccggtatccatgctgaaggaagcctatgatgcaggcgccagatgctttggtgaaaataaggtacaggagatcatggacaagcatccacagcttcctgaggatattcagtggcacatgatcggtcacctgcagagaaataaggtcaaatacattgttgataaggtttccatgatccattctgtggattctctgcgccttgcgcagactattgagcaggaggcagcaaagcataatgtctgcgttcctgttcttctggaagtgaatgttgctcaggaagaaagtaaattcggattgaaaatggacgaggttcttccccttattgaaactattgcagattttcctcatataaaggtacaggggcttatgaccattgctccttatgttgaaaatgcagaggataaccgtgattttttccgacaattaaaaaaattaagtgttgacattgaggcaaaaaacattaataatgttagtatgagcgttttgagtatggggatgaccggagattatcaggtggctgtccaggagggcgcaacaatggttcgtgtgggcacggggattttcggagaaagaaattacgtgcgatag

SEQ ID NO: 732 - DNA, 1281 bp, Unknown
  Unknown gut bacteria
atgatcagggagctccgtaaaaaatttattctgatcgccatgctgtctacctttattgttctgtcagcgattatgggaacagtgaacatttccggttatttgaaaatggcagccagagcagatgatatgacttctgttctgggcataaatgatgggaaatttccgggaaacggaaaagaagaaatggaagctgcaggcaatgagaatcctcctgatgttgcagtgggaaaaagggaagatatatttgaaacagaagcctcaagaaatttttctccggaggcaccttatgaaaccagatattttacagtgatcttggatgatgggggcgagatcagttcctgtgatctgaatcacatagcagcggtggacgaagacatggctctggagtatggaaaaacagtcagcggaaagaaaagtgagactggtttctgtggaatttaccgttacagagttataaaggatgatggacagacaaagtgtatttttctggactgtgcaagggagatttcaggatttcgtgttactgcagtaagcagtattgttatgtcttttctcggtctggctgcggttttggtactggttatatttttttctcagattgtattccttccggtggaggaaagcatccgtaagcagaaacagtttattacggatgccagccatgagctgaaaacgcctttgacgattattgatgccaatacagaggtgattgaaatggaaaccggggaaaaccagtggacaaaaagtaccagaaagcagatccagcggctttccggtatggtacagcagctggttgctctcagccgtttggatgaaaacagggatataggtgaaaaaacagaattttctgcttctgatgcggtattggaaacggtgcagccttatgaggctcctgtccggacgggaggaaaagaaatggaacagttggtagatgagggaattctttttacaggaaatgagagggattttcgccagcttgtggggattcttgtggataacgctgtaaaatatacgcctgaaggtggaaaaataagaattgctttgaagaaaaaaggaaagaaatgccagctggaaatttttaatgatgcagaggaacttcccgtgggaaaactggatgttctgtttgagaggttttacagactggacagttccagaaattcctctacaggaggttcaggaatcgggctttctgtagcaaaagcgattgttcgggcacataaaggaaaaattaccgcagaaagtccggatggaaaaatcatgaagatcacagtgatcatataa

SEQ ID NO: 733 - DNA, 1215 bp, Unknown
  Unknown gut bacteria
atggtaaatatagcagtattaggatacggcacagtaggcagcggtgtcgttgaggttatcaacacaaaccataagagcattaataaaagggccggcgcagagatcaatatcaaatatgtactggacctcagagacttcccgggagatcctgttcaggagattctggttcatgattatgagatcattgccaatgatccggaggtagatatcgttgttgaggttatgggaggcattgaacctgcatatacctttgtgaagcgtgcgctggaggccgggaagagtgtatgtacctctaacaaggctcttgttgcaaaacacggtccggagcttatggaaattgcccgtcaaaaagatattaatttcctgtttgaggcaagctgcggaggcggtattcccattatacgtgctctgaattcctctcttacagcagatgagatcgatgagatcaccggaatcctcaatggaacaacaaactatatgctttataaaatgagcacagaaggctctgagtttgatgcggttctcaaagaggctcaggaaaagggatatgcagaggcggatcccacagcggatgtggaaggctatgatgcatgccgtaaaatcgccattctttcttcacttgcctatggaaaattccttaattatgaagaaatttatacggagggcattacaaaggttacaccggaagatatggagtatgcggcagagctgggaatgacagtcaagcttctggcaaccagccgtaaggtaggaaatgattctttttatgcgatggtagctccgttccttctgggcaaaaacagtccgctgtacagcgtcaacggagtattcaacagtgtgtttgtacatggaaatgttcttggcgacgccatgttttatggaagcggcgcaggcaagctgccaacagcaagcgctgttgtggctgacgttgtggacgaggcaaaacatcttcacagaaatattatgacaaactggaccagcagaccgcttcatctgatggagctggatcaggttgcgggaagattttttgtacgggtaaaaggagctactgtagagcaggtggaggaagtattcggaaaggtcgagatcgttaatctgaaaaagcttccgggagagtttgcatttgtgacttctgtgatgaagcaggctgaatataaagaaaaagcagcccgtctgaatggaaaagtggtttccatgattcgtgtaaaagactga

SEQ ID NO: 734 - DNA, 984 bp, Unknown
  Unknown gut bacteria
atggcagggtatctgaaaaaaatatggaaaacagcagctttgttcctggcttcaaccggaatcatggcaatggtattatggctgtataactgtcctgatgagccggttctttatggaagcctattatgtatggctttgttcgcgggagcatttgtgtatggatatttcaggttccgcagcaaagcgcaggttttgtctcagattgcaaaaagtattcctctggatctggaaaagcttcctttgccccaggacaacaacgaggcggcgcttcagcagatgatccatgaactgaaccgaatgaggatggaagcagaggaagccaggatgacctcttacagagagatggcggattattataccatgtgggtgcatcagataaaaacacctattgccgccctgaggctgcttcttggagaacagcctcaggaaaataaaacggctcttgcagaggtttttcgggtagaagaatatgtggaaatggttctggggtatctgagatctgaggatatgtcttcggatatgaaattttcagagtgcgatctggataagatcattcgggagcagattcacaaatacgcgtcagtttttatcgggaaaaagctgcagcttgactatgagagaacacaggaaaaggttctgacagatcccaaatggctgggatttgtgatcgggcagtgtatttccaatgccttaaagtacacaaagacaggtgagatacggatttatctttcggaatcccgtccccatacgctggtgattgaggatacgggggcaggaatcagcgcggaagatcttccgaggatttttgaaaagggatttaccggatataatggaagaacggagaccagatcctcaggaatcggcctgtacctttccagaaagatcatgaaaaggctggatcatggtatttccgtggaatcagaaccgggaaagggaacacgagtttatctgagccttggccgccggagggcggaggtgttttaa

SEQ ID NO: 735 - DNA, 645 bp, Unknown
  Unknown gut bacteria
ttggatccaaatacctttcccaccaagggaaatctgatacttgcaaaaaattcccttgctctttcccgtcagggatttgagctgatggacaaaaaaagaaacattctgatcagagaaatgatggaccttatcgatcaggcaaaggatatccagacacagattgacgaaaccttccggactgcatatgcggctcttcagaaggcaaatatggaaatcggcatcacttttgttcagcagatttcctatactgttcctgtggaaaactccatccggatcaaaacccgaagcgttatgggaacagaaatcccactggtagaatatgacgctcagagtaccaacacccccacttatgcctactacagtacaaaaatgtctctggatcaggcaaaggcagagtttgaaaaagtaaaagagctgtccatccggctctccatgatcgaaaatgcagccattcgcctggccgccaacatcaaaaaaactcaaaagcgggcaaacgctcttaaaaatattacaatccccagatacgagacattaaccagagatatccagaatgctctggaagaaaaagagcgagaggaatttacaagactgaaggttatcaaacgaatgaaacagaatgctgcgtcagcagattcctgtggataa

SEQ ID NO: 736 - DNA, 1293 bp, Unknown
  Unknown gut bacteria
atgtttgcagacagagcaaaaatcattatccgttctggtaagggcggagacggccatgtaagcttccgcagagagctgtacgtacccaacggcggtccggatggcggagacggcggaagaggcggagacgttatctttgaagtggacgagggacagaacactctgggagattacaggcataaaagaaaatttaaagcagaggacggagaagaaggcggcaaaagacgctgccacggcggagacggcagggatattgttcttaaggttccggaaggaacggttattatggaagcagaatcccgcaaggtcattgccgacatgtccggtgacaataaaagacaggttgtgttaaagggcggaagaggcggaaaaggcaatcagcattatgcaactgccaccatgcaggtgccgaaatatgcccagccgggacagcctgctcaggagcttgaggttcttctggaactgaaggtaatcgcagatgtggggctggtgggcttcccaaatgttggaaaatctactttcctttccagagttaccaatgcccagccaaagattgccaattatcattttacaacattaagccctaacctgggcgttgtggatacagagaacggcggatttgtaattgcagatattcccggactgatcgagggtgcgtctgagggcgtaggccttggtcatgaattcctccgccacattgagagaaccagagttctggttcacattgtagatgcggcttctacagaaggccgtgatccggtggatgatatttataagatcaacaaggagctggaagcttataatccggaaatcgcagcaagacctcagctgatcgctgccaacaagatcgactgtatctttgaggacggtgaggaaaatccggtggatcgcctgagagctgaatttgagccaaagggaattaaggtatatcctgtttctgcggcaacaggtcagggaatccgtgaactacttttcggtatccggcagcttcttgatgagagccctgcggagcgtattgtatttgaacaggaattcttcccggaggatgttcttattacagaaaatcttccttatactgtcacaaaggcggaggatgatcctcatgtctttgttgtggaaggaccgaagattgaaaaaatgctgggctataccaatctggattcggaaaagggatttgctttcttccagcgtttcctgaaggatggaggaatccttgacgaactggaaaatgccggcatagaagaaggcgatactgtgcgtatgtacggctttgactttgattattataaataa

SEQ ID NO: 737 - DNA, 639 bp, Unknown
  Unknown gut bacteria
atgagcgttttagataagcttttagatgcagtgaaactgaatgacgattacgatgaggacgattttctggatgatgatatcctggatgaatccgatgatgattttctggatgatgacgaggaagaaaagccggtaaagaaatttttccagaaattcggaaagaaaaaagaggatgattacgacgagtatgatgaactggacgatgaagaggaggaagaacctgttcagaaattcagtccgaaatctgcttcttctgtttccagagttactcctgtaaaacaggaaaagccgatccgtacttcatccagtaagatcactcctatgagaagcagccgcagaagttctcagtctgtgaatatggaagtctgtgtgatcaagccgacatccatggaggatacccgtgagattgcagatacactggttgacaattctactgtcattctgaatcttgaggggattgatgtggagctggcgcagcggatcattgattttacttcaggcgcatgttattctctgggcggaagtcttcagaaagtatccagctatatctttgtactgggaccatccaatgttgacattaccggtgatctccagaatattctgggaggatctgttccgtcagtaagagcaggatattaa

SEQ ID NO: 738 - DNA, 462 bp, Unknown
  Unknown gut bacteria
atgccaaaaaacaaatttgaagatgtgatttttactgctgttatggctattgtcatggtgtatggaatgattgtatacaatgttgcgctgaataccggtggaactgtaagtggttttacattccttgccgctgttcatgagctggtattcatggctccgattgcttttgtgctggagttttttgttgtcagtaagctggctggcatgttggcgtttaagatcatgaagccaacagacagaccgcagtttattacttatgcgatttccatctgcatctgctgtattatgtgcccggtcatgagtctgattgctactgtattatttaaggagccctcttttggaacatggatccgtacctgggccatgaattttccgatggcaatctgttatcagatgttttattgtgggccatttgtgaggctgatcttccgtctgattttccgtcgtggggaggagaaataa

SEQ ID NO: 739 - DNA, 1101 bp, Unknown
  Unknown gut bacteria
atggaaaaaaatcagatttttataacatgtggaacagagtataaggaaatgacaaaaaggattctggaagaaagcgggctggcagagcagattggaaataaagcttttcgtatcggaatcaagcccaatatggtttccccttctcatccgtctaacggggcaaccacccacgctgaggttctggcaggcattattgaatatcttcaggaaagagggttccgaaatctgacgctgatggagggttcctgggtgggagataaaaccatggatgccttctatgcctgcggatatgacagactctgtgatgagtacggagtagtctttcgtgacacacaaaaggacaaaagctatacggcagactgtgggggaatggagcttcatatctgcaccagcgtaaaggacattgattttctcattaatgttcctgtgctgaagggacattgccagaccaaaattacctgcgcccttaaaaatatgaaaggcctgatcccgaattcggaaaaaaggcgttttcattcactggggcttcataaaccgattgctcatctgaatatgggtatccgtcaggattttattgtggtagataatatctgcggggatctggattttgaggacggaggaaatcccgttgtaatgaatcgggtgctgacaggccgggatccggtcctgatggacgcctatgtgtgcaatctgatgcattatgagatttcggacgttccctatgtggaactggcaggcagactgggcgtaggatgctctgagcttgaaaaagctgatatccgggcgtgtggagcggatacaggagaacagcttccgaaatcacgtaaggttgtagaactggcagatgctgttgaggaagtagaatcctgcagcgcctgttacggatatctgattccggcgcttgatatgctgaaacaggaaggccttctggaaaagctgcacgaaaaaatccatatcgggcagggattccggggaaaaacaggagaacttggcattggacactgtacaagaaatttccgacatcatctggaaggctgtccccctgtagaaacggaagtatataaatttttgaaggattacatcgaaaaccatcagaattaa

SEQ ID NO: 740 - DNA, 1410 bp, Unknown
  Unknown gut bacteria
atgagacttactgaacttctggatattgatgtaaatagcaaaaagatcatttcagttgtgggaggcggtggaaaaacaagcctgatcttccggcttgcagaggaactggcagagcagggaaaaaaggtcattgttaccaccaccactcacatagcttttgagccggaacgcccctttgccagagacggggaactgaataaagtcagggaaaatctcagaaagtacggctatacggtagctgcctgtatggaaaaacgggaagaaaaaagttggaaaaagccggaaaatattcagggatcctcaggtacgcactgcagcgcttccgaagagcagaacaaaagcggaaaactgtttacaggaaagcttcaggcgcttccggaggagcagcttcaggaactgaaaaaagaatgtgatgtaatccttattgaggcagacggagccagacgtctgcctttaaaggttccggcagcctgggagccggtaattccggagatgaccgatcttgtgatcggcgtgattggactggactgtctgggaaaagcaatcaaagacacagttcaccgaccgaaatcagcggcagaatttctgggtaaatcttcaaaggaaaagattacggaggaagatatcatacggattgcaaagtcagaccagggacttcgtaagtccgtgggacacagaggatttcgagtgtttttaaataaagaggatgttcttagtgacaggaatttgccggataaaatagtacagagactgagaaaacatggcatttgggccgtatgcggcagcctgaaacaggatatttctattgttattctggcggcgggaaacagcagaagatttggcagcaacaagctgttttttccaatagatggcattcccatgtatttacacacacttcagaaggttcttctggtacaaaaaaaaatgaaacacaggatttcttccgttattcttgttactcagtatccggagatcaaaaaaaatgcagaggctctgggagcccgggtggtatggaatccccatccggaagaaggaatttcctcatctatgaagctggggcttctggaagtaataaaagaaaagcctcaggcgcaaagcttttctgcctgccgggaaaataatgcctgcctttttctggtggcagatcagccgtggataaggtgccatacgatagaagctctgatcaggatgtatacagaatccgaaaagggcatggctgccgcagcaaaaaatggacagcctggaaatccctgtattttttccggaaaatattacccggagcttctggctctgacaggcgataccggagggaaaagggtgatgagaaaatacatgcaggatgtggctctgctggaagtgccagataaaaaagagcttacggatatggatatccctccggatatttcataa

SEQ ID NO: 741 - DNA, 1083 bp, Unknown
  Unknown gut bacteria
atggcggaaatctgcaatggggggatcattatgaaatatgggaaaataaggattgaagatggaaatctggtctttgccagacatatgatgatgaactatcttccatgcagggatatcctgtgggtttataaaagacaggaaggagtggaaggcggcgctcagaaacagatcagcaccagttatctggtggttgtgaccagaagacgcaaacgctataaatttgatatgacagacagggaagtaagagactgtgtacagcttctgaaagcgctgaatcctgacattgtggtgggctttccgaaaggaggcagaatccacctgcagagtcttccgaataccagagacctgggagcgctgatgacagaggacggaagacatattcttcccagacgtcttttaagaagcggcagtctttatcatatttctctgacagaccaggatgtcctcacagaagaatatcatcttacggaagtgattgatttcagaacccagaaagagatcctggaaaaaccggatactgtgatcgagggagtgcgttatcatgagattcctattgtggatgaagagacggccgggatttcccagacaggaagtttcctggagctgattacagaagccggtcagcttcccgatgattttttacataatcagtaccgcagctttgtcagggacgagtattcagtgaagcagtatgctcgttttatggatatccttctgaaccatgagaagggcgctgttctgtggcactgcagtgcaggaaaagaccgggcggggattggtaccgccctgcttctctgcgctcttggggttcccagaaaaaccatccgtgaggattttatgaaaacaaatctttatctggaagaggagatgcagcatatggtccgttatctggaaacaaaaaccattgtagacagtaaggtaatggacaaagtgcggattctttataaggtcaaaggggaatatctggacacagtttttgacacaattgaaaaggatttcggttctgtggaacattttctgaaaaaagcgctttatctgactcctaaggcaattgaaaccctgaaaaataaatatcttgtataa

SEQ ID NO: 742 - DNA, 1242 bp, Unknown
  Unknown gut bacteria
atgaagtttaagctgaacgatatggaaaagaaatggattctctatgatgtgggaaattcggcatttacccttctgatcgctacgatcatgcctatttattttaattatctggcagatcaggcaggcatttccgaagtaaattatctggcttactggggatatgccacctctgctgctaccatcattgtggcagttctgggtcctgtacttggcgctgcctctgacacaaaaggacgccggaaaaaaatattcctggtttctcttctgattggagctttaggctgtgtttttcttggattcactcagtcctggatctggtttctgctgctttttgtaattgcaaaatcagcctactctttaagcctggttgtgtatgactccatgcttccggatgttaccaccgatgaccgggcggatcaggtgtctgcccagggctatgcctggggatatatcggaagctgcattccttttattttaagcctgatgcttgtacttttttatgataagatcggacttaccatgaaaacagccatgggaatttccttccttctggtagctgtctggtggatcgtaatgagccttcctctgctgaaaaactaccggcagaagcattaccagtcagtagcttccggcaacaacctggctgccagcttccgccgtctgaaaggagttttttccgaactgaaaaacaacagaaaaatcctgtttttcctgattgcctttttcttttatattgacggtgtgtatacgatcattgatatggcaactgcttacggaaccgcccttggccttgactctacaggacttctccttgctcttctggtaactcagatcgtagcctttccggctgctctgatctttggcagactggcgggaaaggtcagcgcttcacggctgatcactgtttctatcggagcttattttctgatcgccctgtacgggatcattctcaaggaacaatatcagttctggattctggctgttgttgtgggaattttccagggcgccattcagtccatgtccagatcttattttgtaaagatcattcctgcggacaaatccggtgaatacttcggaatctacgatatctgcggaaagggagccgcctttgcaggaactatggttgtttctctcataagccagctcagcggcagcgtaaacctgggcgtgggcgctctttctgttatgtttctgatcggaattttctttttcctgaaagcagataaaacacctttgaaataa

SEQ ID NO: 743 - DNA, 1245 bp, Unknown
  Unknown gut bacteria
atgctttcagaggaaatgataagccgtcttgtgcttgagattaaacgtttccttctggcagacgccatgcttttaagtcgcgcgtcagacgaacagctgatgcggagaattgctgatgtggcagatcacaagctgggaaacgtcagcctgtcaccccaggaaagatcacgggtagtgcggctggtattcagttccattcgggggcttgggatcctggatgagatcctggcagacgacagcattaccgaagtgatgatcaacggtccggatcatatttttgtggaacatgcaggacggctgtaccgtctgaacaaaaagtttgataatgagagacagctggaggatattatccagaaaatcgtaggaaaggcaggaaaggaagtcaaccaggccaatcctattgtggatacccgacttcccgacggctcccgtgttaatgtggtgcttcctccggtttccctgtcaggtcccattgttaccatacgaaagttttcaaaaacacctatgacagtggaaatgctgttaaaatacggctcgctcaccagagaggcggcggcctttctggaaaagctggtccgggcaaaatataacatttttatcagcgggggtaccggttcgggaaaaacaacgtttctgaacgctttatccaattttattccaagggatgaacgtattatcaccattgaagattcggcagagcttcagatcaaaaacatagagaatctggtaagcctggaaacaagaaatgcaaatacatcaggcagaggagaaatttccattcgcgatctgatccgctctgctcttcgtatgcgccccgaaaggatcgtagtgggagaggtacgcggagcagaggcacttgatatgctgcaggctatgaataccggacatgacggttctctttctaccggccatgccaattccaccagagatatgttaagccgactggaaacaatggtgcttcagggcaacgacggactgcctcttccggctatccgtcagcagatttcctctgcgttggatattatcatccacttatccaggctgagagataaatccagacgcaccatggagattacagaagtccttgggtatgaaaacggggagattcagctgaatcctctgtttgtttttaaagaaacagagggaagcacactggaaaaagtagaggggcatctggtaagaaccggaaatcctctgagaaatgactataaactgagacttcagggagtcagcagcagaatatag

SEQ ID NO: 744 - DNA, 1542 bp, Unknown
  Unknown gut bacteria
atggaaaaggcagaaacaacaccctacggggcgtatccggagcttgtaacctatactcttgcccagatcagcggagccaataattccaatcttccggaaggagatacgtatgaggataatgcctataccagataccttcgaaaaatgctgaacatacagaatgataccgtatatatggatacagaggagcgctacagtgaacttgtaaatattctggtaaaggatcagaatcttccggatataatggtggttacagacagggagatcctgaaggagctggtggaaaatgatcttgtggaggatcttacagaggtatttgagaaatgtacgtcttcaagaatcaaagagatgtatgaaagctatggagatgcccttctgaactccggaaaattcaacggaaggctgatggctgttccggaaacagtgatcgaccacggaccgaatcttctgtggctgagaaaggactggatggaggagttggggctggaggagccggaaactcttgaagatgcttttgagatcatagatgcttttgtacaaaacagaatgggtacggaagatggagaaactcctgtgggtctggcatgtgacacaaatcttgtgggtaccacaagctccagttattcggtagatcctgtgtttgacagttttggggcaaatcctcagagatggatcagtcaggacggagaaattgtttacggatctctgacagaagaaacaaaggaagctcttgattatctgcataagctgtatgacagaagaattctggatcggaactttgccctgcgcgctcctaataatctgagagatctggtcgtaaatggaaaatgcggagcttttttcggactgtggtggactcctaataatccgctgatggaaagctatgagaaaaacagcgaagcagactgggaaccttattatctccaggaactggcagataaaaatgtttatgaatccttcagggataataaatatgtggtagtccgcaagggctatgagcatccggaaatcgtgatgaagatcatcagcgttctttttgattataccaggtatgaggcagaagatgcccgggaggtaaacgaatattttgctttgaatgtggaccctactgcaagaccgcttgtgatcaatgtggattataacgaagcaacctatcaggtgacagaaaatattgaggcagctttgaatggaaactatccggagggaaatcttactgccattgagcagtcctactatcaggcctgcagttcctatctcagcggaaatgattacactgcggaagactgggctgcatacaaatcaagaatttcagcagtagggcttcttgtagataagcattatacaccggctgtcagaagctatctggatgatgcaggcggagaaatccctcaatccctgcgccagtttgaaacaagaacgtttattcagattattatgggagaaaagcctgtcagctattttgaaacctttgtagagcagtggtatcagcagggaggttatgagctgacacagcagatacggctgtcaaatccttctacgtga

SEQ ID NO: 745 - DNA, 993 bp, Unknown
  Unknown gut bacteria
atgaaaggtgtgatttgcggaactggcgcctgtgtgccggaaagagttctggataatcataaaatcgcagaatttgtggacaccagtgatcagtggatacgggaacgaaccggggtactcagaagacacattgcggaaaaagaaaccacagtgtctatgggggcggaagcagcccggcaggcaataaaggaatcaggcatcagttccgatgaagtggatctgatcatagcagcgacttccacaccggatcagatttttccatgcactgcgtgcgagatacagaagaaactggaactttatcaggcggcaggctttgatctgaatgcggcatgcagtggatttctgtttgcatatcagactgcgcaggcctacatatcgtcaggaatctataaaaacattcttgttgtgggaagcgaaagactttctcggatcgttgactggaaagaccggggaacctgtattcttttcggagacggggcgggggctgtgatgctgtgcgcccgggaaggcaggaattatgcttcctttgcccggtcagacggacggggcggagaggctctgacctgtccggcagtgaaaagcagtctgaatagggagccgcagacggaaacagccgggagcgcagccctgaaatcagagaagtatctgtttatggacggaagggaagtatttcagtttgctgtaagaagtgttccggaagcgatccgccgggtactggaaaaaaacaatttaaaaacagaagaaattgactggtttattcttcaccaggcaaaccgcaggatcgtagaagcagcagccaggagactgggaatgggaattgaaaggtttcccatgaatcttcaggaatatggcaatacttcctcggcaagtatccccatacttctccatgaaatgaaccggaacggaaagctgaaaaaaggccagaagcttgttctggcaggctttggggcagggctttcctggggggcatctgtactggaatggggtatttaa

SEQ ID NO: 746 - DNA, 879 bp, Unknown
  Unknown gut bacteria
atggaaggtaagatcataaaaggaattgccggtttttattatgtacatgcgaaagacggcaatatttatgaatgcagggcaaggggaatcttccgaaaggataatcagaagcctcttgtaggtgacaatgtggaaattactgtgctggatcaggaaaaagcagaggggaatctggtaaagatcctccctcgcaaaaattctctgatccgtcccgcagtggccaatgtggatcaggcatttgtaatttttgccatggatgatccaaaaccgaattttatgcttcttgacagattccttattatgatggagcaggccggtgttccggcagtggtctgcttcaacaaaaaagatctggcagaggaaaaagaaatccgggagctgtatgacacctatgccggctgcggatatcaggttcttttatccagtgctcttaaggaagaagggcttgaggaaatatataaaatcctgaaaggaaagaccacagttgtggcaggcccctcgggagtaggaaaatcttctctgacaaatcttcttcagaaggaggttcagatggagacaggagaaatcagcaggaagctgaagaggggcaaacatactacccgtcattcccaggtgattcctgcaggagaaaacacctatcttatggatacgccgggattctcgtccctgtatcttacagatatggaagaacaggaactgaaggattattttcctgagttccgaaaatacgatgatcagtgtcgctttctgggatgcagacatatccatgagccgggctgccgtgtaaaggaagcccttgaggcaggagagatcagccgtctcagatatgaggactatttagcattatatgaagaattaaaagagaaaaggagatattga

SEQ ID NO: 747 - DNA, 1185 bp, Unknown
  Unknown gut bacteria
atgaatacatcagtacgattcccaaatctggatattgattttagctttgtgggaagatcggtttctgttttcggatttgagcttacttttttcgggcttctgacagcagcaggcatgcttcttggacttgccgtaatgatttttgttgcaaaaaaacaaaaagaggatccaaaccttagcctggaagcaatgattccggcttttgcaggcggtgtgttgggggcgcggctaatgtacgtggctctgaaccgggagatgtttgcgggaaaatcaataatagagattgcggatatcaggaatggcggaatgtctatatacggcggtgttttaggcggaatcctgattggagcaatttactgtaaaatccggaaaatctcctttgcacaggtggcagatactgccagtatgggatttctgacagcgcagataatagcagtgtggggaaacttttttaaccgggaaggcttcggagaatatacggacagccttctggctatgcagattcctgcagatgcagtaaataaggctcagatttcccggctgatggccggtcatctgacagaagcagacggtatttcctggatacaggtacatcctctgtttctgtacgagagtatctggtgcctggcgctttttctgatccttctgctgtacacaaaacacagaaaatatccgggagagatttttttaagatatctggcaggatacagtcttggacgggcagggatagaatttcttctgccggagcccgtgactgttccgggaacagagattccggtgttctcgtgtgttctgcttgttctggctgttatgtttggaattacggcttctgttcgcagaagtctgacaaaaaaacgggaaaggcacagagcccgcaggagagaggaaaaaagagctgttctgaattatgatgatattcagacttacgaggacgtatctcatgaatttatgggaacagatatcacagacgaaattaaagagactgaagaaaaagaggttcctgaagatgcagaagcagatgaaaaatcagagcagggagtctctgccggatcaggcagcagaactgaagaagttgaatcagaaaaaactgaaacggaagatacagaactgccgcagaaagctgaacgggatgatccggaacagggaagaccttcccaaatgtctgagggaaagccggaagcttga

SEQ ID NO: 748 - DNA, 2451 bp, Unknown
  Unknown gut bacteria
atgaatacgttaaaggaagaaattcatgcctactggacacagcgtgcagagggctattcagaatataatcagcaggaaatggcagacgccagacggagtatgtggaagaacaagcttctttctctccttgaagagaattttccgggaaagaacccggaggagctgaaggttcttgatgtgggaaccggaccgggattttttgccctgcttcttgcggaggccggatatcaggtaacggcagcagacgttacagaggagatgctgaaagaggcaaaaaagaatacaggagtgtttgcggaaaaaatcacctggaagctcagtgacgcccagaagcttgaactgggagactgcgaatttgacgcggtattttccagaaatgttacctggaatctggaaaacccgggacaggcgtatgaggaatgggtacgtgtgctgaaaccgggcggacttctgtgcaattttgatgcagactggtacggtcatctttatgatgaggaaaagcgcagcggttacgagaaggaccgccagagggtggaagaaaaaaatctggaagattattatacaggaacagatattgaacggatggaggccattgccagacaggttcctttaagcagacagaagcgtcctcagtgggatgtggaagccctgaaaaatgcagggctgacagaagtaagctgcgacacagaggtgtggaaacaggtatggacagaagaagagatcgcaaataatggctccaccccaatctttcttctttccgggaaaaaaagagaaagcttttgcctcaatcatatttcagtggaacccggaaacgtgtggactggttatctggagctgggacagggcgaattccggcttccggctgccgtgcttcatggaacaagacctggaaaaacaatgctgatcacagcaggagtccacgggggagaatatgtgggaatacaggctgctattgagctttcacagaagcttaaaattcagaaagtggcaggtaccattattattgtaaaggtgataaatgttccggcatttgagcgcagaaacggaagtatgggactgacagacggaaaaaacctgaacagggaatttcccggaaatccaaaaggtacagaaatggaacgtcttgcgtgggcagtttcccatgagcttcagccggcagcagattattacattgacctgcacagtggggatgactatgaacagctgacttcttatgtgtattatgcgggcatggcagatgaaaaaacagtcagtcagtcaagacgcatggcagagcaggtggacgtaccttacatggtccgctccaatgtggcgtcagggggcgcttataactatgcggcttctcagggaatacccagtattcttattgagcggggcggtatgggagcctggaccagtgaagaagtacgctctacaagaagagatgtcaggaatattctctgtcatctgggaatttatcaggggaaaaaggattacagaacttattatcctctggatgttacagatatctgttatcaggacgcttcccgggacgggttgtggtatccctttaaaaagcccggcgatatgatccgggaaggagagattctgggtgaagtgcgggattatgaaggcggtcttctggagctgagcgtggccgagtatgacggtgtgatcctgtatcagaccggcacgcttcaggtactgggggacgggccgatgatcgcttatggaaagattgtcaatccctatgatgagcggaaagagcgaattgtaagctactgggaaaaaagaagcggagatttcctggaacataaaagggcggagcttcacagtcctatgtctgaacgatggctttatgaaataaaaaatcagcttcctcaggacagaaatctcagggtccttgacgtgggctgcggagcgggatttttttccgtgcttctggcaaaagaaggatatcaggtcactggtgtggatctgacgcctgatatggttgaaaatgctagaacgcttgcagaagaggaaaaaacagactgtgagttctttgtaatggatgcagaaaatctgagatttgcagacgaaagctttgacgtggtgatttcccgaaaccttacctggacccttccggatgtaaaaagcgcttacagagaatgggtgcgcgtactgaaaaaaggcggcatacttttgaattttgatgcaaattacgggctcagtgattttacagacctgtccgagcttccggacaaccatgcgcatcaggaaattggcgatgatatgatgagagaatgtgaggagatcaaacgtcagcttccaatcagttcctatagccgtccggcctgggatctggagactttgggggcaatgaagcttcaggaattttctgtggatctgggaatcagcagcaggatttatgtggaaaaggatgagttttataatcccacaccaatgtttatgctgagaacctgtaagtaa

SEQ ID NO: 749 - DNA, 948 bp, Unknown
  Unknown gut bacteria
atgcgttttattaatgaattacacgaaggcgacagaatcagcggaatttatctgtgtaaacagaaacagtcagcggtgaccaaaaacgggaaaccttatgacagcattattttacaggataagacaggagtgctggacggaaagatctgggatccaaactcattgggaattgatgaatttgatgcactggactacatagatgtaatgggcgatgtgacaagctttgcaggagccatgcaggtaaatatcaagcgtgtgcgcaaagccggagagggagaatatgatccagcagattaccttcctgtcagcgaaaacaatgcagacgatatgtatcgtcagctttgcgatatgatcagcacagtaaaaaatccatatctgaacacaattctcaggaaactgtttgtggaagatcaggagtttatcaaagctttccagggacattctgcagccaaaacagttcaccatggatttatcggagggcttatggagcatacgttaagcgtggcaaggctctgtgattatatggcaggcgcttatcctcttctgaaaagagatcttctgatcacagcggcgctgctgcatgatattggaaaaacaaaagaactttctgcttttcctcagaacgattatacagacgaaggacagcttctggggcacatcatcatcggctctcagatgattcatgatctggcaaaggaaattccggactttccggaagtgctggaaaatgaactgatccactgtattctcgctcatcacggggaactggagtatggatctccgaaaaaacctgcgcttgcagaggcagttgctctgaacctggcggacaatacagatgccagaatggagacgctgactgagatttttgcagcagataaaggaaaaaaagactggcttggatataatagactttttgagtcaaatttaagaagaacaggagaagtgtga

SEQ ID NO: 750 - DNA, 1188 bp, Unknown
  Unknown gut bacteria
atgaaaaaacttatgattttaggagccagctattctcagcttcctctttatgaggctgcagaaaggcttggcataaaaacaatagctgcaagcactcccggtgactggccgggatttcaggcagcagatgaaagtacgtacacagatatttctgatcccggggcggttatggaagctgcccgtaaatttcaggcggacggtattactacctgctgcctggatacaggagtccgggcaatgggttatgcctgcgaaaaacttgggctgaaaggactgtcagaaaagtcggctgatatcagcagcaacaaatttaaaatgaaagaagcttttatggcaggaggagtacgctgcgcccgccacatctgcatcagaaaccgtgaggagcttgcagaagctctggaaaaactggattttcccgtagtgataaaggcagtggatctgatgggaagcagggggatattccggtgcgataccagcgaacaggctttttccttttatgaaaaaaccatggaagctacaggtaaggattattgtcttgtggaagagtttattgagggagaaccctttggctgtgaggcaatgatgtcagagggaagacttttatactgccttcctaataatatagatgcctttcagagctatgtgcccactccggtagggcattcggttccctggaaaaaacaggacagcctgggagaagaggcaaaacgtcaggtaaagcttgccatttgtgcggtgggactggataactgtgctgtaaactgtgatctcattgaaaaagacggaaaggtttatgtgatcgagatcacgggaagagctggagccacctgccttccggaaacagtaggactgtattacggcatcaattattatgaggctattgtgcgtcttgcccttgatatggagccggaaaagctttttaccaaaccgtatccgggaagcgccagcctgtctaagattctgacctcagacagaagcggaaccgtaaaagcgatccgaaatgaaaatgcgcctgcagaggatatcattgatctttcctttaatattcagccgggagattatgtgaatcagtaccgtaatgggagggatcgtatcggacagatcattcttgcagggaaagaacttcatgactgcgaagagaggctagatgagattttgtcgaaaattaacattgaatttacagtatga

SEQ ID NO: 751 - DNA, 3774 bp, Unknown
  Unknown gut bacteria
atggaaaaagaaaagaagctttatgtggtttccaacgctcaccttgacacccagtggaactggactgttcaggacaccattcgcgactgtgtaaaatccactcttgagaaaaactttgaacttatcgaaaaataccctcattataagatgaacttcgagggcgcgttccgttataagctcgccaaggaatactatcccgacctttacgaaaagctgaagggctacatcgcagagggcagatggacggtatccggaagcacatgggacgctatggatgttaacgttccctcatccgaagccctcatgcgtcaggtactctacggaaacggctatttcgaaaaggaattcggcaaaaagagcacggatatcttccttacagactgcttcggcttcagatatgctcttccttcaatcgaagctcacatgggtctgaacggattctcaactcagaagctcgtatggggcgtcggcggtcctgtaatcaacgaagacggctcggtaacaaagcctatgccggtcaaggacaagccccgtatggacctcggcaagtgggtaggaccggacggaaactacgttgtcggctcccttcttgaaggcaactatacatacaacttcgacaacgacggcaacactactcccgtaaacaagagagaagagttcctcaaggatatcgaacacaacgaaaagtacgctcatgttccctacagagctatgtactacggcacaggcgactacggcggatctcctaaggaatcctcagcacgcatggtaaacgaagccatcgaggacaacgcaaacggactttacaaggttatctcctcctccaccgaccagatcttcaacgaactcaccaaggaagagattgacaaccttcccgcatacaacggagagcttctcattccccacggctcgggcgctctcacctcacacacaatcaacaagagatggaaccgtaagaacgagcttcttgcagactccgcagagagagcagcagttctttccgcatggctcggcgcgtccgaatatccggctgaaagacttctcaccgcatggcagacattcctctggcaccagttccatgacgacctcccgggaacatccatcgcagcggcttacgtattcacctacaacgactatgttatcgcgcttaatatgttcgcatccgagcttgcaaacgcagtcggcggcgtagtaggcacactcgacacaagagttgaaggcacacccgtcgtagtatacaaccccgtttcatacacaagagacgacgttgttacagctgaaattgatgtaaagacacctttcgtccgcgtattcgactcacacggaaacgaagtacccgctcagctcagcaaggaaaacggcagaaccgtagttaagttcaaggctgccgtagctcccgtaagctgcacggtattcgacgttcgtggaagcgaaaccgaatgtcaggttaagaccggcatttccgtaactgctaataagctcgagaaccagagatacatcgttaccataaacgaagacggcgacatcgcaagcatcgtagacaaggcaaacggcaactttgagcttctcgcatctcccgcaaagcttgaaatcggtcccgataagagcacaaactggccttcatgggaactcgtatgggacgacgcgcttgttgaacccgcagttgtcaaggataacgttaaggttgaaatcgcagacaacggtcccgctgttgtatctctcaaggtaacaagaaagtttgaaggctccacattcgagcagacaatctccctctgtgacggcggtgaaagagttgacgttgcaaacgtagtcgactggttccagcgcaagtccaacctcagagcagcgttcccgctcacagtatcgaaccccaaggcagtattcgacctcggtctcggcgctatcgaaagcggaaacacagactccttcccgtactatcagcactgcactcatcagtgggctgacctcaccgcagaggacggcagctacggcgtatccatcatgaacgactgcaagtacggtatggacaagccgaacgacaacactctcagactcacactcatccacacacctctcggaaagttcatgaacgaatccggtcaggactggcaggatatgggtctgaacatcttcacatattccatcgcgggtcacaagggcttcagagacggcacaaccaaggaagccgcagagctcaaccagcccatgatgccgttcaccgcctccaagcacgcaggtgagggtaaggaaatctccttcgtatcggtaagcgacgacaatgtagtagtacgcgctatcaagaaggaagaaaatggcgagagaatcatcataagagttcaggaaacctccggcaagggcagcgaaaactgcacgctgaagttcctcggaaagctcacctccgtaaccgaaacaaacggatatgaagacgaaatcgctcccgtatcattcgacggcgacaagttctccttcactctcacaccttacgctgttaagactttcgctgttactctcgccgctcccgcaaagaaggctgagacaagcgaagaagttcacgtaaagcttcccttcacaagacgcgttaccacatacaactccgcaagaacatcccacggttttgcagacggtatctccattccttccgagctttactccgagaacgtaactgccggcggcgtatccttcaagcttgctcccgcagttgctcataacgctctcgtttgcgaaggacagaagattgcagttcccgcaggctatgatacactctatatcctcgcggcaagcgcacacggcgacaagactgtacagttctccgttgacgacaagactgtttccgtaggaatccaggacttcaaggctgacgtcggtgcatgggaacagctcgtaaacggcagaactcctcttgtaaagagagacgagatcgcagttaactacactcatactcacgacaaggacggcgacagactctacctcttcgcttacctcttcaagtatgctatccccgtaacaggcgcgaaggaagttgtactcccgaacgacagcgacatcgttgtaatggctgctacattcacaaagcgcggcaacgacgacgtaactcctctcgctcccctctacgacagagttgacaacgcaaaggctcccgtacataacgttacagttctcggacttgacggaagcgttcgtgaggttctcgctcgtgaagaaggcaaggcggcagttgttaagaccgacagctactcaaacggctggctcttcaagggctgggactgcgaatacatcaccgctgaatgcgaaaacgaagctgttgttaaggttcccgatcacgatatcactgtcggcgtaaaggcagaaaagctcggcgaaaacgttcttctgaacaagccctgcaagacaagcagcgacttcaacgaaagagaaaccggcgctcaggctctcaacggcgacgaaaactccaagtggtgcgctgaatccgaaaacggcgaacactggctcgaagctgacatcggcgaagttacaaagataggcggatggttcgtaatgcacgcaggcgttcaggaatccgcaggctataacacaagcgacttcagacttgagtacaaggttaacgaaaacgacgaatggaagtgcgccgatgaagtcaaggacaaccacgacagcacaaccaaccgttccttcgctcccgttgaagcacgttatgtaagactctacatcacaaaggctgaacagggtcgcggacgcacaaccagaatcaatatgttcgaggttttcaaggcgtaa

SEQ ID NO: 752 - DNA, 1728 bp, Unknown
  Unknown gut bacteria
atgtctattccaagaaatgaatacccccgcccgaccctgcgccgtgacgacaaaacatggctcaacctcaacggtcagtgggaattcgctttcgacttcggcaactccggtcgtgacagaaaaatgtgggaagcgccgagatacgaccacgaaatcaccgtaccgtactgccccgaatcaaagctttccggcatcgagtacattgactttatccccgcctgctggtacagaagagaagttactcttcccgaaggctggtgtacagaatgcggcagagttctcatccacttcggcgctgtagattactattcggaagtcagagttaacggcaagctcgcaggcacacaccgcggcggcttcactcccttcgcagttgacgctacagaattcctcaaagacggagtaaacacaatctccgtattcgctgaggacaacggacgcaatcctctccagccgacaggtaagcaggtttacgtcagctactacaacgtcgcctgcgactacacacgctgcaccggtatctggcagacagtctggatggaatatgttccgaagaactacataaagaccacaaagatcactcccgacatcgacaacggcaaggtagacgtcattgtaactctcgaaggcgacaattccgctgtagcagaagttaaagctgtagctaagctcgacggcttcacggtttccgaaactgtagctaaggtttgcggcaaatccgctcagttcgagcttccgattcccgacgctaagctttggactcttgaagagcctactctctacgaccttgagcttgcggcaggacaggatatcgcagtcgcttacttcggcatgagaagcgtcagcatcaacggctccgctattgagcttaaccacaagcccgtattccagcgtctcgttctcgaccagcagtacttcccggacggaatttacaccgcaaaggacgacgaaactctcatccgcgacatcgagctttcaaaggcggcaggcttcaacggcgctcgtatgcacatgaaggtgtttgaacccagatacatctatcacgcagacaagctcggctacctcctctggggcgaattcccgaactggggtcttgacgaaaaggatcccgcttcccttctctccatcgttcccgaatggctcacagaaatcgacagagactacaaccatccttccatcatcggttggtgtcccttcaacgaaacaagcgaaagacgcaacaaggacgttctcagaacagtttacaacctcactcacgctcttgatcccatgcgtcccgttatcgacacatccggatacgttcacgttgttaccgacatctacgacgtacacgactacgaacaggatcccgctaagttccacgaccacttcactgctctcgtaacaggcgaaggctctcccttcatccacaatccgagacacgaaaagtatgaaggtcagccctacttcgtatcagagttcggcggtacatactggaacatcgacgaagatccctccgctgcatggggttacggtcaggctccgaagacaatcgaagagttctacgaaagatttgaaggactcatcaacgtgcttctcgacaacccgaagatctgcgcgttctgctatactcagctcaccgacgtatatcaggaaaagaacggtatcttcgcgttcgacagacgttccaagttcgacctcgaaaagctccacaagattatgtcaagaaaagcagctatcgaaaagtaa

SEQ ID NO: 753 - DNA, 3123 bp, Unknown
  Unknown gut bacteria
atgaccgcgtccgccctcgtttctcccgtcttcgccgatggggaaagtgcggatacggataccaaaacgactctccaggagatcagcgaaacctttaaatcgatctcatacgaagaatacgtcaaaagacatgagggcgctgttcgcggaaacagttccgtaactgttaaagccaccgattatctggcttccgaaacaacggccgacgtatccgtagtgagcgattatgaaggcaaaagcggtcagtcactccagatcgaagataacggcaaggtgacatggaccgttaatatacctaaagcgggactttatgcggtaaagctctcgtattgctcagtaactgataagactaactcgatcgaacgtgtgctttacatcaacggtgaagttccgttcagcgaggcacgttaccttcttatgaagaaaacgtggaaaaacaactacactgacggaagatttgaaaaggacgctaacggaaacgagctccgccccacatcttacgttcagaaggaatggaaggattacaccttcatcgactcaaacggatattacgctaaccccttcgagttctactttgaagagggcgaaaacactctctcccttgagggcgtgcgcgaatccgtcgttataaacgagatcaccgtcttcccctacgaagataaaatctcctatgacgaatatatcagcggcaagcaggaagctgcaacaaccgatgtcatccacatcgacgcagaaactccctacgctacctccgactacactgtttatccgatttatgaccgtaaatcctcgataacagaaccgcaggaccccgcgaagatcatgctgaataccatcggaagcgaaaaatggcagacggtaggtcagtggaccgaacacgaatttgaagttcagaccgcaggactttatgaaatcgtattgcgttacagacagaacgaacagaccggtatgtatacctcccgtaaggtttacatcgacggcgaggttccgtttgaagaagctaactacgctaaattcaattatagcacgaactggcaggttgaacctctcggtaacggcgccgatacgttccagttctaccttgaacccggcaagcacattttgaagctcgaagttactctcggcgaaatgggtaccgtagtacgtcaggttgcacaaatcgttgactccatcaacaaggactacctcgaaatcctgaagctcacaggtccgtctcccgataaataccgtgactacggcttcggcagagttctccccgatgttgttgaagacctcgttctccagtcaatggctctcacaaacgttgttgactacatcgaaggtatggctaacatcaagtctcagaactcctccactcttgaaacagcagctcgttactgccgactcatgggtacaaacgaggacgagatcgcgaaaaacctctccaaccttaaaaaccaggtaagtactctcggtaactgggtctccacagctaagaaccagcctctcgagatagactacataaacattcagcccgcgtctgctgacctcccgaagagcgacggtaacttcttccagtctctctggtatgagctcagacagttcgcagcgtccttctacaccgactataactcactcggcggctctacttccgaacaggcttccgataagtccattgaagtatgggttacaaccggtcgtgaccaggcgcagatcatccgtaacctcatggataacgacttcggtccttcctccggtatcgacgctactcttaaactcgttgccggcggtacgctccttccctcagttctcgcaggcgtcggtcctgacgtagctctcccgggaacaggcgtcgacccgattcagtacgctatccgttccgcggttatcgccatcaaccccgaagcttacgttgacgccgaaggagatgacgaaaaaactctcgaaaacaacgcgaagatgcgcgagatattcgccgactaccacgatgtcgaaggcagattcacggaagccgctatgattccccttgagctttacggtaaggtttacgccctcccggatactcagtcatgggaaatgatgttctaccgcacggatatcctctccgagctcggcgttgacgttccgaagacttgggatgacctccttgccctcattccgatactccagttcaacaacatggaaatcggtatgacacagaactatcagatattcatgtaccagatgggtgaagagctttgggctgacgacggcatgagaatcaacctcgactccaacaagtcccttgaagcgttccagacgatgtccaatatgtttactcagtattcactctccgtagactatgacttcgctaaccgtttcagaacaggtgaaatgccgatagctattcgtaactacaccgaatacaacaacgtcgttatcttcgctaccgaaatcgcaggtctttgggaattcggtcccgtacccggaatggttcaggaagacggttctataaagaatacctcgatgtccggcacatccgctctcgttatcatgtccggcgctaaggacattgaatccgcttgggaattcatgaagtggtacaccgattcaaagttccaggttgactactccaacgaactcgtagcaatcctcggtcccgcagctaagaacgcaaccgctaacatggaagcgctcgaagaacttccctggacctccagagaatacagccagcttatgaagcagatggatcagaccgcggctatcacaaactaccccggatcttatatcctcgcacgttatacaaacttcgcattcctcaacgcgtataacaataaggcagaccccgttgattcactcctcggttacatcaatacaatcaacaaagaaatcaccagaaagagaactgagttcggccttgagactctcgaaatcggtcagactctcgcttcaaaacgtctcggtcaggcagcagagcttatcgacggtcttgacgacgcacagaaaacatcgctcgcaaatgtaacagccgctataaacgacgaaagcattgaagagctgagaagcgcggcgtccggacttaatacctccgatgagacgatggcaaagctctcgtcctacctcaccgacgcagcaaacgctctcgaaagctacctcgaaaaataa

SEQ ID NO: 754 - DNA, 2841 bp, Unknown
  Unknown gut bacteria
gtgaacgacatctgcgacctttccaccgaaggcagcgataaactcaccgttcccatgagctggcagatggctctcggacgcggctatgacgttccgaactacacaaacgtaaactatcccatcccctacgacccgccgtttgttcccgacgaaaacccctgcggactttactcccgtaagttcaccgttccggcagctatggcaggcaagaagatttacctcaatttcgagggcgttgactccgctttctacgtatgggtaaacgatgagttcgccgcgtacagccaggtcagccacatgacaagcgaaattgacataacctccctcgttcatgcgggtgagaatgaaatcaaggttctcgttctgaaatggtccgacggtacatatctcgaagaccaggatatgtggcgcatgtccggtattttccgcgaagtataccttcttttcagagacgaaacacacatccgcgatatattcgttcactgcgaccttgacgacagcttcaccgacgccgactttaccgtagacgttgacgtgacaggcaaggcaaccgttgaatggactctcgactgcccgtgcggtgagacaatatcctccggcaagtgcgaagttgacgagagcggcaagattgtagttcccacagtaaagaacgcaaagctctggtctgacgaagaacccaacctctataatcttactctccactgcggaaatgagtacatcactctccccatcggcgcaagaagagttgagataaaggacggctgcgttgtcataaacggcaagaaggtcaaggcaaagggcgttaaccgtcacgacagccaccaccttctcggacacgctacccccgttgagcatatggtacgcgatatcatgatcatgaaggcgcacaacgtcaacatggttcgtacgtcacactacccgaacgacccgcgcttcaccgctctctgcgacaagtacggtatctacgtttgcgatgaaaccgaccttgaaacacacggcgcaagaccctggtacgctctttcccgctcaccagaatgggaaggcgagtacgttgacagagttcagagaatggttgaaagagacaagaaccatccctgcgtaatcttctggtcactcggcaacgaatccggctggggtcagaaccacgtcgctatgcacacatggattaagtcacgcgacacctccagaatcgtacactacgaaggcgcaaactacgactacaacgacggcaagtacctccgcgatgttacggatatcgagagcagaatgtacccgaaccccacatggtgcgacaactactgcaagaatcccgaaagagacgagcccctcttcctctgtgaatacagccacgctatgggtaacggccccggagatctcagagactactgggaagttatcgaagcgaacgacaatttcttcggcggctgcgtatgggaattcatcgaccactccgttgctataggcgataagtacggttcaccctcattcacatacggcggtgacttcggcgaccatccgaacgacggaaacttctgcgtagacggtcttgtttaccccgacagaagagttcataccggtctcgaagagcttaagcaggcgattatgcccgttgcggttcgcgaagtaaagcccggcacggttgcgataaagtcccgcagatacttcaagtctcttagcgacatctcaatggcatggacagttaaggttgacggcaaggcagtaaagtccggagttcacccgaaccttgacatcgctcccgaagccgaggaagtatttgaaattgttcccgaaaacgagcttcccgcacatggcacagtaactctcgacctctccttcagacagaacaagcctacggaatgggcggacgtcggatacgaagtaggatttgctcagttcatctacgagagagcagaaaaggttaaagccgctcccgcactctatcccgtagagctgtgcgagaacagagaggaatacaccgtaacagtcggcgagaccgcatataagataagcaagttctccggcatgatcacagacatctgcgacaacggcgagcaccttatcacaaagcccgtagttcctcagatttggagagcgcctacggacaacgacagaaacgttcagtgggattggagaaactccagcatacacaacgctaaggtaaagtgctactccacagaggtagtaaaggctgacgaaaacgaagctgtaatcctctcgaagataagccttgccgcagctccgaacgaagtggttctcagagcggacatcacctacaccgttaagtacggcatgggcattaagattgcctgcgatgttaagtggaacgtacagaagaagcattatcctcgcttcggcatgagacttacaatgcccgagggagctgaacagatgcgttacttcggctacggaccgaacgaaagctacgttgacaagagacttgcatccaagctcggcgaatataagtccaccgttaccgaaaactacgagccgtacgtattcccgcaggagaactcctctcactggggatgcagatgggctgacgtacatactgttgcgggacacggcttcctcttcacctcctgcgagccgttctccttcaacgcaagccacttctcacccgaacagcttaccgaaacccgtcaccactacgagcttaagagagaacccgagactacagtaatgctcgacatgagaatggacggtatcggttctaactcctgcggaccggagcttgccgaaaagtaccgcttcaacgagacggaattctcctccagcgttacaatcaagcccgtattcgccgccgaaataaatccctacagagaagcagcaacagaatattaa

SEQ ID NO: 755 - DNA, 2184 bp, Unknown
  Unknown gut bacteria
atgcaatacaagaataagtggcttgttcacgcgacgcaggagaaaatgcggaacagcccgatagtgaacgaaatagcaaacaaactcggaatcaaactgccgacagcccagcttctcgtgaaccgcggatgcatgaccccgacagaagcaaaagcctttctcactaaagaggaagaacagctgcacgacccctttatgatgctcgacatggacaatgccgcgtacagaatcatcgaaggcattgaaaacggagacaaaatcgttatctacggcgactatgacgttgacggagtgacatcggtaagcagcctttacctgtatctgaaggaaaaaggcgctgacgtgtcgtactatatcccgtgccgcctcggagaaggttacggtgtgtcggaagcagcagttaaaaaactccatgaagaaggaaacaaccttattataacggtggacacgggaatcacggcggtggctgaggcggaacttgcgagacagctcggcatggatatcatagtgaccgaccaccacgagtgccacggagagctgccggacgcagaagcagtagtcaacccgcgaagacctgactgcccatatcctttcaaagagcttgccggagtcggagttgtgttcaagctgatgtgcgccgtcgaatccgtcatgaatcccgaggacgaaatgatagactgcgtaaggcgaatctcagccgaatacggtgatcttgtcgctataggaacaatcgcggacgtcatgccgataaacgacgaaaaccgccttatcgtaagctacgggctgtcccttatcgagaacacgacccgccccggacttattgagcttatcgaagccacaagaagcgactcaaaatatcaaactaagcgaaaaattaccacctcgttcataggatatacgatagcgccgaggataaatgccgccggaagaataagcgaagcggctattgccgtgaagctgtttttggctgaggactgcgaaactgccgctcccatcgcgaaaaagctgtgcgatatcaaccgcgaaagacagaacgaggagaacaaaatcgtcgaccaggcatacgcacgcattgacgcagagcatgatttcgagcgcgacccgataattattctcgacgatgaagaatggcaccacggaatcataggcatagtggcgtcaagaataaccgaaaaatacgcctgtccgtcgatactgatctcatttgaaggaaacggcagtgaaaagagcggagaagacttcggcaaaggctcgggaagaagcgtaaagggactgaaccttgtagacgcgctgtccgaatgctccgatttgcttgaaaaattcggcggacacgagcttgcagccggacttacaataaaacgagagaatctccccgaattcaagagaagactgaacgactgcgcaagggagagcttcaagggaatagagcgaaagaccacacttgaagcggaatgcgagctttctcccgcagacataacgatgggacaagcggaggagctgtactgccttgagccgttcggagtttcaaatcccattccgatattcgttatgcgccgtctcaccatagctgaaacctcacttgtcggcggcggaaagcataccagaatcatgctcaaggtcggaaacaatgtagtgaatgcaatgtgcttccgtcatacgctcgacgacatttgcctatatcccggagataccgttgacgtaatgttctcgctcgacataaacgagttccagaaccagaaaacgctccaaatgattataaaagacatacggctgtccgaggctgaatacgaaaatgagatgaacgcaagagagattttcgcaaagctgcgcggaggaatgagcgtggaagagataagccgactgaaacccgcaggcattgtccccacacacgctgattttgcggcagtctacaacgcaatacgccgtgaagcaagactggagcacgaggtcttctccataagagcgcttatcaatctgctcggctctgtcggagacaaaatcgggtacgtcaagctgaggttcatcatgctcgtgttcagtgagatgaatctgcttgaaataaaagagcttgacgcagaccgtgaaatatatgcgttcaaggtagtattcaccaaaaccaaaacaaaccttgataattccaatatactgagaaagttaaagtccgacttcggcatgactgaataa

SEQ ID NO: 756 - DNA, 1965 bp, Unknown
  Unknown gut bacteria
atgggtcttaagacagcgatagacgaccccagagatatgttcgtcggtcccgatgaaaaggtatatatcgtaagcgccgctacaaactccgtagtagttcttgacagatattacaaattcctcttcgagattacaaagttcacaaacgaacacggcgtacccgatacattcgctaatccctccggtgtattcgtaacggaagattacatctatgtctgcgatacagacaacaaccgtatcgtaaagttcgacacagagggtaattacattaaaatcgttccgaagccggaatcaaacctctttgaagaaggctccatctataagccggttgcctgcgcggttgacgattacggtcgaatcttcgtcgtatcctccactacctaccagggtatcatcgtgctgaacgacgacggcgacttcttcggattcatcggcgcacagaaggtaacaatcggcgctcttgaaattctctggagacagattcagacggatgaacagagagcatactctgaagaatatgtttcgaccgagtttaacaacatcacgatcgacaaccagaacttcatctatgtaacaacttcatccatcgacgagtccgaccagcagaacgctatcaactccaagtcaaaatcctccgacttcgcccccgttaagaagctcaacgcatccggctccgacgttatgaagcgtaacggcttctatcctccgtcaggtgaagtcagaatcacaaacctctccacagcaaccatcacaggcgcgtccaaaatcatcgacgtagcgtgcggacccgagggaacatggtcgataatcgacgaaaagcgttccaaggtattcacctacaacgataacggcgacctcctcttcacattcggcgataaaggtaaccagaccggtaacatagactcggttgaagctatagcataccagggctcaaagatactcgtcctcgacaagactaacgataacatcgtggtttacagaagaacagagtacggcgacctcctcctctccgctatcgagcataacaacgaccgtctctacgatatgactatcgacgactggacagaaatcctcaagagaaacaacaacttcgacgcggcttatatccagatcggtaaggcgctttaccgtcagggtaagtacgaagagtccatgaactacttcaagtccgcgtatgaaacagaaaactattctctctcctacaaggaagttcgtaaacagtgggctaacaagtacttctggatgattccgatagtaatcgttgtcgtctgcatcctccttgctaagttcttcggcttcgcggctaaggtcaataagcgtaccgcactcaagctcggaagaaagagcctcaaggaagagctgctatatgcgttccatgttatcctccatccgttcgacggattctgggatttgaagcatgaaaagcgcggctccgcaagaagtgcattcgttatcctcatcgttaccatccttgcatattactacaacaccatcggtcagggttacatcttcagcccccgtccgtccactgcattcaacatcatgagctcggtttccgccgtacttgcacctctgctcctttgggtagttgcaaactggtgccttacgactctgtttgaaggcgaaggaagcatgaaggatatcttcgttgcatcctgctacgctctcacacctctcccgctcatcatgatccccgtaacaatcgccacaaacttcctcacaaagtcagaagccggcgttgttacaatgctcgttacgttcgcgtacatctggctcggactgctcgtattcttcggaatgatggtaactcacgactactccgcaggtaagaacatcctcacctgcatcgctacaatagttggtatggcattcatcatgttcatcggcatactcttctccagccttatggcaaagatagtaagcttcgttaccaacatcgtagaagaaatcacataccggttgtaa

SEQ ID NO: 757 - DNA, 2268 bp, Unknown
  Unknown gut bacteria
atgacagttatagctattgcagtatgtcttccgataagcgcagacacacccgcttctataaccgagaccgatatgctgccccccgtaactgccgcagctgatactgcgaatgagtacggcaacagaataggcactgacatttcagtctacgagggaaacgacgaatactacctgtttttgccgtcctctgccgatatcagcgcggtaaagctcagatacaacggctcgctgaaaatgtatgaccccgacaacggaacactgtacgaaagcggagatatcatgctgtacgactgctcggcgggggaaatatccgtgtatgaatacgacagcgagaagaatatgtactatcgctatcgactgaaagtcatgcagggagaaaacatcgcgacgatttacgttaccctcgacaacggcgacgacggactgagacatataaactcttcccacgacgctgtagagacgggaagcatggtcatgaccgagaaaaacggcaagacgatatactccggcggactcaacagaatgaagggacacggacttacctcataccagtcgacaggttcgcttaacacgaaaaactcgtataatattaaccttgcaacaaaggctgagcttatcgaaaacgcgggaaaaagcaaaaagtggtcgctgctccgcataagatcgcacggtgactacgacgcgacaggtgtgagctacccaatgggattctacattttcgactctcttgcgggaaaagactactttaacatcacttcgcgttacgtcaacgtgtacatagacggcgaataccgcggagtttatattctgaccgagcgtatggacatgaacggctccattcagataacggaccttgaagccgagacaacattttccgacaacaactaccgcagagtggacagaacgaaaaaggaagaccccgcaatcgccgccggagtagagttctacagttactgcgcgtctgccgaaacaggggatgacaccgacataagcggcggatatgtgcttgaggtaatgtgcggcacgataggcgagtgcggatttaagacgaaaaagggaatgttcatcaatataaaaagcccgtcacatcccactcaggctcaggtgcagtacatcgccgagtatatgcagaattttgaaaacgcgcttttctccgacacaggcttcaactctctcggaaagcactactcggagtacatcgacataccgagctatacgatgcaggcgctgacatattccttctgtctcaactgggagatatacagaacgagcacgtatatgtacaaggacgttgacggaagcaagtacgaaaaggtaacattcggacccgtgtgggactttgaatccggaccgaacatcctcgaaaatgacaagacagtattcggaatgacattcgcgtacaacgaaagacagcagtacatctggtacgagcagttctggaaaaaagcggaatatatgacgtacataaccggcatgaacgaggaactgcgctctgttattgaaatactcgcgggcgagacggagggaacgagaatcttcaacctttcagatatgctcgagagcgtcagaacctcgcagtacatgaactggattcgctggtcgcagtcaagcaatttcgacagagcggcgaaaaaaatgacggattcgctcgagacgagataccgctgttggtacgcaaaactgtggaatcccgataattaccttctcggtgcagtcgtaacctccgaaaaaagcggagacggatatcttctgacaggggccgcaaacggcaaggtgtacggctatcagtggtataaggtaaccgatgataacccatcaaagggagaaaaaatagaaggtgcgactgaaagcacatatctcgcagcagacgacggactgtactactgtgcggtaagaggaagaaacaatgcgtactgggaatgggcgtctggcagcgtattctcgaaggaagagataacgatgttcacagatcccgttcatcccgacggaacaaaagcagagggaatcatagctcccgagccgtacaaaatcggagaagagcctaaaacagtcgcgggacttccgacagtcggcgaatacgtctacgtcgagcctgttatggaagaagaaacaaaatccgaagcagaaagcgcaaaggcagaggtgttcgagataacgcccgccgacaagccattcattgctgtgacctctgctgtagtcgttttgtccgcagttgttgtgtgcgtgtccgtatttacaaagaagaaaggagcaaaagcaaatgtgtaa

SEQ ID NO: 758 - DNA, 3120 bp, Unknown
  Unknown gut bacteria
ttgcactacaccgaacaaaacgacgagacccttgtgcttctgactctcgcgggagaacaggacgcctacgaagttcttgtaagacgttacgagaaaagcgtgatatcctcggctatgtccgtcaccagaagcagatacatggcagaggacgccgcgcaggatgcttttgtcaccgcatggatgaagctgaatctgctgcgtgagccgtcgaaatacggttcatggatatgcaggatagcgaaaaactgcgccgtgagcatgattcgccgatacagtccgtacatgagcattgacgaatttgagaactgctgtcagtcaggcgaaaacacactcctcgacattgttgaaagcgaaagccgcgacgagcttcattcaaccgtagacagcctgccggacaagatacgcactgtcatacgcctgcactatttcgagggactgagcatagcggagatcgccgacaggatgagaatatccgagggaacggtaaaatcgcagcttcacgacggcagaaaaaagctgagaaaggagctatgctcaatgaacgaagaaatgaacgacacccttgtgcgaagagttatgaagaaggtcgaagagctgaaaaactggcagtatctgcaaagcaaatcaggcttcgagaaggcttaccgcgacgtcctccgcgatgtagaggagcttcccgaatcaaaggacagatcccacgcaatggctgacgtactcgtgcgcggctggtggtggcttcccggggaaaagagcgaagagttgttctcacgcatagtaaaggcggctgaggacggacacaacgaagatgtcatgtgctttatcatcaaccgaaacatctcgaagatatacggcacagaggctgaggcttacctcctcgaaaaagagataccgagacttgagaaaaacggatttgttaaggctctcggatacgcgtggttctgtctcggatatgaacgtctggcaagagacaaatacgacgatgcgatagaggcttatgaaaaggcgaagaatatcattcccataggcgacgaatgcttctactgcgcggacgcactcatcaaaaccgtgaaggacagaagagcgtttccggctgaattaaacgaaaagagcttccgtttattcggcggaactgttgagctgaagctcggcaaaaacggcattcgccactggaatacggattattacggaacaggctttctcacatacatcacgtatatcaccatgctggaaaccgccgctcgctgtgacggacagttcaccgctgatatacccgtcggagaaagcataacaggctctgacggaacagtgctcacacatgaagccgagggagtcacggttgacacgcccgccggaaaattcgagaactgctccgtatggtcgaacaacataaatttcgacacgtgcaaggcattctacaaggacggcgtgggcattgtaaagcaggagcgctcggcatggggatataagtccgctctcgtgctttcctcctacagcgttaagggaaacggcatattaccgcttgataaaggaaacacatgggaatactcacttgaaaactgccccgaaaagctcgattattcctacaagctgagcacagcgcacaatgacggcgaaaaggctgttatcgagtggaactacagcatggttcgcagaggttacgacgaaaactcgtggctcgacatggcgctcatggtgcgaaacgagtactttgacggcagtaagtgctgtgacgtaactccggcgataaagagaatggaagagcttgcctccactccgctcgaaaagctccacaccaaagcagcagcgtcagtcgcgagaagaattcttgaaaccgacccggacctcaacccgaactacaccgaaagcggcaggtggaacttccttgatatccgtatgctgaagcgtgacggcaagcatataaagctgtgtgacgacaaccgccatctattcggctttgaattaaaatacattgccgacgcgtatgatgaagctctcctatacaacgaccaaatcggactgctggcggaaaactttgactacgcatggaacgacgactggaaagcaggcttcagcgataaggtttcgacattcctctggagcaatggcattacgacaaacgtgaaatgcgagggcgcaggagagataacgacaaacgcgggaacctttagctgcatcaagctgactttagactcttcaggtcttgaaggaggtattgcctatattgcgggacacaaggaatactggttcgccgagggaataggcattgtccgcacgctgaacgaatactcggagggcgcactcactgccgtatatgagcttgattcatacgagggcgtgggagaaggctatgctccgtacatactgaaaaacggcgagaccatgacaagagtatacaaggcggtgaacctttacgacggatgccgcggcgaagcaagatactatttcatgggcactgacgacggaacggtattattctccgatcggctcggaacaaagaaaaagccggaaaagataatgtcgtattcctcgatatatccggaagttgtcgaagaagacctttggcatgagaataagcatgacgaaagcagacagcagaactccataaacaactttggtctgctcgcatacttccttacgagaaattctcaaaacaacggtgcgcccgagagaagcgttgccaacaccaagctgaaaatacgtattatcgaggctctgacggaggacggcacagtaccgagagcgttcttaggctgctacgcaagacttcacctctcgatggcggcggcattattcggctgcggcaaaaacgaggaaggctacgaaaccctcgacaaagccctcacgctgtttgaagaatgggctaaggtacctcgcgacgaaatgcttgagaccggagaccccaacaacttcggcggaatcactctgaagaagggcaaggaagtatattacacacccgacggcaaggcacatcccttcgaggaatgctactccttcgaccaaagagattcagtaccgtacgggggcatgacggctgcgagcggatgggaatggttcaacggcgttcgcgaagaggaaagattcaagaaagcaatagaaagagcgaagaagctgataaagtaa

SEQ ID NO: 759 - DNA, 2922 bp, Unknown
  Unknown gut bacteria
atgaaaaaattcaatcgaatcctgtccgtagtgctcgccgtaatgatggctctctcctgcgcagtatttgcgggagctgccaacataaccttcaccgacgtagcaaaccactgggcatggactaacggtcagattccgtatctcgtcgaaaaaggcgtgcttaacggatacaaaaacgacaacggcacatacagcttcaagcccgacggtgaggttaagcgttccgagttcatcaaaatgctcgacgaaaccttcggtcttacaaagacaacttccataagctacaacgacatcaagtcaagcgactggtactatccctacttcgctaaggctgccgcacagggctacatactcaactacggtaacaacgcctctccggacacaaagataagccgtcaggaagctacatcccttctcgtgcgttatcttgacctccccgcgtcaagctcaacacagtccggcgcgatttcagacttcggtgatatttcttcctactacagcgactacatcctcagagcaatcgacgcgggaatcatcaacggctacaacgaaaacggcaagacctatttcaagcccgagaagactctcacgcgtgctgaagctctcacaatactctacagagctgccggttgcatctataacaccagcgcgtacaacagagacagcggcgcacacagcacgaacaacactgttacccgcggcgacatcaccatctccggcatcaagatgaacggacgcaatatcgttaccgaaggcgcatcttccggcacagtaacattcaacggctgcaccataaacggtactctctacatccgcggctcggctaacgtaacattcgacgactgcaaggttgaaaatgttgttgctctcggcggcggcaagctctccgttgtaagcggctcagagatagcttctctcacagttgaaaagtcatgcgagataagcatcctctccaacaccaccgtaaaggaaatcacagtaaagaacggcgcggacaacgttaaggttacaggcaacggtaagattaaatccgcttacatctatgcagacggattctcttccgcaatgctccccgaagaatttgaaatcggcaacaacctcagcgcatccttcgcaggtacggtttactccggcaacagcgacgctcagtcctcattcacaatggagcctttcgtaacagccgacaagaactcctactacctcaacctcgaatcaagcactgccggcacagtttactactacttcacaaacaatgccgtagctccttcaatctccgcgttcagctccagctattctgcagctactcacggaagcagcttcgacgttaaggcaaacgagcctacttcaaaggaaacatacgccgcgtccgcagtaaagagctactcctacgttgtagtacagctccaggacggcacaaagaagtaccccgtttacatcatcgacaacactctcgcgtcaagtgacagcggatttgaaacctctccttacctctccgactccaacacaatcaagtacaagaccacaatgcccggtactgtttactggtactacgcagaaaacggctcaactctcactcaggtagcgttcctctccgagtatgagaagcagagcggcgcactcaaaggctccgacacagttggcgttatctcctccggcacaataggtctgaaggacagctacctcaagaattattcctacgtagctctcatgttccagtcctcctccggcacatactacgcacctgtagtcctctccatgggcgacaacggattcacggaagctcccgcactcaagaccgcaggcattatcacctacaaggcaagcgtaaacggcgacctctactactattacgcggaaaacgccaacctccccacagcctccgacttcaagtccgagtacaacggagctaagtattccgacaaggtaacggcaaagaaaggcactgccgcagagcttagatacaaccaaaactacatcgacagctatccttacctcatcctcgcaataagaaactccgacggcgagtatatgcagcctgttgcagtcaacatcaacctcaccaccggcttcagaaacgagcccgagcttgacgaagacaacacaatctccttcagaacagaaacctacggtaaggtagaatactactacaccaaggcaaactccgctccctccattgacgaattcacaaaggcttacgacgacgcgcaggctaagtacaagggatcaaagacatgctccaccacgtacgcctccatttcgttcaaggcttcctacgttgaaagctatccctacatggctctgagattcaccgacgacgacggcaacgtttacagcccccttctcgtagctctcaagaccacagccgacaacggattcaagattcttccctacgcaaaggacggtaagatctacttcacaacaaccggcgacggcgaagttctctacttctactccagagacgactccaacgtttccgcagacgacttccttgactggtacgacgatacagcaaagacgagacgcggctcagttaccgttaaagaaggcgttgtggcttccttctcctatgacgaggacatcctggacagatacccctacatcatcatcgcataccgtgacggcgattccaagagagacactatctacacgccttatgtgcttgatgtagacgcttccggcaagtccaacgcaggctcaggcttcactatcacaggtcccgattcagacggagacttcaaggtaaccgcactctacgacggcaagctctactactacagaacagacaagaagtccgctcttccctcatccacaagcgaatttgaagcactttacgacagcgcaaattcctccgccacaaagaacctctccaaaggcgacgaccactatgtaagcggcgaaaagtacgcatatctggttctcgcg

SEQ ID NO: 760 - DNA, 2478 bp, Unknown
  Unknown gut bacteria
gtgtacagtggagacgagataaccctcccggcggatattacttatattgacagaatcgactacaaaaacggcaagctctacgcgacatacaacaccacctacaccatcacaagaaatgagcttggcgaggaagttgaaagacgcgtaggctacttctgggacgatggagcaaatgacgtgcctgtagcaaacgtggagcctgaagaagaaattgcggctgaggttgaagcaacggacgacggagagactgaagccgcagcagaaacggaaaccgaagtcgcaaaacagaccgccgagacaggcacgcccgtagcggcaacaacagaggaaacctcagaggaaacctcaacaaaactccccgacgggtggtactacgattatcagaacgtccagagccttaccgtaatggatggtgcgacaggagaagccactacgaccgcaatgcccaccgatattcccggatattctcagtccatggttatcggcagtgacggctctgtcaacatgatatacaataactacagctgggatgaagaaacacaggtatcgacgaacacctacactctcgtaaatatcgacgcggctacaggtgaagtaaagagtcagatggatttatcagaagcattccagtctgcgggacttgacctcgctaatacctatatcggcaatatgcagtgcgctgacaacggagatatttatatcacgagcgacgctacattcctcgttttcgacgccgatatgaactataagaccaagttcactctcgacaacggatatatcaactctatcaatatcgatggcgacaaggtttatgtgatgtactacggtgacagtcagggactttgcgtagttgaaaacggtacaaagaccgacatcaagggaacaaaccttacctctgcgcttagcaatatgtacgaaatgctcggcttctacaacggtcagctctactatcgtacacagaacaacatctcaaagtacgaccccaataccgacaccattaccgaagagatgaacttcatcaattccgacatctcgcaggaccagattaacacaaccaagcttctcccggacggacagattcttatcgcggcctacgactattcctccggttcaaacaagctcacggtacagctcatgcataaagtacccgacgacgagattcaggaagaagtaatcgtaactctcggcgcaatgtactcgaactacaatatagtaaacgctataatcaagttcaataagcagggtacgggagtgcgcgtttcccttgttacatacgataagtacaacaacgaggataacgaatacaccggcggcgtaactcagttcaataatgatatcattaccggaaacatccccgatatcatccttctcgactcatccctccccgttgaaagctacttccagaagggaatattcgcggatctcaatcagtttgtagacgaccccgaagtaggcataaaccgttcggattatctcacaaatctgtttgacgcctgcacagttgacggcaagctctattctatgataatgtcgttcaacctcagaactcttgtcgcaaagtcaaagtacgtcggaacagaatccgggtggacatttgaagacatgatgaaggctgtacagaatatgcccgagggaatgaaagccttcttcgacgcaagccgttccgatatcatcaataatttcctcggcaactccatggattccttcattaactgggagacaggcgaaacaaagtttgaatcgcaaggcttcatagactttattaagttccttgcaacctgccctgaaaagggattctgggaagcatattatgactcaatgggcggcaactacgtttatgacgaagaaaaagagcaggaaatgaaccagcagtatgagctccgcttcttcaacgacctcgcgctcttcgacttcgaatacatttacagcttcactgaccttatttatgaaagaaataccttcgcttcaaaggatatcacaccggtaggctatcgcacagattccggcaacggtgcgataattcagccgaatattgagcttgccataagccaggtttcacaggttaagaaggcggcgtgggaggttctcaagtacttcctcaatgacgacggcgtatcaaagcgcagctacaacttctcctccaacatcagccaccttgaatctctcgcgtcaagcgcaaaggataacttctattactacaacagaaccgacgacgatttccagtggtataaggatcagggctacagcgacgactacatcgaatacctcaagaactccaatcagcctttcgagcaggaagttgtcgatatcacaatgaacctcatcaaaaacgcaacacaggtttcacgttccgactccgaccttcttgacataatcaacgaagagctttccggattcttcggcggaacaaagacagcggaagagactgcaaaggtcatcgcaagccgcgcaaagatctacgtatccgaacattcgtaa

SEQ ID NO: 761 - DNA, 2850 bp, Unknown
  Unknown gut bacteria
atgactgacgctaaagccataaaactgcccgagcttgacgaggataaaaaattcagggacagaaaagcgctgtacttctcatttctcgtgcctcttgcggggatgttctttatctactgcttcctcggagtgtatcctgcgggaaataattccgtcctcgtgctcgacctcaacgcgcagtatatctactattttgagcagctgagaagcatacttaccgagggaaaaagcattatttacacctttgagcgtgccgccggcggagagttcatgggtatgttcgcgtactacctctcaagcccgttttcgctccttgtcgcactctttccgaagcagtccattacggaagcgatgctctttatccttgtgctgaaaacgggatgcgcaggactttcgttctcatatctgctgacaaaaaagcgcgatatgggaataattccgcgtgtgatgttctcgacaatgtacgctctttcgtcgtatgtcgtggttttgcagcataatgttatgtggatggacaatgtgatagtgttcccgctcctgctccttgccgtggatgagcttatctcaaaggggaagttcaagctgtacgttatcgcgctcgtgtattccgtaatgtcgaacttctacctcggatacatgacctgcctgttcattttcatatggttctttgtgagatacttcatgctctcccaagaagagagaaatcccaaaaatataaaactgcactttcttaaatcgcttgtcagaatagggctgttctctcttcttgccgtcatgatatccgcgataatcatccttccggtgtactattcgctcggattcggcaagctcgagttttccacgcctaactttactccgaagcagctgtttgacttcgcggatcttctcacaaaagcgttcttcggctcatacgattcagtcagaccgagcggaatgccattctactactgcggtacgctctcgctgattttagccccgctgtatttcttctgcgacaagatacctacgcgaaagaaagtcggtatggctgtcattatgctcgtccttgtcgcaagcttcaatttcagcgtgcttgacataatctggcacggaatgcagagaccgaactggctcaacgcgcgctttgcttatatgttcaccgctctcatggttcttatggcggcggatgttttcaataatatcaaaagcatcggagcgaaggcgtttacctgctcggctgtggcgtggtgcgctctccttgtgattctcgcgaagataggctacgacaatctgcctgattttcagtgtgtgtgggcgggaatactgctgttcgtactgttctctgccgtaatgccgtcgtatatccactcgcttgactccgacagtgtgaagaaaacctcggcgggagtgctgtgcggaatcgttttggcggaggctctcggaaacggcgttgtcatgctgtacgctctcgacgaggacgtgtcgtattcaaggcgcagctcgtacagacaaatgatagacacctacgaaaaagccgcggacaccttcctcgataataccggagacgagttctaccgtgcggaaaagctcgttcaccgcaagaaaaacgacaatttcgcgctcggaatcaggggtatgtcaaactcaacctccacgctgaacgcacgcacaataaagctgctcagtcagtttggctacgcttcaatgtcgcattggtcgatgtacgcgggagctacggctgtcactgacgcgcttttcgatataaaatacgtcatggcggatgagaccgacgacaagcctgtgatgaactatatccacgacctgtacgagctttacgactccactgacgacgacatagacatatacgaaaatccctacgccctgtccattgcatattcggtgaacgcggacaccctcgactacgacaaacccaaaggcgagatgtacgtagacgacggatatgtagacccgttcacgtacatgaatgagctgctctcgaagatggtgggacacgacgtgactgtatggtccaaagtgaacgtcaaagaaaccaccgaaaccggatgcagcgtaacgtttgctaccggtcacagaggctttgaaaaggacggagacggcactgctaaagtgacatacatcctcgacattgactccgacaaggcggtttacgcgtacttcccgtcggaatatccacgtgacgcggagcttaaactcaacggcaagaagctgtgtacctatttcgacggcgaggacttctcaatccgcgagcttggcaagttctacatcggtgaagaagaaaaggtcgagcttgtgatgaaggaaaaacagatgtatatccgctcgggctgctcgtacttctggtactttgacgaggacgcgtttgtgagtgcaatatccgagctgaaggacggcacaatggacgcgcactccgagaaggacgacagaatctacggaaaaatcacagtacccgagggggacggggcggtattcacaacgataccctgcgacgacggatggaaggtatacgttgacggggaagaggtcgagaaaaaggcagtgctgaacgagtcgctgatagcattcgacgtcactccgggcgagcatgagcttgtgttcgagtacagacccgactgcgtgaagtacggactcatcctctcggtcagcggacttgtgatatttgctgttttgtgcgtgggagagtacgtattaaagaaaaaacgcgcgtctcgtgagataatcgaagaagacgtagaagtgatacccgacgaggaagttttcggtgaaatcagcgaagagacttccggggacgcatcgaatgaatcggcaattgaaccggcagaagatactgtaaaggaggacaaaacagaatga

SEQ ID NO: 762 - DNA, 2961 bp, Unknown
  Unknown gut bacteria
atgctcacgtccttgctgtcctcatgcttccgcgacgactacgacatgaccgcggatactctcgataaatcacagtcctcgattcagctaagacacatacttgaccccgattccgaggttcgcggcgtgtggatagcttcggtttacaatatagactacccctcccgtgccgacctttccgcagaggagctgaaatcggagatagactccatactcgatacctgcgagaagaacaagctcaacaccatattctttcaggtaagaccatcgtgcgacgcgctttacgacagcgacatctttcccgtatcaggctcgatttccaccgagggaaagctcgtttttgatccgcttgaatacatcgtccgcgaggctcatcagaggaatattttcattcatgcgtgggtaaatccgctaagagtgactatgaacacacacgacatctcctcacttgacgacaaaagtcccgcaaagctccatccagactggactgtggcatatgacgacggaaagctgtatctcaacgcgggaatgccggaggtgcgcgagcttgtggctgacggtgtgcgggagatagtttcaaaatacgatgttgacggcatagttttcgacgactatttctatccctatcccgtatacggcgacgacggaaagcttgcacagtttgacgacgcggaggaatacgaaaaatacggcgcggactttgacaatattgccgactggagacgcgacaacatcaacaagataataaaaagcgtctacgataccgttcacgagactgatccggagtgcgtgttcggcgtgtctcccttcgctatctggcagaacaacaacggcgagaacggcggaagcgacacgaacggatttgaagcgtacaactccctctactgcgacgctgcggcttggattgacggcggctacatcgactacatctccccgcagatatactggacattcgatgacgcaaactcggctttcgacattcttgtgcggtggtggaacgcagtgcttgacggaagtaatgttaagctgtacgtctcccacgcttcataccgatacgaggacggaaactgggattctcccgcgggacagctgacagagcaggtttcatacgccagaagcgagaaggcttaccgcggaagcatattctacggctacgacgagataaaccgaaacataaacggtgcgagcgacgacattatctcagccttccgcgacgacatagtttacaccgatattcagtcgaccggacttggagtggtagtagcttcccccgcgagcggctctgtcatgacctcggcgaacacatacattctcggctcggctgacccatactacccgctcaccatgaacggagaaaagataagccagacaaaaagcggtattttcaatatgtacgtgacgcttgaaaagggagaaaacagctttgtctttgagcagaacggaatgacatatgtctacactctaacatacgaccccgacaccgccacagttccgacaaaggaagcagaaccgctgtcgctcgacaacctctcgatagtgaatacctatcctgcgcaggatgttgccactcacgacaggaaaatctacgtctcatgcactgctcccgagggtgcggcggtcaaggtgaacataggcggagttgaaaccgaacttacgcaggagactgtcacaaagcacgccgcgtcgggttacacgggagtgacatacagcgggagcgcggatctgcccgaaactgccgttggtgagataaaggactgcggaaacataaaattcactcttgttcaccgagacggaactacacaagccgacggccctgcggtgcgctcgatgggagagaacacttttataaaggtacgtgcgaaaaacgactacactcagctgaaaattacggaaaacagctcgtattacaatgactacaccgttcagtcagccggaatggaggacgtcgcgctctcactctggcggggtatgtacaagctgagaatgggcggatatgtttacgctgacgacatggaagagctgggatacacgacggaaagcacattttcaaccttttcttccgctaaagtgacaaacaacggacggaacacggagttttctctcgcctgcgacggatatccggcttacaacgggtgcatagatgaaaacggaaagtttgtggtgacgttctacggcattaactccgactccgcgcccgacgccgttattgagaaaaatccacttctcacctcatgcgaaaccgtgaagctcgacggcaaggtcaggtattcgtttgagctttacgacacggaaaacttctacggctttgaccttgactaccgtgacggaaacgttatagtgtcgctgagaaacccgatatccgtagacacgcgctcttccactccgcttgacgggataaacattgtgcttgacgcagggcatggtggagacgacagaggtgcggcgggagcattacctgacgggatgaacgagaaggatttgaacctgaaaatcacgctctcgactgcggaaaagcttgaaaagctcggcgcggacgtaaccctcacaagaagcggcgacacaacgctcgaccttttcagccgtatggcaatgcttgaggagcttgaaccggatttgtgcgtgtcgatacaccagaactcaatggactacacctcgaacgtcacacgtgtgcgcggaaccctcggactgtggtgcatggacggcggaaggcttctcgcaagatgcgtcagtacggcggttgcggattctctcggacgatactggcgcggttcacagtaccagatgctcgcgatgtgccgtaatccgaaatttcccgaagctctcattgaaacgggatttatcacaagcgcggaggaatatgagcagctcatgagtgagagtggtatcgagcgtgcggcggaaggcttttgcaacggtattctcgactggttcagcgcgcagtctgagtatctttcggcgtaa

SEQ ID NO: 763 - DNA, 1908 bp, Unknown
  Unknown gut bacteria
atgaaggtatattttgaaaacggcacgtttgtacgcgatgaattctgctccgttcgcgaacaatacgagcttgacggcgttactcttacggctgtgcgcggagaatggcacggaaacaaggctctcgacagcgaatgcggagcggaaataggcatgactcccgacggcgaattcacttgcatggcagacgtaaggcattcggaattctggtgctcgccgagattcggaaaaagcggcgattacactcaggttgacgaatgtcagtattttgtttataaaaggccggacggcgtgttcggagttatcgtacccgttgtctcggatgactacaaatgcattcttgtcggacgcggcgaaaaactggcggctcgtcttttttcatggaaggacggacttaaggaatgcgacactctcgcctgtgttaccgctgagggagacgacccgctttatctgacagagctgtgcgttcgtcttgccgtaaagctgctcggacgtgcaattccgctgagacgcaacaagagatatcctactgtgttcgagtatctcggatggtgcagctgggacgcacttcagattcgtgtgagcgagcgcggacttgtcgagaaatgcgaggagctgaaaaagaaggacatcccgataaaatgggcgataatcgacgatatgtgggcggagatcagcgaatttcccggcaaataccgcacgaggaaggatatgttcgcgctgatgcattcctcccacctgtacgactacgaggcggcgaaggatcgtttcccgatgggactaagccatgcgatagagaaaatgcattcctacggcatgaaggtgggaatatggcacccgactaccggttactggaggggacttgacccgaacggcaaggcatacgaaaagctgaaaaatttcacctacaccacgcccgacggaatgataatcggaaactggcgcgagggagcttcattcaggtactacgacgcgatacactccttcctgcgtgaatgcggagcggattttgtcaaggtggacaaccagagcatgacccgccgattctacaaaggtcttgacagtgtgggaaaggttacgcggagctggcacagaggtcttgaaggctcggtaggactgaacttcgacaacaccatgataaactgcatgggcatggcgtcggaggatatgtggaaccgcggatacagcaacgtatgtcgagcaagcgatgattttcagccggaggacagagcatggttcgcgaagcacatcctccagtgtacctacaacagtatgctgcaaggtcagttctactggagcgactacgatatgtactggacggacgacacgcaggcggagaaaaacagtctcctgagagcagtgtccggcggaccaatatatgtgagcgacgagataggcagaaccagaggtgaaattctcgctccccttgcgtttggagacggaaagattctgcgctgcgacagagtgggaacaccgacagcagactgcctgacatccgaccccgaggacagcggcgccccgataaaaatccagaacactgtaggcggcagcggagttatcgcggtattcaacatcgacagaaacaactcccccgtctcgggaagcataaagccgtcggacgtatcgggtataaagaaagcggagcagtacgtactctacgagcatttcagccgcgagataaagataatcggcgcggacgaggctgtggagatatctctcgcgaacaacgacgagttcaggctgtacctcataatcccctacgaaaacggattcgcacccatcggacgtgtggacaaattcgtctcccccgcagcaataactcacatctccggagaagaagtcgagctttacgagagcggagagtacggctatataaaagacggagaattgtgcattaagaatttataa

SEQ ID NO: 764 - DNA, 3567 bp, Unknown
  Unknown gut bacteria
gacagccccacggttgcagcatcggacgacagcgcgattgttgtgtggaagcagattcagaccggtgaagagataggcgagaccgtaaacgacgcgcttctctataagctttacaagggcggcacatggggcgatactttcatgctctacagcggagacgtcggagaagtgcttgacattgacgcgaagatgctctctgacggcacagcggcggttgcgtattccgtgtctgaaaaaggctcaacgtcggacggcgagatttactattccctcatcgacaccgaaagcagctctcccgcagacaccgtaaagaccgtccgtgtcaccgaaaacgacagctccgacatatcccccgttatcacaaagacagtgcttgacgaggaagaagtgttcgttctcgcatggcacaagctcagtgaagactcaggagtggagctgaacgacataggctttgttgtgttcggcaaggacggcactcccgagagcaatattcccgattctcttgcggcatccgtcaacatatcgaatttcgacggcttgttcaccctcacaaacggagcggagagcctgactgatatctctgtagtatggcgcgacaagaaggcgggaaagagcaacaacgacattataaagtcggctaagctcggactgtacgacggagtttacgcattctccgcaccgacggacgctgttgttaccgaagaaggcaatgacgttcagaccctcagcgcatcctcggcagacggaaaaatcacgacagtttacgcactggaatatcctctcggcacaagctcggagaagtcatatgagttcacgaccgagaacggcgagactgtatcgtacactatcgaagttcccgacagcaggacggatctttactacgcgcattcttactacggcaacgcggtcgaagtgaacgacattatggttgacttcacgacactggcggcggaaactcccactccgatttcgttcaccgtgacaaatatgggcgtggacgttatgacctcggttgacattacgattgacggaaagacgcagagctacgactgccgactcatgcccggtggatacagcacgttctgctacgtttacacgacaggcgaaactattgaaaacctcacctacacctgcacagctgaatttgactcgggagatactgccgacactacgggagacgtgttccttgactatcccgatgtgggaatcagcggcatcaccgtgacaaagcagagcgacagagtcagagtgatgaacatagggctttataaccagtccgcgtccactctcacaaaagccggcagatacgtcagatacggcgtctactccgacagcgactatacaaaaccgatagacggaaagtatttcgcggacggaacagcgggagaaggctacacgttcgatattacctcctccgacaagctctcacttatagacgagggaatcttcacggtaagcgcggagtttaagataggcgaatacgtgaacgaccttggcatgaccgaaataccgagcggcggcgtgaacctatttgtcagagcggagattgttgagaatgataatgtcctccccgaatccgacaagataaacaacaacgcgcgcatgaacttcgagagccttatcgacatccgcggagaaaagataagcgccgacagctacatgagacagggacagaacaacacaagcgttgacgtagtcctctcgaacaactctcttgaagtggtgagcggcggcaatgttatcgtctctctctatgacgaagacggagcactccttgaaacaaagcgcacgtacggcacggacacccttgacatgaccggcgaggaagtgaagaaattcacgtttgactttggatattccggaagctacgttctcgtatggctcgttgacgacataagcgaagacccgtcggacagcagcgttatcggaatattcctcgaaggcacagacctcaccgttgacagctttgacgaaaacaactacgcggagcttgacgacatcgagcgcggacagtattcgcttactgttatcccgtcaaatcccgacgctaaggtttatgttgacggagagcttgccgaaaacggtgtgtatgacttctatttcttcagaacgagtgagtacacaatcacaatagtatcccccgacggctcaaataccgcagagtataagtttaaactcaacagagcgccggaagaaatcgttgacataagactagagaaaactgatcttacgctcgacagcttcgacagagacaattacgccgaaatcacagacttagtaagaggcaagtacaagctcacggtaactctcctgcatgacggcgcggaagtttatgttgacggagaacttgcaaagaacggcatatacgaaataaactttacaaaatctcatgagtacacgataacttccggcggtcttgaatacagactgaagctcatgatgcacccagaagaaatggcgggaatatcactcgacggcgcggaactcggaacggagatttttgacgaaagcaactatgccgaacttcaggatatagtcctcggaaaccataatctgaagattacgcctcttcatccagacgctaagatatttgtggacggaaaagagacggtgaacggcgagtatttcatgtatttatatgaatcgcatgaatataaaatagtcataacttctcccgacggcaagagcactgttgaatacaagctgaaagtcaatgcgaaaccgagagatatcaagagcacgtccgaagacttgagtgttgctgcggcgttctgcacgctgacatttgagacaaacggcggcgactacataagaccgctgagaaagatttgtaagactgtagtcgatcttgacaagtacgttcccgagcgcgacggatatgagttcacgggatggtacaccgactcggctctcacaaacggcgtgacaaaggttcgtctcacaaggaacatgacagtctacgcgggatgggaaaagatatcggctgacgaagaaatcgtcgaagagtacgagttcccgtttactgacatatatgaccgggactggttcttctacgatgttgcttacgtagctcaaaacggactcatgcgcggaacaagcagcgacaagttcagcccgtattctacaaccacaagagcaatgatagtcaccgtgctttaccgtatggaaggcgagcctgacgcaggcgaaaacagctttaatgatgttcccgacggcgaatactacaccgatgcggttgcgtgggcaagtgaaaacggaattgtcaacggctacggtcagggaagattcggaccgaacgacagcattacacgcgaacagcttgccgcaatactctacagatactccctctataagggatacgacgtatcggtcggcgaggacacaaacattctcagctttgacgatatcgcagagctttccgactacgcattcacctccatgcagtgggcttgcggagcgggaattatcggcggcatgggagacggcagacttgcacccaaaggaaacgcaacaaggtgccagatagcggcagttctccatcgctattgtgacaacttcggcgaataa

SEQ ID NO: 765 - DNA, 1611 bp, Unknown
  Unknown gut bacteria
atgctcgcagtgctcatggtcctcagcgttgccgttacagtcggcgcggcttctacctctgagcagagcggaatcggcaaccccgtaggaatcggagatctcctcgattactacaaaaaattctactccggcagcaacctcccctcttcctcttggtgcgacgacgacgatatctactccacatggtacggctcctgcccgaagtgcaagggattcgcgttcttcttcgtatacgacggcgcgataagatacgtctgcctcgaatccgactgcggtaagaccggcaccctcgactctaagttcaacgaggatacctcaaagaaagtctactgccccacctgcaaaaagtcttccggcgtttaccatgtagaccacgtgtatgactccgaaaccggcaagttcgttgatacctacttctgcgtttactgccgcgaaacattcaaaaattcctcttcctccgtttatcccgataagactcccgatgacatcacctgcggaagagacgactgcacaaagaaggcaacattccagtattacgcatacgctgacggcgtgctttacgcttacttcaagtgcagcgacggtcactacaccaagaagatagtctccggctatgattacgacgactacttctactccatcaaggtcatcacctcaaagggcggcgactactacgttaagggcggcgagaaggctgcttacggcgaaaagaagaccatcacctttgaagctgaccgcggatacgttctcacagatgtttacgtaaacggcgaaaaggtttccttcgacgacgatgagattaaaatcaccgtgaagagcaacaccgttgtacgcgcgtacttcacaaagatcgcttccatgaaggaatacaagatcaccgctacctccacaaacggcggcaagatcacagctacactcaacggcaagtccgttacaaaccccgcgaaggttacagcaaagtacaacgataaggttgtataccgcttcacacccgcgtccaagaactacacaatctcctccgttaaggtaaacggcaagtccgtaggcacatcctccacatacacagtgaacggaatcacctccgacacaaagattgaagtaaaattcaagtggaactgcccctacgacgacgttaagtccaccgacaagtactacgcagctatcgagtacgtaacagaagcgggaatcctccagggctccaacacttccaacactctgaagccgaagtacaacttcaacggaacacgcgcggtatcggttaagacattcgcgtgcgcgcttgctgaaatggcagacgtaaacgacaagctctcgaacaacacacagagactgaactgggctgaaaagtacggtcttgttgacgaggacgaggacgtaagcgtagtctgcaacgtaaagagagcgtgcaagatggttgacgaatatctcgaagttctcgaagacttaaacgacatcgaattcgacgatttcgaccgtgacgacagcgcaaaggaaaactgcattgccatcgacatggtaacatcctccgtatacaagaagaaccgcaatctgacaaagaacgacctcgcggctgtactttatcttattgcaaacctcgaatatgatgactga

SEQ ID NO: 766 - DNA, 1932 bp, Unknown
  Unknown gut bacteria
atggctgaaaacatgaagaaaaacatacctgagaatatgcctcctatgccggataagccgaaaaaagagaaaaaaggcgagcctacggcagacgaactccgcgatatgatgaagaaaaacggctcaaagggtcccggtggtccgggcggtccgagagctatgattcgcgagaagccgaagaacatcagagcaaccctcggcaagctgctcagatacataggcaagaataagtattccgtcatactcatcatagtcacgacgattattacaacactcttaaatcttctcggtcctacgctccagggcaaggcgattgacgcgattaccataacggagcagagactcagcgtggacttcgacggacttgtcagaatactagtgctcatggcagtcgtttacctcgcaagcaccgtcatacagatagcgcagggaatagcttcggctaaaatatctcaggacaccgtctataatatgcgtaaggacctgttccgcaagatatcgtacctccccataagctatgttgacacgcacgctcacggtgatataatgagccgtatgacaaacgacgtcgacaatatctcacagacactgtcctcatccatcacatcgcttatctccgcagtgcttacccttatcggcgcgttcgctatgcttgtgaagtacgactggagaatggctctcgtgtcgcttatcacaattccgctgactgttgtagtttccatggtgctctccaagctcatgagaaaatacttcatcgccagacaggtgctcctcggtcagctcaacacacaggtcgaggaaatggtaacgggctacaaaacagttatggcatacggaaaagaagctgatgcttgccgtgactttgccgagataagtgaagagttccgaaagtgcagcatcaaggctaacgtatggggcggaatcatgggacccgcgatgaacattatcaacaacctcaactacctcatcgtagcggcgttcggagcatactttaccgtaaccggagcaatttcagtcggtgatgttcaggcgatactccagtattcccgtcagctttcacagccgataaaccagatttcaaaccagtatgccaatattcttactgcaattgcgggtgctgagcgtgtgttcaacattctcgacactccggatgaagttgacgaaggcaaaacagagcttgatattcccaacatgagcggcaacgttgacttctcgcacatcaatttctcatatgtaaagggtaagcaggtcataaaggacttcaaccttgaggttaagcagggtcagaagatagctctcgtaggcgcgacaggctcaggcaagaccacaatagtaaacctcctcacgagattctacgacatcgactcaggtaagataacgatagacggcgttgacataaacgatatcccgaagaaggagctgcgcagtgcgattgcgatagtgcttcaggatactgtactgttccacgataccatcggcaacaacataaagtacggcagacttgacgcaacggacgatgaagtcaaagccgccgcggaaaccgcagaagccagagaattcatcgaacgccttcccgaaggatataatacagtcctctccgaaggcggcagcaacctcagccagggacagcgccagcttctttccattgcgagagcagtccttgcagacccgaagatactcatcctcgacgaagcaacatcatccgtcgacacaagaacggaaatgcacattcagcaggcaatggtagctctcatgaaaaaccgcacgagccttatcatagcgcacagactttcaaccatccgcgacgccgacatgataatcgttatgaaggacggtcaggtaatggaaagcggcaaccacgatcagctgcttgaaaagaagggcgtatactacggactgtaccagaaccagttcgcgggtatcgagacctga

SEQ ID NO: 767 - DNA, 2856 bp, Unknown
  Unknown gut bacteria
atggcaacattattccagaaatacgctgccctcaaggtacgtatcggcggaaaccgcgagcttcacggatatgaagaaactttcggtatgccccgcgaagagcagcagcacatcacgcccgtaccgcgctacattgttcgtattttatcagaggttgagttctcaatccgcctctcaaagtcactctccggcaagtatgacagcattatcgactccgcgatagactatctctcatccgtagttgacgaggaaggctgcatcacaaagtccgcggcggctaaggcggaagaaatgctcatgcccctcgcttccgacgcaaaagagtataagctcatcctcgcaggtcacgctcatatcgacatgaactggatgtggagctggcacgaaacagttgcggctaccatcgctaccttcacaaccatgcttaacataatggacgagtacccggacttctgcttaagacagtccaagaccgccgtttacaagatagtagacgactacgcacccgagcttcacgacagaataaaagcgcgcattgatgagggacgctgggaagtcacctcctccgcatgggttgagacggacaagaacatgccgaacacggagtcaatcgtccgccacatcggctactcaaagaaatacctctccgaaaagtggggcgtatctcccgacaagctcgaggtggacttctcccccgacacattcggtcacagcgcattccttcccgagcttgacaactacggcggagtaaagtactattatcactgccgcggtctcgacggaaacaacgctctctatcgctggaaagcaccgtccggcaaggagctcatcgtttaccgtgaacagcactggtacaacaacggtatctcaccgaagccggctatggctctcatcgacatttccgagagaagcggcggactcaagacaggtcttgtagtttacggcgtaggcgaccacggcggcggacctacaagacgtgacgtcgaaagagctatcgaaatgcagtcatggcccgtattcccggttatcaagttcggcacaatgcgcgaattcttcaaggaagctgaaacagtacgcgaaaagctccccgttgtcgaccatgagcttaacttcacattccccggctgctacacaactcagtcgagactgaaaaagggcaaccgtcaggcagaaggcgctctctccgaagctgaaaccgcacttgcattcgctcacacaagagcaggcgcacaggttcactccgaagccgttgaatccgcatggcagaaggtgcttttcacccacttccacgacattctcaccggctcttgcgtacaggacagccgtgagcacgctatgggactgttccaggacgctctcgctacagctaatacagaaacatccctcgctctcggaaagctctccgcaaagatagacacctccatgatagttacaaaggctgaccccaactcacaggctgaaggcgcgggcgcaggctacaacatcgaaaactttgccggtcgtgctgccgacgaaagaggatgcggtcttacaagaatctggaacgtattcaacaactcctacgctgaccgtgaagaacccgttgagataacggcatgggactgggtcggcgacatgagatacatcaaggtaacggacgcagagggcaaggagcttgaattccagctcatcgacggcggactccagcagtactgggatcacaaatacttccgcttcctcgtatatctgaaggttcccgcaatgggctacaccaccgtagttctgaagcagggcgatatgggcgactatcccgtatatctccagcccgagggacgtacaacaggcgttgacagaaactatgtcctcgaaaacgaatatgtacgctatgagttcgactactccaccggcgagcttctctccatgaaggacaaggacaccggcagagagtacatagctcccggaaagcgcggcggcgtggttctctttgacacgaaccgtcacaactccagcgcatggaacatcggcacacacctcgaaatgttccctgttacaaacgtttacaacatccactacacaataggcggaaagctccgtcgcggattcgcttttgaaacaaagataagaaactcctccgtaaccgttgagtacactctcgacaagggtgcaaaggcggttaaggctcacatcagagctgactggagcgaggtgggcggcgaaaaggttcccgttctctcgtacgttctcccgacaagcatcgaatgcgacaagtttgcttacaatgttcccggcggtcgtatggttcgtgaagctgcggaaggcgacagacccggtctttcctatatcacaacatacgcaggctgcggcacaacaaacgcgggtatcatcgccgacagcaaatacggcttccgtggcgtagtaagagacggcaaggctgtagctgaatgcacgctcatcaactccgcgacaagccccgatccgtatccggaaagaggtattcacaacatcacgctttggataggtctgttcccgtcctgccctgttgagatggaaaagtgctccgttcgcgccgttcacaacatgactcccgtaagcacaggctctcataagggtgagcttgctccagagggaacattcatgaagttctcttccgaaggcgcaattctctccgctgtttacgcacacgacgacaagctctgcgtccgctgctgctccgtatccgacaagcccacggaggttactgtagacatactaggagacatcaaggaatcatacgcggcagacctctttgaagaaaagacaggagaggctcacgttgacggctcaaaggtattcgtaacggtagctccctacaccacggcaacaatagttatcagataa

SEQ ID NO: 768 - DNA, 2319 bp, Unknown
  Unknown gut bacteria
agagttatctccgactccgacccgtactccgaggaagaggaaaaagcggaaaaatattccgaaagcggcgcatatttatccggagacgaagctcacgaggaaatctccgcggagaaggcaaagaaaaagcgcacgtctatgtcgttcggaacggctctcgggcttagtctcaataacctcatgacaaagaaagcgcgcaccattctcacagcctttgccggaagcatcggtattatcggaatcgcgctgatactttcgctttcgaacggaatcaacgtgtatatagataaggttcaggaagacactttgtcggcatatccgcttgaagtaacgcgggaaacggtcgatatgaccgccatgataagcgcgttcaccgaagcgagagagtccgctgacgaagagccggtcgacggagttatcaagtcaaacaccatgatgtacgacctgatggacaccatgacgagcattgacgtgcagaaaaacaacctctccgacttcatcgactacattgacgcgcacgggggagacctcgacggctacgcttccgctgtgacatacggatacgacgtgccgctgtatatttattcgaccgacgaaaaagacgacagcggacttcccgtgaagctcaacccctcggatatgttcggcgcgatgaattccgcaatggcgtcgcggtcgaattacgcatccatgatgaccgtcaacgtgtgggacgagatgccgtctaacatggatctcatccgcggacagtacgacgttatcgccggcaggcttcccgacaaatacaacgaggtagtccttatcgtcgacgagcacaacaaaataaacgacgtgtacctatacgccctcggattcaagccgcaggatgagctgaaagagattatgactgccgctcaaaagggtgaggagatgaacgttcaggcagaggaattcacctacgacgacttcatcggacatgaattctcgcttctcaccgcgtccgatatgtacagaaaaaacggcgacacatgggaatacgccggagacaacgaagtctacatgaacgcaaaggtagctgacagcgaaaagctcaccatagtaggcataatccgcccgaatcccgaagctgtagcaacctcgttaaacggcgcgataggctacctcccgtcactcaccgagcacatcatgaacgcggctgacaattccgacattgtgaaggcgcagaaggctgacgatggcacggatattctcacctccctcccgttcctcaccgaagaaaacgaccccgcaaacatgaccgtcgcagaaaaagccgaagcaatccgcggcaacatcgacagcatgaacgacgcggaagccgcagtggtgtataccgactacatggcgggactttccgacgaggacgcggcaaacatggcacagtcacagctctcgtcaatgacaaaggacgaggtgaacgcgcttgttgtgtccgctatgatgcaaagtcccgaggcgcagggcatggacgagaacaccatcgcgatgtatctctccaccatgtcggaggaagacataaactcgatagctttgcaggctttgacggcggcaattcaggctcaggcgaaggagagcgcggaatcctcactttcgtcctccacctcggaagagcttgccgcatcccttgacgcagtgctttcctccatgacggacgaggatgtagtgaagaccttcgccgactatatgcccgagacggtatcggacagcacgcttaaggataatttaaagctgttcggacaggctgaccgcgacgacccgtcatacatcctcatctacgccgacacatttgcgtcaaaggatgagatatccacaatgatatccgactacaacgcgcagaagacaagcgaaggcagggaagaggatgttatccactacaccgattacgttgcgctgatgatgtcgtccatttccaccataatcaacgtgatttcgtatgtgcttatcgcgtttgtctcgatatcccttgtggtgtcctccattatgataggcattatcacctacatttcagtgcttgagagaaccaaggaaatcggtattctccgcgctgtcggtgcgtcaaagaaggatatttcccgtgtattcaacgcggaaactctcatcataggcttcacggcgggtgcaatcggtatcggaatcacgctcctgctctgtattcccgcgaacattataataaagagccttacggatatatcgaacctcgcacgtcttcccgcagtcggcggagttgcgcttgtgctgatatcaatgcttctcacgacgatatcgggacttatcccctcccacctcgccgcaaagaaagac

SEQ ID NO: 769 - DNA, 1671 bp, Unknown
  Unknown gut bacteria
atggcaaaaaagcaaaacagcaaggttcgcgtaatgatgctcggcggactgaacgaaataggtaagaacattgctgtcatcgaatatgaaaacgatatcatagtcatcgactgcggacttgcgttcccggatgaagatatgctcggcgtagaccttgtgataccggatttcacttaccttgagaagaacgcgtcaaagattcgcggcatacttatcacgcacggacacgaggaccatatcggcggtcttccttacctgctcaaaagcataaacgtaccggtttacggaacaagacttactctcggaatcgtcgaaagcaagctggctgagcacaagcttctcggagagcgcgagcttattacggtagaagcaggaaccgtcttaaagctcggcgtgttcaaatgcgaatttataagagcgaaccactccattgccgacgcgtgcatgatagccgtaaaaactcccgagggaaacatactccacacaggcgacttcaagctcgacgtttccccaatcggcggagaaatgatggacctcacaagaatcggcgagtacggcagagagggaatacttcttctcatgtgcgagagtacgaacgtcgaccaccccggctttactccgtcggagaagagagtgggcgcgtcgcttgacctcatcttcatgacgaataccgacaagcgtatcatcatagccacattctcgtcaaacgtacacagagtacagcagattataaattccagcgtaaaatacggacgcaaggtagcgataaccggcagaagtatgctcaacgttgtcggcgcggcggttcgtctcggatatatggacgttccggcaggcgcgcttatagatatagcggatatcaaccgttaccccgcggagaaaattacgatagttacaaccggttctcagggtgaacctatgtctgcgctgtaccgtatggcgttctccgaccattctcaggtggagcttactccccgcgaccttgtggttctctcgtctcacgctatccccggaaacgaaaagctcgtgtcgagaatcatcaacgagatgtataaaaagggagtcagcgtgtaccatgacgaagcggtagttcacgtctcgggtcacgcttgtcaggaagaattaaagctcattcacgctctcacaaagccgaagtatttcatgcccatccacggtgaataccaccacctcatgcagcataaggagcttgcagagtacatgggcatggatccgcagaacatattcctcatggatatcggtcaggtgctcgagcttgacagaaactcctgcaagaagaacggcactgttccctccggcagaatgcttgtcgacggttacggtgtgggagacgtcggaaatatcgtcctcagggacagacgccacctcgcacaggacggacttatcgtagttgtcgcgacggttgacatagacgaagccaccatagtatcgggacccgaccttatctcgagaggatttgtgtacgtccgtgaaagcgaagagcttatggataacgtaaaggagcttgtgcgcggcgtgctttgcgatactcttgactcgggagtaacagagtggactcagatgaaaacgaacgtcaaggattcgctcacgaagtatctctacaccaagacaaagcgcaagcccatgatactgcccatcattatgaatgtatga

SEQ ID NO: 770 - DNA, 1776 bp, Unknown
  Unknown gut bacteria
aagacccttacacaggtttcctgcaactgcgacgcgctctccacatactacacatttgaaggcgcaggcgtaactctctccctcacattcatgactcctctcttcatggacgacctcgacataatgacacgtcccgtaagctacctgaagacagaggttaagtcaaacgacggcaataagcactccgttaaggtaaaaatctccgtttccgaagaaatctgcctcaactaccgcggtgaagacgaagttgttacggaagaagttacaacagactctttcacaggcgttaaaatcggtagggtaaagcagcccgttctcgctgtatccggcgacgacatcagaatcaactggggctacttctacctcgctgtaaactccggcaaggcttacgctgaaaaggtttcttctcccttcgttccccgttggcatgacgataaggctcccgaaggcttcaaggaagagatgactttcgtttccgccgaagctgacctttgcaccgcttgcgctccctccgctctcttcacattctcctatgacgacgtaaagtccatcgaatacttcggagacaagctcccctcctactggaacaaggacggcaagaccatcgttacggctatcgaagaagcatacgccgactacgactgccttacaaagaaagctaaggagttctccgacaagctcttcctcgacgcaacccgcgcaggcggagaaaagtacgctgaaatctgcgagcttgcataccgtcaggctatcgccgctcacaaggttgcggttgacaacgacggcaaggttctcttcatctccaaggaatgcttctccaacggatgcgccgctactgttgacgtaagctatccctcaatcccgctcttcctcatctacaatcccgagcttgttcgcggcatgatgcgtcctatctacaagtatgcccgcactcccggctgggtattcgactttgctcctcacgactgcggtcagttcccgctcgttcacggacaggtttacgcagacaaccatatcgaaggtcagatgcccgttgaagaatgcggcaacatgctcgttatggcagcttccgtttgcattgcttccggcgacacaaagtttgctgaagaaaacctcgatctccttgaagcatgggtcaagtacctcgaagctcacggagacgacccggaaaaccagctctgcacagacgacttcgcaggacacctcgctcacaactgcaacctttctctcaaagctgttatgggtatcgcaggtctcggcgtaatctataagatgctcggtcgtgaagctgactacgaaagaatgacagccgaagctaagagaatggctgccggctgggcagaacgcgcttccaacggcgacggcagctatcgtctcgcattcgacagagaaggcacatggtccatgaagtacaacatcgtttgggacaagctcatggataccggcatcatggacaagggcgttatcgctacggaattcgcttcctacaagagacacatcaaccactacggtatgcctcttgacaacagagaaacatatacaaagtccgactggctcatctggacagctactctctccgaatgccgccgtggatttgaagaatatgtcgctcccctttgggaaaactacaactgcacactctcccgcgtacctatgaccgactggtacaacaccatctccgcacagcagatcggattccagcacagatccgttgtaggcggacacttcatcaagctccttgaagctacaggcaagatgaagaactggaagaagtaa

SEQ ID NO: 771 - DNA, 1851 bp, Unknown
  Unknown gut bacteria
atggcaatcatcatcgttcaggtgctgtacggaatgatgtccgtttcggcagacaacaacaacaatgtcgaatacaagcacgttatggaggaatacaactaccatatggtgctcaaaggtcttaacgaagatcaggcgcgttatctcatcaaggatgaaggcacggtatttaaaagcgacgtgatatttgaagtcgtttcatcggagcaatatgtcaacgctctgacgggtgacgaaagatatgacgtttacctgtacttcaccggcgaccttgaccagtgcatgaagcgctttgagaagaattatcagcccgaccttgcagctctcggtgacgctgacagaaccttcacaaagtccacgaccccgctcatgaccttctcgaagaatatcgcggcaaatacaacaacgttcgtctttgtcacgcttatccttctcgcagtgtcgatattccttctcacatcgctctacaacatcagaatcaaccagtacaaattccaatacggtatttatctgacgttcggcgctgacttcaagatgctgttctccaccgcgttctgggagctgttcatcatctttgttgtaacgttcatcccgtccctcggtatctccacgcttatctcatacctcatgtacagcgcatcgggatacggattcattttcaacggtctttccatactgaagatattcctctttacacttgtcgttatcctcgcatccgtttggactcctatgaagataatgtccgtaaaggatcccatgtctcttatcatcacggaagacaactcgaaccttgttacctccccgatgcgttccttcaacatattcgcggaaaagttcccggttaagtacgagttctactctatctggcgtttcagaaaatacaatatccagcttcttacaactgctatcgtattctgtgcgctgttcatcatgggtctgtacatggcggatatctacacgaccgacctgtactacccacgcccgcagtttgaagtaaacctcgcggagtccggctttgagtatgacgagctaatgagcgaagagctttacaatatgcccggagtacgcgcagttgagataaacgacaactcaaccgaatcctacgaaaatgcctcccatatgatcgtggaaaagaaaaacgttcgtccgttcaaaaacctcgtacactacaacggaacggaatttgacgtaggcgacaaaaactggcgtgtatcgagcgacatcgtttacaaggcaatgacagcggaacaggttcgcattctcgaggactacgactacacgggagacgtcacaagcgttcttcagccgggatatgttgtaatcggcgactcgatatcaaacgttcccacatataagttcaacgtcggcgacaagatttacatctcggtaaagaccggtcagataaaagcagtcgacacaaacgtaacgggtcgcgtgcttctcaaaaatcagattgaatacttccactatgagtatcacgaattcacaatcggcgcgatcctctacgatattccctcaggctctactccgatattcatgaacctcgacgattactatacgattaccgggaagactccgaaggctacatcgttcaatatttacgttgaaaaggatataaccacagaggaagtcaactctctttatgccgaagtaagacagtggagccacacatacggcgacgttaaggtatcgaacaaggacattaccctaacaaacgcaatcgcggcagacaagcactacaacgagctttacatctgcatctcgatactgatactcctcatctccccgctcgtatggttcttctcacagactctttactacacaaagagagaaaaagagttcaatattctc

SEQ ID NO: 772 - DNA, 1464 bp, Unknown
  Unknown gut bacteria
tcggtcaacgtgaactaccactacgcacaggacggaacgattctcgacttgaagagaaaatcaatggtggctctgcccgcgttttacatagatcatttgggggatatggtaagatatatcgtccagtttttcggcgtcatcaccatcgtatcgcatttcagtccgctgtttctgctcatccttgccgccacctcagccgcgtccgtttattttatcttccagacgaaaaaggacgacctcgcgttccagaacgaaaaggtgcaggacgaccgcaagctcgattacctctatctcgtcatgacggactacagctacgcgaaggaagtcaggataaaccgcgcggaagactacgccgtgaacaagtacgacggaatcatgcagggacagttcaagagactgaaaaacctgctcggcagaagaatgaagataaacatcggcagtacggtcatagcagtcgcgcagacggttctcatgtatctttatttctcgtatatggcgttttccggtcgcatttccatctccgaatacacggtacttttgggaagcactactctgtttgtctccctgattttaggctttttcgagaaaatcgcgctcttcggcagaactctaaaggttctcgactgctattttgaataccgcgacacactcaccgccggaagcaatattcatgcgagcaacgcactgccacacaaggatatagacttctcgcacccgataatacggtttgaaaatgtctcctttgcatatccgaaaaccgaaaaaacggtgctgaaaaacataaacttagagcttagaccgagcgaaagagtggggcttgtcggactgaacggctcaggaaaaaccacacttgtaaagctgctcacccgtctgtacgaccccaccgagggaagaatcacgctgaacggagtggacatcagggaaattccgtatgagcagtacgccgcgaaaatcggtatcgttttgcaggattactacctgttcgcgtattccgtgaaggagaacgtcgttttggacgcgccttttgatgaagaaaagctatcattgtgcctgaaaaagagcggaagcgacaagaaaatcgaaagcctgccgaacgggatagatacttccatctcaaaaacgctcgacaacgacggaatcgaattctcgggcggcgaagggcagaagttagccttagcgagggcgatatacaaggatgctccgattcttgttttggatgagccgacaagtgcgcttgacccgatagcggaatacgagctgttctcgcggcttgacgagctttcggaaaacaaactcgcgctgtttatttctcacaggctgtcgagcacaaaattctgcgacaggataatcgtgctctccgacggaaaaatcaccgaaacaggctgtcacgacgatttgatgcgaaggcagggtgagtattacaagctgtttaattcacaggctaaatactacaaggagggctga

SEQ ID NO: 773 - DNA, 2034 bp, Unknown
  Unknown gut bacteria
ccagccacaaacgttttcgagggtgctgttgttcccgttgcaaccgacggtgcgcatcttcccggagacgtaaagataaagaagggcaagctccgcggagaggtttccgagggtatgttctgctccattgccgagctcggactcacgctccacgatatgcccggcgctatcgaagacggtattctcattctcggcgacgtaggacttggcgacattccgctcggctcagacatggttgacgcactcggaatccgcgacaatgttgttgaattcgagataacctccaaccgtcccgactgcctctccgtaatcggtctcgcacgtgaatccgcagtaacctttggcagaaagctcactctccacacaccgaaaagcgaatttgtttcgggcgacggcgacgacatcaagaattatctctcggtaaacataaagaacaccgaaaaatgttaccgctacagcgcaagggtggtaaagaacgtcaagattgctccttctccgctgtggatgagaatgaagctccgctccgaaggcgttcgtccgataaacaacatcgttgatatcacaaactatgttatgctcgagtacggtcagcccatgcacgcgttcgactacaagtgtctgagcggctccgaaatcaacgtaagaagcgcggaagagggcgaaaagttcgtttccctcgacagcgttccgcacactcttgactcttccatgctcgttatagccgatcacgacaaggccgtagctctcgcgggagttatgggcggagaaaacagcgaaatcaccgattccacgacaaccgtagtattcgaatccgctacattccatcccggaaacgttcgtgtcagcgcgaagaagctcggcatgagaacggaatcctccgcgagatttgaaaagggtcttgactccgaaaacacacttcccgcactcaacagagcctgtgagcttatcgaagagcttggcgcaggtgagattgtaaacggaaccatcgacgtttatcccgtaaagaagcagcccgtccagcttccccttgacgctgccgttatcaaccgcttcctcggcgtaaacctcactcaggaatacatggcggaggttatgagaaagctcgagttcggcgtatctgacgacctgcacacgataaccgttccctcgttccgtgacgatgtacgctgcatgaacgacgttgcggaagaaattctccgtatgtacggctacgacaagatagaatccactctgtcaaactccgcaactcccactctcggcgcaagaaccgacagacagaacttcgacaacaacctccacgatatgcttgtcggcatgggtatggatgagattgaaaccttctccttcatcagcccctcatactacgacaaaatcagacttgccgcagacgactacagaagaaagtgcgtcgttatctccaatcctctgggtgaggacacatccgtaatgcgcaccaccactcttccctccatgttgaaggttctcgcagacaactacgcgaagaagaatcaggcagtaacgctgtttgaaatgtcaaaggtatatctcccgaagagcgaagacgagcttcccgacgaacccggaagaatcacgctcggcttcacaacctccgacgacaagaacggcttctacagaatgaagggatatattgaagctatcctcgacatcgcgggaatcacaaacgccgtattcaaagcggaaaagaacgagcctacgttccatcccggaagatgcgcggttgtttactccggcgacaagaagctcggtattttcggcgaggcatatcccgaagtcagcgaaaactacggcatcggcgcgagagtttaccttgcagagcttgagagcgacaacatcttcgacacacgccgccgcgagatagaattcactcccatcccgaagcaccccgctatcgagagagacttctcattcgtatgcgacgaggagcttgaagccgcgtccgttgtaaacgcagtaaaagccgcaagcaatcttgtttcatccgttgagctgttcgatatctaccgcggtcctcag

SEQ ID NO: 774 - DNA, 1749 bp, Unknown
  Unknown gut bacteria
gtgagacaaaatttgaagtacatctacaaatacgttaagccgtttttcgggcgtatgatgttcggctttctcgttaaatttgtaggcacgataatggatttattcattccgatgcttctgtcctacataatcgacgacatagttccgaccggctcaaagacgcgtatcgtgctgtgcggacttgttatgttcgtgtgcgctgtacttgcgataacgggcaacgtaacagccaaccgcatggcagctcttgtagcccgtaacaccacggaaaaaatcaggaacgacctattcgagaggatttcttacctttccgcaagacagattgacaagttcaccgtgccgtctctcgagtcaagactgacctccgacacctacaacattcaccagatggtcggaatgatacaaagactcggagtgcgcgctccatgcctgctcatcggaggtattgtgatagcgttctcgcttgagcctgtgctgaccctcgtgcttatcgcagtcatgccgttcatcaccacagcggtttacttcatcacaaaaaaaggcgtaccgctctacaccgaacagcagactgaaaccgacaacatgacgcgaatcgtccgtgaaaacgctcagggtgtgagaattatcaaagctctcggcaaggaaagcaccgaaaaggcacgctttgacgaggcgaacatcggactgaacagagccgaaaagaaagccgcgctcaccatgggactaacaagcccaatgatgaacctttttttaaacctcggacttgtggcggtcatcgctgtcggagcataccgtgtcaacgcgggaatatccgaaaccggcaagattatcgccttcacatcatatttcacgataatactgaacgcactcatgagcgtcacaagaatttttataaactcctcgcgcggtatcgcctccgctaatcgtatcggagaagttctcgacacgccgtacgacatggaagctgacccgtcgtacaagccgaaggaatatcccgcaggtgagcgtgtgcctaagatagagttcgagcatgtctccttctcctacaacggcataaagaacgacctcgacgacgtatcgttcaagctgtacgaaaacgaaactctcggcataatcggaccgacgggagcaggcaaaaccacactgattgcgctcatgatgcgtcagtatgatgttgacagcggaagagtgcttctcgacggtcgtgacgttcgctccatgaaccgtgacgagatatcgaaaaaattcggtgcggctttccagaacgattttctcttcgcggacacactgcgcactaacatagcgttcggacgggatctcacggatgagcagatactgcacggtgcggaaaacgctcaggcaatgcagttcatcaacgaaaagcccggcggacttgactttgagcttacgataaagggcgcgaacctctcgggaggacagaagcagagggtaattctcagccgcgctctctcgggtaagcctgaaatacttgtactcgacgactcctccagtgctctcgactatgccaccgacgcgaagctcagaaaagcgatacgagaaaactacagcggcgagactacatccgtcattgttgctcagcgtatttcctcgataaagcacagcgacctcattctcgtaattgaggacggtcgtgtcacgggaagcggatgtcacgatgagctaatgaagtcgtgcgcgctgtacaaggaaatcagcgaatcacagatgggaggtgctctgcttgaatag

SEQ ID NO: 775 - DNA, 2994 bp, Unknown
  Unknown gut bacteria
atgcatattgatcttaaaaatatcgtaacatcgctcacactcggcatagacgtcggctcgactaccgcaaagctggctctgctccgcgcgggagatgtgatctgcgaaacctacgaaagacacttctcatgcatccgcgagactgtcgtgaaaatgctcgagagcgtgagagggcttgcgggaaacgaaaagctcaccgccgcagtctcgggttctgccggaatgggacttgccgagggcgcggagataccgttcgtgcaggaagtgtgggcaacgggcgaggtcgtaaaaaatgccgctcccgacactaatcttgtaatagagctgggcggagaggacgcgaaaataatattcttcgacggtgctatcgacgagagaatgaacggaacctgcgccggcggtacgggagccttcattgaccagatggcgacgctgctcgacgttactcccgatgagcttgacgagctgtcgctgaagcataacaaaatctaccccatagcgtcccgctgcggcgttttcgcaaagtccgacgttcagccgcttcttaatcagggagcagcaaaggaggacgtagccgcgtctatttatcaggcggtagtgaaccagaccattgccggacttgcgcagggcagaaagatagagggcaaggtaatgttcctcggcggacctctgtactataataagggactgcgcgagagatttgtcgaaaccttaaagctcacgccggagaacgcgattttccccgaatacgcaagaaacgccgtctcgataggtgcagcgatttacgcctccaccctcggaaaaaccaacacatacaccatagacgagctgatttccctcatcaaaaacgcgaagatcgccgccacctcaacccgtctcccaccgctgtttaaggacgaggctgactaccgcgaatttgccgaaagacacgcgaaggctgacgtggacgtatcaaacctcgagggctacagcggacgggcgtacctcggaatcgactgcggaagcactaccacaaagctcgcgctgataggagaggactcgcagatactctatacatactacgactccaaccgcggcaaccccgtagaaatagtacgcgccgagcttgcggagatatacaaggagtgcggcgacagagttcacatatgcggctccgctgtcacaggctacggggaagagcttattcaggcggctttcggcgtggacgacggcattgtagaaaccgtagcgcactataccgccgcgaagttcttcaagcctgacgtggacttcatccttgacataggcggacaggacataaagtgcttcaagataaaaaacggcgcgatagataaaataatgctaaacgaagcttgctcgtccggatgcggctcgttcatcgaaaccttcgcaagaggaatgcacatggaagccgaggagttctcgaagaaagcactgttcgccgaacatcccgtgaacctcggaagccgatgcaccgttttcatgaactcgcaggtcaagcagtcgcagaaggacggagcaaccgttgcggatatctcagccggactttcggtaagcgtagtgaaaaacgccatctataaggtaatccgcgcgcactcccccgatgagcttggcagaaatatcgtggttcagggcggcacctttctcaacgacgctgtgctgagagcatttgagcgcgaaatcggcgaaaacgtcaccagacccgcgattgccggacttatgggagcatacggcgcggctttgtgggcaaaggagagggcgaaaaaacgcgactatatctcgtctgttatctcccggagcgacctcggagtattcaagcatacctcaaaaaccgcaaactgcaagggatgcacgaataactgcctgctcaccgtgaacttcttccccggaaaaaacggcgaggtgcgcaaatatatctccggcaataagtgcgataagggcgcgggtaagataagccatgaagagggcgtgccgaacctttacgaatacaagcggaactacctcctctccctttgtcacgagaaaatagagggcggaagccgacgcggtgtcataggaatgccgctcaccctcggaatgtacgagcttctgcccatgtggacggcagtgttctcgtctctcggctttgaggtggtgtcgtcgggtatgtcgtctaaggcaatatacgaaaaaggacagttcacaatcccctccgataccgcctgctaccccgcgaagataatgcacggacatatagaaaagctgtgcgaaatgggatgcgatacgatattctaccccagactgacgtggaacctcgacgagaagttctataatatgccgagcggagataaccactataactgccccgtcgtcgcttactacagcgagctgctccgcggaaatatggacgtgctgaaagaaagacgcttcctctacccgtacctctccgtgaataacgaaaaggagcttgccgacggactttataaggagctgaagcagtattaccccgatatcaaaaaatcggaagtaaaagcggcggcaagggcaggctttgaagctctcgataaatataccgctctcgtccgtgcggaaggcgaaaaagccataaaatacgcaagggacaacgaaaagcccatcatgattttagcgggaagaccgtaccactgcgacgcggagataagccacggcatagataagctcgcgctctccctcggattcgtagtagtctcggaggattcggtggcacaccttgccaaaactccggaagtacacgtcctgaatcagtggacataccactcccgtttgtatcgcgcggcgtcgttcgcggcagaaaaccccgacgttcagctcgtccagcttgtctccttcggctgcggagtcgacgcgataaccacggacgaggtaagacgaatcctcgagctgaagggcaaatactatacgcaaatcaaaatagacgaaatagccaacctcggcgcggtaaaaatccgtctccgcagccttaaagccgtgatataa

SEQ ID NO: 776 - DNA, 3126 bp, Unknown
  Unknown gut bacteria
atgcctcagactaaaaaaacaaccggcacagcgcgaaagacttcgggaaagaaaaccactgcgaaaaagcagaccaagacagctcccgcaaagaacgctcgaaatgccgaaagctatgaattcctttcacaggctgcaccatacatacttgccgctgtcgctatacttctcgccgtgtgcattgtcattggagagggcagagtgggcggcggaattaaagatttcttcacgggactgttctccggcgcggcttatgctcttccgctgttcatccttgtgagggcatttctctggaagcgcgactcagccgagggacagaactacggcagaaactcatgtacagtcattgtgtttttgtgtctgacgatgctgctccatatagtcggcggaggagaaaacgagcttagcctaaagctgcactatgcggacggaatgagacttgtgggcggcggcgctgtcggaggaatactcggcgagctgttgttcagaggcttcggtaaggtgtgctccgttataatccttgccgcggtcatcgtgatactgtcgctgtacgtagccggactcacgccaaagggaatatacatctggattgcatatcacataaagttcgcgggagaaaagagagcggagagagccgaaaaacgcagaaacgctcccccgacaagcagagcaataaaagaggaagaatatcttaactacctcagagagaaaaaacgccgcgaaaaggaagccgctcaggcaaagctcacagaagaaccgctcattaatgagccgacggagcagacaaagaagccgagcgggaagaaaaacactcagcctgctaccgtataccgtgtgacaaaacgccgccttacagagatggatattccggttgacgacataactccgccggaggtgcagaaagcgggagaaatcgaaggctttgaagaacccgcaccgctccccgcagaactcgaagaatacgatgaaaacgaatacaatacggcagtggacgaaagaaactccgctgtggttgacgagaagatattcgacgaggtaatgcgcaggactaaggagagaatagagaaaggtaagcgcaccgacagcctgagagacacggacgagaccgagataaagccgaaggttatcgacgttcccgcacctgttgcagaacctgccgccgaaacttcagccgcaacaactgttgcagaaattcccgccgaacctgttcccgctcaagagaaaaccgtaactcccggaagcgacgagagtgacttcggagacatagcggacgagagcattgacgcgggggatgtgcttgacgctgttgaaatcgccgcgatgagcatccacgacaaggctaaaaccgcggacgaatacgagacggacaccgttaagctcgccatgtcagcatcagacgacgaaccgcctttcgatgtcgacgatacgcagaagtccgaacttgtattaaaacctgccgcgaaagctcagacagatgaaaacggtctcgatatttcgcagatattcacgggagacggcgaggatctcatcaacaaggtatccgaagctcattcaaaggaaagccttaccataaagcgcgaagctgtagcacagaacgcaacgcttccgaccgcagaaaagccgatgaagccgagcgcgcccgagtataaattcccgccgattgacttcctttccaagggggacgacgaagtacacggagacataaaggacgagcttcaggacaacgcggttaagcttgtggaaactctccgctcgttcaacgtcaaggtcaaaatcgagaatatttcccgcggacctacgataacgagatacgagcttacccccgaacccggtacaagagtaagctccatacgaaatctggttgacgatatcgcgctgaaccttgctacaacgggcgtcagaatcgaagctcccgttcccggaaagagcgcggtcggcatagaagtcccgaacaaaaagcaggagatggttcacctcagaactctcatagaatcccccgcattcacggacgcgaagagcaagctcactgtttgcctcggtgaggacgtagcgggagagccggtgtacttcgatattgcgaaaatgccgcaccttctcattgccggaactacaggctcaggtaaatctgtctgcataaactcgattatcatgagtatactgtacaaagcctctccggacgacgtaaagctcatgcttatcgacccgaaaaaggttgagctcagcatatacaacggcattccgcacttgcttgttcctgtcatcagcgagacaaagaaagcggcgggagcgttgtcgtgggctgtcggcgagatggagagacgctacggacttctcgaatctgtgggagtgcgcgacatcaacacatacaataaggtaacaaaggacgaccccgactacgcttacatggacagaatcgtcattatcatagacgagcttgccgatttcatgatgacagcgcccgatgcggttgaggattcaatatgccgtatcgcacagaaagcaagagccgcgggtatgcatcttatcctcggtacacagcgtccctctacaaacgtaatcacaggtcttatcaaagcgaacatcccgtcgagaatcgcgtttaccgtatcgaacaacaccgactcgcgagttatccttgacaagggcggcgcggaaaacctcatcggaaagggagacatgctgttcagtcccgtaggcgcgctcaagctcagacgtgtacagggcgcgtttgtcaccgaaaccgaagtggacgaagtcgtaaagtacatcaagaacatgaacgccgactgcgagacttattccgaatccgtggctaaccaaatcgagcgcgaagctcagaaatgcgacacgggaagcggtaagaagggtgcttctgcggcagatgaggacgacggagatgaagatccgatgcttgacgcggctatagagcttgcgatagagagcaaaaaaatctccacctcgctcatccagagaagactttccctcggatacggcagggcggcaaagctaatagaccgcatggaaagcctcggttatgtcagcgcgccggaaggacaaaagccgcgtgaagtgctgattacaaagcaggaatacatggaaatgcgcctgaacaatgatattgattaa

SEQ ID NO: 777 - DNA, 2556 bp, Unknown
  Unknown gut bacteria
atgaaaaagacggttgtcgggataatcgctcatgtcgacgcgggcaaaacaacgctgacggaggggatgctgtatctcgcgggaaaaattaaaactcaagggcgagtggacaaaaggaatacatttctcgacacgcacgagcttgagagggaacgcggcattaccatattctcgaaaaccgcgcgccttgacttcggagacagcaatatcatcctgctcgacactcccggacacgtcgatttttccgccgagactgagcgaacgctgtcggtgcttgactgtgcggtgctcgttatcagcggaagcgagggagttcaggcgcataccacaacgctctggtcactcctgcgcagacacaatgttccgacttttatctttgtcacgaaaatggacctcgtcggaagcgataaaaacgccgtcatgcgcgacgttacactctccctcggaagcggagccgtggattttgactcacccgaacgtgacgagcatatcgcgctccttgacgacagcctgcttgactgcttcctcgcgggagagagcataacgaaagagcagaccgcccgtcttgtgggtgagtgcaggctgtttccgtgcttcttcggcagcggactgaagctcgacggagtacgggagctgcttgaagccatagacctgtactgcgcggagagacaatattcggcggattttgcggcaaaggtgtacaagataggtcacgacacaacgggaaaccgattgacgtacatgaagataaccggcggaacgctcgtaaatcggcagaacatcacctacaccgtgaacgaagaggagataacggaaaaggtcagcggcatacgactctattccggcgcgaaatttgaagcggtcgactcggtttcggcaggcgagatatgcgcggtcacgggaatgagcaaaacctacgcgggagagggactgggacgcgaaaaatccgaaagccgcccgagccttattccggttctaagctacagaataaagctgccgaaggaggtgtctcccgtgacgttcctcccgaagctgcgcgagcttgaagaggaagaaccgctgctcggcatagtctggaacgaacgcttcggcgaaatagacgcgcacatcatgggtcaggtgcagacggaaattctcgtgcggcttatttctgacagattcggcgtcgacgttgagtttgaggacggcaggataatgtacctcgaaaccgtgtccgattctgcggagggcgtgggacatttcgagccgctcagacattacgccgaggtgcatctcatgcttgagccgggcgagcgtggcagcggacttgtgtttgcgtcggattgcagcgagaatctccttgacataaactggcagaggctaatcctcacccaccttgaagagaaaacgcacctcggagttatgacaggctctcccataaccgacatgaaaataactctcgtcagcggaagagcgcacctcaagcacacacagggcggggatttccgtgaagcaacctaccgcgcgctgagacagggacttatgaccctccgtgaaagaggaaaaaccgtactgctcgagccgtattattccttcacattggagctgccgggagagtatgtcggccgcgcgatatcagacatcaccgcaaaatacggcacgatagacgagcatgaagcaaacgaggatttttcacttctgcgcggaaccgttcccgtgtcggagatgggagactacgcaaacgaggtcgcggcatacactcacggcaagggaagactgtcggtgcttgtcgacggatactacccatgccacaacacggacgagatagtcagcgaatacgactacgacccgacggctgacatagacaacactcccgacagtgttttctgttcgcacggagcgggattcattgtgccgtggtatgacgcgccgtcgtatatgcacctcgagatgcgaaaaactttggtgagtgacagctctcccgcgcctgcgccgagagtgatagagagcaatatcgacatagacgagcgtgagcttgaagccataatggagcgtgagttcggacccatacgccgccccgtttactccgacccgaagaagcccgtggtggtgaacgaacgaccgaagaagaaaaaacgctcgctgtatataatcgacgggtacaacgtgatttttgcgtgggacgagctgtcggctatagcgaaattcgaccttgaagactcgcgcgtgcagctgtgctccattctcgcgaactataaggctttcacgggacgggatatcgtgctcgtgtttgacgcgtacaacgtgaaaggcgcggtaagacgtaagactgactataaaggcgttacggtggtctacacgaaggagggcgagcttggcgacacatatatagaaaagctggtctatgagataggcgaggactattccgtgagagtagttacgtcggacggacttattcagctgcaggctctgcgttccggtgtgctcaggatgtcggcaagggaattccgcgaggaggttttggagaacgacgcagagatcgagaaaatactgaaaaagctacgagaaaagaaataa

SEQ ID NO: 778 - DNA, 1698 bp, Unknown
  Unknown gut bacteria
atggtggtttcggtaattccgtatctgcctttgttcatctggaagaacgtagtaaacgaggtagtggctaagttctcaggtacatcggagaagactgtcggatatgttttgacacttgtaatattctatgtgctgtctctgctcctgcaatgcgcggtaaaacagataaacagtatcgtcaccaccagatacgacgccgagataaagtaccacatagacaacttctgcgtcgaaaagatggcgaagataaagtattcgtattatgacgacccggtatttgccgacaaaatgtcatacgccaaccgaataatgtacgatattctcgatgtgtctacggtgctgaaaaacgtgctgtattcgctgacgcagcttgtcatttcgggaatcatactcggacgctttgcgctgtggataattccgataatacttgtactctgcataccgcgatacatgataaagctgaaaatgtcggatgaagaccgaaaattcgagcagaaatacgaaaaatccgagcggaagagggactattactacggactgtttttcggagcggagcgtctggagataatgctttacgggataaaggatttcttcctcggaaagtacaacagggaatggaagaaccgcaacgacgcctacgacaaaaagaatctgaagcagctcggacttcaaatcctgtcgtcccttgttgtgacagtgtccgatatcattttctatatcagactggcgtattctgcgctgaagcggctcatcggagtgggagatatcacgtactacgtcagcattctctcgagcttcacgactgcgtccattgatattgtcgactccgttatcacgctcaacgatatttccgaaaaccttgactacatacgcgacgttctcacgcttgattcaacaaacgagagcggcggaaaagaacgtgtcagcggcgatgagatatgcatagagtttgaggacgtttcattcagatacccctgctcggagcgcaacgttttaaggcactgttcgtttaagataaccgacaaggaaaaaattggcatagtcggcgaaaacggcacgggaaaatcgacaatactaaagctgctccttcgcctgtacgagcctacctccggcagaattttgttgaacggaaagaatatcgccgagtatgatttgggtgagtatcgtaaggtctacggcgcgatgttccaggaatccgtcgactacagcatgagcgcgcgagagaatataatcatatccgacctcgaaaagtctgcccatgaaaacaacgacgactgcgtaaacgaagctgcccggagaagccgcctcggtgagataatatccgcgtgggaagtaggacttgacactcagctcacgaagcggtttgacgaaaacggacgggagctgtcgggcggtcagtggaagagattcggacttgcgcggacttactataaggattcaaaggaaatactgcttgacgagccttccgcctccctcgaccccgtctgcgagcatgaaatattcacggaattcacggaggtgtcgaatgacaaaggtgcggtaatgataacccacaggatattcaaccttatcgacatgcaccgcatattggttctgtctgacggaaggatagcggaggacggttcgcacagagagctcatgaataaaggcggcatctacgcgaatatgttccggctccaagcggacaagtacgtgtga

SEQ ID NO: 779 - DNA, 1977 bp, Unknown
  Unknown gut bacteria
atgaatcagaaaaccacgaaggcggacatgaagctgctcgaaaaaggctttattcatccgtcaaaccataccgaggtgatgtacgacattccgctgaccttcaagctcggcgaaaagactgtacacggaatccccgacacgatgaagcgcagctatacaagagagatagtcgacgcgaacatcacacgctacacctacacgggaatatgcgaaaaatgcggtcttgagataaaggctacacatctcgaataccgtgactacgccgtgtcggaatggcgcgttgaattcacgaacaacggaaacgaagacactcccattatctccgacatcatgctaggcggtgagattcgtggagagtttgacgcttttgtatacggaaacggcgacacctgcgatgagagcggctacgaatggttccgtgacactctcgatagcaccgttatggagctgaaaccctccgacggaaactcatgcagaggtgcgttcccttacatgaagctcgtgtttgacaaatttgtctgccgcgccgctgtaggctggagccagatgtggaaggctgtggtaaagcgtaccgacgacggagttgactaccgctgcggacagctcagatgccacatgaagattcatcccggtgaaacaatgcgcactcccactcttactcttatgttcaccgacggagacgaagacagatcccgcaacctctggagacgatggtacatggcgcacatcattccgcgtgaaaacggtcagccgatagaacccgctctctgcctgcaccactggagctgtgagggaaagccggagcacaccgccgcaaccgaagaaaatcaggtcagcgcactgtatgactacatagaaaaaggacttaagcccgatatatggtggatagacgccggatggtacaaatgcaactacgactggccgcacatcggtacatggaagccggacgctgagagattcccgaacggatttggacctgtaggagaagcgtgcgacaagaacggcgtgaagttgctcgtatggtttgagcctgagagagttaccgcgggaacggagctttacgaagaacatcccgactggctcatctccccgaataaggacgactataataaactgctcgacctcggcgatcccgaagcaagagaatggattaccgaccgcgtagactcaataataaaagaaggtcacataagagtgtaccgtcaggacttcaactttgacccgaaaccctgctggcttgcagtcgaggaagatgacagaataggcgcgcgcgaaaacctccacgttcagggatatctcagatactgggacgagcttatattccgcaaccccggactttggatcgactcctgtgcatcaggcggcagaagaaacgacctcgacacaatgagacgcgcagttccgctccattatacagatgtaggatacggcaagcacgaagtcaagcagaagcagttccgcgagatgcacgaatggataccgtatttccgctcccacaatatgtcttgggacagggaagaagtcgagagaaaaggcggaacatgggttgaaaacgacgaattctcgttccagaacgcaatggttcccgctgtgacctatatgacatggttcaacgcctccgacgacgaattcaaacgttccatagccgccgagaagatttggagacgcgccgcacgcctgacacttgacggagactactacccgctcacggaatgccgcaggaacacaggcgactggtacgtttgtcagttcgacgactccgacaacaagcgcggatttgtccagttcatcagaaatatctccgcagaggacgaagaattcaccgcaaagctccacgtggaagacggcaagacttatgtttttgaaaactccacgacaggagaaacatttgaaaagacctccgaagaactccgcggtggacttacagtaaagctcgcgcaaagagaaggcgtggttctgttctacgaaacaaagtaa

SEQ ID NO: 780 - DNA, 2115 bp, Unknown
  Unknown gut bacteria
ttcgacggcggatatctgctgaactactactacggcgcaaagattccggacgcaaatctcacggatttctacttccgcgaatggtttgcttccttctccgctcacagcccgtccgtgaacaaaggagatttctccgccgacgttgctcccatcgagtattccggcttcggtacgggcgacttccgtaagactcccgtagctatccgcaatgccgacggcaacaactgcaccgacttccgctatgtctcacacaagatatattccggcaagcccgagctgaaaggacttccttcgctttacgagaacaaggcgggagaatgcgacacactcgagattaatgtgtgcgataaggtgacaggtgcagaggctgtgctcatctacaccgtgttcaacgactacggagctatgacaaagtccgtgcgcataaagaacggttccgacaagcccatggatattgagaaggcgtattcttcgagcgtaactctgccgacaatggacttcgatatgctccacctctacggcagacacaacgcggagagaaacatggcgcgcaccgcactcgagcacggtcacacatctctctcatccgtcagaggttcttcctcgcacttccacaatcccttcgcagccttcgtgagaaacggagctaacgctgctaacgaggatttcggcgacgtgtacggcttcaaccttgtctacagcggcaacttcgacatcacagcggacgttgactactacgaaaccacaagagttaacgttggcattaaccccgacggcttcacatggcacctcgaagcaggcgaagaattccagacgcccgaagttgtgctcgtatattcaaacgaaggacttggcggaatgagccgcaccttccaccgtctctacatgaacaacctcgttcgcggaaagtggaagaccgaaaagcgtcctcttctcatcaacagctgggaagccgcttactttgatttcgacaccgacaagctcgtttcatttgcagaacgcgcgaaggagcttggcatagaaatgctcgttatggacgacggctggttcggtgtaagaaacgacgacagacgctcgctcggagactggtacgtaaacgaaaacaagctcaagggcggactcggcgtgcttgtggaccgtgttcatgctctcgggctgaagttcggtatctggtacgagcctgaaatgatatcccccgactccgatttgtaccgcgcgcatcccgactggtgcatccatgttcccggaagagaccgctccctcggcagaaaccagtgcgttattgatatgtcccgcgaggatgtaagagaaaacatctacggtcagatgaaggcagtcctcggcaagtatacgatagactacctcaagtgggacttcaaccgcaacataacggaagccggaagcgcactcctcacctacgaacacggagaagagcttttccaccgcttcatcctcggcacatacgacatcatgaacagacttaaccgcgacttcccggatatgctcatcgaaaactgctcgggcggcggcggaagatttgaccctgctatgctcgcgtactctccccagatttgggcttccgacaacaccgacgcaatccagagaatcgcaatccaattcggcacatccctctgctatcccgcatccacaatgggcgcgcacgtctccatgaacggtcgtacaaatatcacgacaagaggaaacgtggcaatgtggggtacattcggctacgaacttgacccgaacaagctcaccgaaaaggaccgcgagatagttcacaagcaggttgcggagtaccacaagtattacgacctcacgcattacggcgacctctaccgtatagtctgcccgtgggacaacagctattatgccgcatgggagcttgtttccgaggacaagacgcaggctatgttcacgctcgtcaatatgcgctactaccactgccactcacgtttcatccgcatgaagggacttgaccctgataagtattataagctcgaggaaacaggcgaggtatattccggtgcgcttctcatgaatgccggtctcaacctctcacgttatcccgcaggaacaggcgagagctacgtccttcatttcacggctgaaaagtaa

SEQ ID NO: 781 - DNA, 2283 bp, Unknown
  Unknown gut bacteria
atgagacagaagataagccttgacgaaaactggctgttccacaggggcgatattataagaaaacgccctacatcaaagggacctatctacacgggcgcaaagactgtacgcgagagatggggcgcggcttcttacgattacaacgacgatccggacgactacagacagggcgttgagtacaattccgaccgttgggaaagagtcagccttccgcatgatttcgtcatcgagggagaatttgacgagcaggagaacaacactctcggctttctcaagtacgacaacgcgtggtaccgccgccatttccgcctgaacgaggacgacaaaggcaaaagaatcacgctgtacttcgagggagtgagcggtcagtcggcgatttacgtaaacggatgcccactctaccacaatttcagcggctacacgtcatttgaagtcgatatcacggattttgtgctgttcgacaaggataacatcatcgcggtgtacatcgactccactcatcacgaaagctggtggtacgaaggcggcggtatctacaggcacgtttggcttgtgaagtccgctcccgtatgcgtcgatttgtggggagtttacatccgtccgaaaaaggtcagcgaaaccgactggcgcaccgacatttccgtcacggtgaagaacacgacctctgcagaagtgaacgcagtagtcaagaccgagctttacgacgaaaacggcacgaaggcaggcgaatgctccacggaatgcacgcttgaagcccgccgcgacactacggttgactatagaacaagggtaaaaaatcccattctctggcaggtgggagacggccacctctaccccgcagtgactgccgtaatcataggcggagaagaagttgaccgcgtgagcgacagatacggctacagagaagtgatatgcgacccgaaccacggacttttcgtaaacggtcgtcacgagaagatatgcggcgtatgcggacactacgactgcggacttgtaggaaaagccgttcccgacagcatattccgctacaaggtaaagctgctcaccgagatgggtgcaaacggctacagaacgagccactatccgcagtccgaagctcttatggacgcactcgacgacgcaggattcatcgtacttgacgagattcgctggttcacctcatcaaaggaaggcatggaacagcttgaaatgctgataaagcgcgacagaaacagaccgtccgtgttcttctggtgcataggaaacgaggaaatgctcttcgccgaggaaagaggaagacgaatactcgagtccctccttgcgagaacaagacagcttgacgcgacacgtcccgtaacggcagcctgcgaccgtcccgacaactccacggtttacgacaatctcgatgtagtcggaataaactacggtcttgactcatacgacgcggtacacaagaaattccccgaccgtgccgttgtctccaccgaatgctgcgcgacctcgaccacacgcggatggtactacgacgattttccggctatggggctcacgaactgctacgaccgcgactggagcgactggttcagaggacgcgagcgcacatggaaattcatcgacgaacgcgaatgggtaatgggctcgtatcagtggatcggctttgaccacagaggagagactgtatggccgcgcctttcctcctgctcgggtgctattgatatgtttcttctcaaaaaggacgcgttctggcacaacaaagctctctggacgcgcgaaccgatgatacacctcctgccgcactggaatcatcccggacacgagggagaaattataaaggtctgggcatacacaaactgcgacagcgcggagcttttcgttgacggtgtaagccgcggaaaggtggagcttcagccgcacgaccacgccgcatgggaagtcgaataccaccccggcaaaatcgaagtcgtaggctataaggacggacgtgaatgctgccgcgacgcacacgagacgacaaccgctcccgtaaagctgatgctgagatgtgaaactcccgacgtaaaagccggagacacagcgatattcacctgttacactctcgacagcgaaggaagagaagttccgacagccgaccccaccgtacgctttgtagtgaacaagctcggcattatctcgggaacaggctccgcagtgtacgaccatgaaccggttaaatcaaacattcgccgtatgtacgcgggacagatatccgcagcggtaaaatgcaccggaaaaggcactctcgcactgtacgcctatgccgacgga

SEQ ID NO: 782 - DNA, 1479 bp, Unknown
  Unknown gut bacteria
atgaaacgttattttgcgctgatacttgccgcgctgcttctcatgccgacaattgtttcctgctcacagaacggctctgaagaaacaaagggagcggataccactgccgacaccgccacgactgccgactccgaggttgaaaccgaagacgagactgacgacggaaacattcgctcatgggaaggacttacctttgacggagcggagattaacattgtcggacgcactgaggcaacatacgccatcgacttctacgccgaggaaataacaggtgaagctgtcaacgacgccgtgtacaacagaaactcaaaggttgacaacgacctcgccgtacagctgaactatatcaacggccccgacgactacaacacattcttcacaaatgtcagaaacagcgtgagtgccgccgacggtgcatacgatatcgtatcgtcctacgcatactatgccgctcccctctcacttgagaagctgttcaagaacctccacaccgtaccgaacctcgcactcacaaattcgtggtacaaccagagcttcgtaaacgacatgacggtaaacggtcagctcgatttcgttataggcgacctcaccctcaccgcgaccgacagaatgataatcacattcttcaacaaggagcaggcgcagagatggattccggacacagacctctacaatgacgtatacgaaggcaagtggaccgtcgactacctcgcaactcttgtctcgaacatatgggaagacaaaaacggcaacggcaagattgaccccgccgacgtattcggtctgtcataccagttaggctccgttccgaccgacggtatgataacggctctcggcgtacacatggtcgacaaggacgctgacggaaacctctacatcaacctttataatgaacactccaacaccgcgtttgaaaaagtcattaaccttgtatacaacacatccggcgtaggtcaaagcatgaatgacgcgttcaagaacggaaacgtactgttcgttatggaatgcgctaactacgctaaataccagctacgcgacttcgaccccgactacggcgtacttcccctcccgaaggtcgacgagacacaggaaaaatatctcacgactgctcaggatgcatacgacgtgctctccatccccacaacctgcaagaacctcgaagcaacgggtgcgtcccttgaatacctctcagccctctcgcagagcgacgtttatcccgcatactttgagacgacattccagaagcagtacatgagaagcgaagaagactccgtaatgttcgacctcatcaagagcggacttgagttcaacttcggcacattctactcaaactgcatcggcaaccccgtatggacattccgcgacagcatttccaacaaccgcagcttcacctccgaatacaagaagatggctaaggtttacgaaaagacgctgaagaaattcacggaagcaatggcggaaagagctgaagccgaataa

SEQ ID NO: 783 - DNA, 2112 bp, Unknown
  Unknown gut bacteria
atgaaaaaacgtgtcatttcgtttgtgcttatgctggcgatggtcttctgccttgtgccttgtacggtatcggcggagggggagactcacactgtcacattcgagataacaaagctcgacggaagccttatcgacttttcgttagctcagtatgaggttaaaaacacgagcggaacaaaattctacgcggagcaggatgaatacggttgggatttaaactacttcttactccccgacggagactacacctaccgcgtagaatacagccagaaggaaaaagcggagggcgaattcaccgtctccggcagcgaccttacgattagggacaatacggaaacgatatattatcccatcacgtttgacgttcagcctgcaagtgcggatatcaagctctacaaaagcggaagcagcggagcgtacggagaccccatcctgccgaacgaggacggagtttatctgattcctttcggatactacagatacataatcagcgcggaaggttatgagaccgtaaacaaatccttcaacgcaaccgacacttctctgaaaaacaacaactacgtcataaaggttaagcttaagtctctgtacgaggcgcttctcgaagatgtttatgacgcgcttgactacgaaaccggagaacctgtcattctgaacgagtttaccggaaacctttacgaatacggcgacgagttcattccgtgggacattgactcagactacgacgacaccaatgtgctcgattacgcttatgacatcatctcggacgaagaattcgagggcgtaactctcggaatcgccgatgtttacaaggacacattctactacgacgacgatgacgaaagcaccgactacagcgttatcgcagaggacggcactatcaactataaggctgttgacgagagcaatatcacagaggacgaggactacggcacgggcgcgtactacatcgtagagtttacgataacatacggcggcgcaacctacgacagaaccgtggaattcacctttgttgttcccgagcacatcaagacccgcggcgaaagactcagcgaagcggctgattttgcagtagaaggcattcccgagacaacggaagaggacattgacctgccgaagctctcggaagacgacgactggagcgaatacttcatcgacacaaagtgggaatcaagcaacgagaacgttatttcgccaagcggaaaggtaactctccccgaaaaagatactgtagttaccctcaccatgactgcgttctacatggattggtacatcgaagacgcgggatatatgcttgaccccggacctgacggagacgacgttgtgcgtgaggtgagagttctcgtaccaggcacaaactttgacgttgccgtggaaaacagctatgcaaaagacagcggagaaggctcgtacaaggcgggagacaccgtaacggtacacgcgggaacaagggatggctatacattcgcgggatggacggcagagggcatagagcttgaagaggacaaaaatcccgacgcgacatttgttatgccgaagaacgacgtgaaactcaccgcagcatgggaaaagaacgaagaacctaagcctgacccgtcacctgataagccttcacgtgacgacaactcgggaaaaatcattgccgacctcatcagatacagaaatcagcaaaagaagagaggcacagcttcaaattcggacaagactgaagctgatacaaagaacgaagtctctccgtttaaagatgtaagcaagaccgacgcattctacgacgacgttctgtactgctatgaaaacgagataatgctcggcacatcagacgacgaattcacaccctacggaaacacaacaagagcgatgatagttaccgttctgtggcgcatggagggagaacccgtagttaactcgattaacatgttcaccgacgtagagaacgacacatggtacagctacgcggtagtatgggccggggctaacggaatagtaaacggctacggcgacggcagattcggatcgaatgacactataacacgcgaacagctggcagccatcatcgcaagatacgcgcgcttcctcggctgcgaaatgcctgcggaagaaacagcggactac

SEQ ID NO: 784 - DNA, 1755 bp, Unknown
  Unknown gut bacteria
atgctgttcttcccgctgttcgtctccgtattctcgctgataattcagttcgttctccccgcaattcagaaggtcgccgtcaacgattacctgacaaacgaatccatacgtccggtaaactccttcagcgaccctcacctccacgctttcatcgcaatattcatagcaatcatctcaattgaccttgtacagcgtattctcggcgtgatacagagcagaatgtccgccatctccggcaacaagttcactctgatgatgcgcaccctcctttacgagaagatatccaccctttccgtctcgtccattcagcgtaagtcaacgggcgacctcatgggaagaatcaccagcgacgtcaacgttgtacaggacttcatgacgaaccagctcccaagcctctttacacagggcgcgtcgttcatcctcgctcttgtgttcctgctcattctcaatccgcttatgagcttgttcgtatttgttccgattccgcttgtaatatatctcgtggcgaacttctggaacaccatgcagaacctcaaccgcaaaaactggattctcggacaccatgtaaacctcttcttacaggacgttttaaacggtatccgagtagttaaggctttcggtaacgaggacagagaaatcgagacgttccacaaacgcacaaaccgctctgcaaaacagtcggagtgcaacgcgcttctctttgatacggtcttcccgcttctcggatttgcggtgcgtttcggttcataccttattctgttctacggtaactatctcctcttcaagggagttatgaactacggtgatctccaccagttcaattcgtattccaacattatctacggtcctctgctttggataacgttcatcccgcgtaacatctcgtccttcctcacctctctcggtaagattcttgagatcctcgaggaacagccggaagtatcggatataggtcttcctattgatatttccatcgaaggcgacgttcagttcaagaatgtaacattcggctacgatacatacaacccggttctcgagaacatcaaccttgacatcaagaagggcgaaatgataggtatcgtcggtcactccggctccggtaagacgacgcttataaacctgctcatgcgtttgtatgacgtaactgacggcgctatcgaaatagacggagtaaacatcaaggacatctcacagaacgcgctccgctcacagataggcgtagttcttcaggagacgcacctcttctccggctctatcagagacaacatcaagtacgctaagcctcacgcatccgacgaggaagttatagccgcagcaaagctcgcaaacgctcacgacttcatagtgaacctccccgagggctacaacactatggtcggcgaaaagggttattccctctccggcggtgaaagacagcgtgttgcaatagcgcgtgctcttatccacaacccgaagatactcatccttgacgaagctacagccgctcttgacaccgaaaccgaaaagctcattcaggacgctataaacaagcttaccaaggacagaacatcgtttgcgattgctcaccgtctttccacactccgcaatgccgaccgtcttatagttcttgacaagggtcatctcgttgagttcggtactcatcaggagcttctcgaactcaagggcttctactggagacttgtcatggcacagcgtcaggactccggtatgcttgaaaaggctgacaaagcggttgccgcgaaagctgcgaaataa

SEQ ID NO: 785 - DNA, 2028 bp, Unknown
  Unknown gut bacteria
atgacactgaatgaagccgatctcgccgaatactggctgagagaagcggaaggcgtcgaaaaggtcagcgtatttgaccgcaccggcgacgctgtaattttatataaaggaaaaagagagagaattttaaatgctctctcagctttctcctttgcacgcgcgagggagaaaaaactcgttcccgaccatactccgagagcgctcaaccgtgaattcgaggacaagctcgtgttttccgttgtgagaagagcaatatcaaagctgttcttccccttctccatcagagctgtcatagctgtagtcaagtccgtcaaatacatcaaagccggaattaaatccctgctcaaaggaaagctgtcagtagccgttcttgacgcaactgcggttacggtttccatagttcgcggagacttcaatacggcgggcagcgttatgttcatgctcggaatcggcgagatgcttgaagactggacgcacaaaaagtccgtttgtgaccttgccggcgctatgtctctcaacattgacaaggtatggctcaaaaccgacgactgcgaacagcttgttccgataaacgaagtacaggtcggcgacaggatagtggttcgcaccggcggaatgataccactcgacggcattgtaaccgagggagacatgacagtgaaccagtcctccatgacaggcgaatccattcccgtggcaaaatccgcaggaagctatgtttacgccggaactgtggttgaagagggcgagtgcgtcattaccgtagacaaaacaagcggcggcggacgttacgacagagttatcaagatgatcgaggactccgaaaagctcaagtccacgacggaagacaaggcgtacagactggcagacaggctcgtgccgtacactcttgcgggaactgtgctcgtgtatctcctgacgcgcaacgttacgaagatgctcgccgtgcttatggtggacttctcatgcgcgcttaagctgtcaatgccgattgcggttctctctgccatgcgagaatgcagctcacatcacatctcggtcaagggcggaaaattccttgaagccgcggcgggcgctgacactatcgtattcgataagacaggtacgctgacttacgctaatcctacagttgtagatataatcgcattcggtgggcacagtgaaagcgatatgctccgtcttgccgcctgccttgaggaacactacccgcactccatggcaaacgctgtcgtggaagaggcgaagagacgcggactttcccatgaggagtaccattcctgcgtcgagtatgtcgttgctcacggaatctcaagcatggtcaacgataagaaggtcgttatcggaagcgcgcacttcgtctttgaggatgaaaaatgcgtcattcccgagggcgaggaggataaataccattccattcccgcgcagtattcccacctctatctgtgcatagcgggagttctgtctgcggtaatatgcatattcgacccgcttagacgtgaagcccgtgacgcgctgaaagcactgcacgaatgcggaattaagaatatcgtcatgatgacgggcgacaaccacaagactgctcagtccgttgcggcggaggtcggagttgacgagttccacgccgaggttctgccggaggataaagccggatacatcagagaagctaaaaagaacggtcacactgtcatgatgataggcgacggggtgaacgattcgcccgcactgtccgaggctgacgtaggtatcgcgataaactccggcgcggcgattgcaaaggaaatagcggacgttaccatctcttccgaaagcctatataatatagttatgctaagacggctcagctccgcgcttatggacagaattcgcggcaactaccgtttcattgtgggattcaacctgcttctcataatcctcggagtaggcggagtgataatgcccacaacctccgcgctcctgcataatatgtcaacgctcgctatcggaatgaagagcatgacaaaccttttgccggacgaaaccgaagaatga

SEQ ID NO: 786 - DNA, 1572 bp, Unknown
  Unknown gut bacteria
atgataaagaaacaaaaaaagctgataatcacatttgcggcgctgtttgtggtgctgctcgtggtgtatttcgccgttatccgcccgctgacagccacaaccgacaactcttcatccggagtggagcttcttgacggcgaagtcgcgattacggcaaaaacgtcaaacttctacattttccagccgctcagccgttccgagattcagtcgatcgaagtaaagaacgagttcggcggatataaggtctaccgcgacgcatcggataaattccagcttgacggatacatgggactgaagttcgacgatgagctgttctcaagccttgtcgtaaccaccggtactcccacagcgatgatgagagttgcaaacgaccttgacgacgcgggacttgtgcagtacggtcttgacaacccgcaggctgaatggatagtcacctccacgtcgggcgaagaatttgttatcgaagtgggggacgagcttgtcaccgaaggcggttattacgtaaagtacgcgccgagaaacgctgtctatatcctctcgacaactcttgcggacacggttctacagccggcgtacaagctgctctctccgctcctcaccgcgggaatgtcgacgaacaactacttctatgtcgatgaattcacgatatggaagaacgaagagctgtttgtgaatatctaccgcacgcccgaggatcagatgacaagcactgatgctatcgttgaaaactacatgacatacccgaagccggagtccgaaaacgcgtccgataaggctctgtacgagatgaactccgatttgtactatcaggctctgtacaacttcattgctctcgagggcgacgaggtcatggcgttcagaccggaggatgaagtttttgcacagtacggtcttgaaaatccgaaatacatgataagatacgtcttcgaggattacgaatttgtggttctggtttccgagaggcaggagggcggcggatattacgcttgctccaacctctacggctacaacctcatctgccatgtcgaggacgaaaagctgaactggctcgagaaggactcgttcggatggatttctcccacaccgttctttgtcaatattacaacggtaaagcgcatcactgtcgaagccgaaaatgttgacgttgactttacgctcactcacggaacagacgctgacggaaacgctacactggatgtagtcgaaaacaattccggcactgtcataaagaacgcggacgtaaacaacttccgtcagtactacaagacgatgctgaacctgacgaaccaggaatacgcagcgctttccgatgaagacagacttgctcttatgaacgacgactcgaagatagtaatgacgctaacctgcgagggtgtagacggcagcttcagcgagtacaagttctacaagtacgttgaagaatccaccggcaagataagcggaggcaagattttcgtttccgtaaacggcgcgggcgaattctacacaacgaacgaccttgtcgacaaagttatcaacgacacctcaagagttctcaagggacttgacgtggatgcgtacggtcagagataa

SEQ ID NO: 787 - DNA, 1911 bp, Unknown
  Unknown gut bacteria
atgatggaattatatgaaaaatatgtcggacttgtcttcgataaccgttatcggatagagcgcgtcatcggaatcggcggtatggcaatagtttttaaagctaccgaccttcttatgcggagagttgtcgcggtaaagatactcaaggatgagatttccgaggatgagcagagcgttaaaaggtttgaaaacgagtcgcgcgctgtttccatgctttcgcaccagaatatagtgaacgtctatgacgtctcgacaagggaaaacatcaagtatatcgtcatggagtttgtcgagggcatcacgctcaaaaactacatggagcacagagaggttttaaaccttcgcgagataatcagctacacgacacagatactccgcgcactcgaccatgctcacaaaaagggaataatccaccgtgacataaagccgcagaacatcatgcttctgaaaaacggcgtaataaaggtcatggatttcggcatagcaaagctcccgaacgcggagacgattacaatgaccgacaaggctatcggaacggtgtactatatcagtcccgagcaggtcacgggcggtgagatagacgcgagaagcgacctttactccctcggcgtaatgatgtatgagatggcgacgggctcgcttcctttcacagcggaaacaccggtgtcggttgctctcatgcaggtgaacgatacgcccactccgccgagagagattaacccgcacattcccctcggacttgaacagattattctgcgcgctatggaaaaatcccccgacgagagataccagagcgcggaagaaatgctcggtcagctcttaaagctgagagaaaacccgaaaatcatatttaaagaaaacaaaaactcaaagaacgcaaaggcaaagcaggcgaaaagcgacggcgcacctaagcctaaaacaagccgttcaatgttcccgataatcatgggagtaacgctggcgttcatagtcaccgcgggaatatccggctattaccttgtcgataagctgttcataaacggcactgccaacagctatatcgagatcccggttgagacattcgcagacggttactactccaccgagcttgaggattggttcgcaaagagtgagagatacaccctcgccgatgtgatatacgaatacagcccgacagtcgaaaaaggcaagataatatcgcaggagccgagtgcaaacgaagtgaaaaagattctccccggcaagcagaagtgcgagataacgctcacggtcagtctcggagaaaaaacgataaagcttgaagactacaccgcgatagactaccgtacagtggaagccgctctccgtaaggaaggactgaaggtgtcgcttgaatatactccgagcgatgtgtatgaggtaggtcatgtggtaaagaccgaaccgcctgccggaaccgtagtagccgaaggagagagcgtaactatttatataagccaaggagttgacgttgtgaagacgatggtcccgaatttcgtaggactcagcgaagcgcagactctcatacgtcttatggaatacgaccttaccgtcggcgatgtaacatatgtaaaatccgatatgacagccggatctgtggttgagcagagcgttacggcatggcttgaagttccgcagtattcatccgttgacttcaaggtgagcggcggcgcgtcatattccggaaacggtaaaactctgccgagcgtatccgacatgaactccgctcccgagacaactcccgcagaaaccaagccgactcatgatgaaaccgataacagctccggagacgacaattactatgaggaaaccgaaacagctccttcagacaacgaggacgactggtttcagaacgacaactcgggacttgtttcaagcggcggcggaaatcttttcaaaggctctgaatga

SEQ ID NO: 788 - DNA, 825 bp, Unknown
  Unknown gut bacteria
gcgctgaccttctactacctcaaccttgtcacaacggcaagactttcgcgcaatcctaccgtaaaggcggagatacagatgcgcggctttgcggacgaaggacttcctgccggcttctttacctatcccgtatcacaggcggctgacatcacggctttcaacgcgaatgtagttcccgtaggcgaggaccagcttccgatgcttgagcaggcaagggagattgtcgagaagttcaacagaatctacggcgaaacgctggtaatgcccaaggctatgatacccgagaacgagactcagcgcagacttcccggagttgacggcaaggcgaaaatgagcaagtccctcggcaactgcatttacctctccgactccgcttccaccgtgaagaagcagataaacggcaagatgtacaccgacccgcagcacctccagataagcgaccccggtcatctcgagggcaatgttgtgttcacgtaccttgacgcgttctgcacggacgaacactttgcggagtatcttccggaatacgccaaccttgacgaaatgaaggcgcactatcagagaggcggactcggcgacggaacctgcaagaaattcctcctgaacgtgcttgaagaaactctcagcccgataagagcggagcgcgctaagtgggagaaggacatcggcacggtgtatgacatcatcctcgacggcacgggaaaagcagttgaaagaaccaacgaaactctcgcccgcgtaagaaaagcaatgaagatagactacttcaccgaccgctccattataaaagaatgggaaaagctcctgaagcaggctaagcagtaa

SEQ ID NO: 789 - DNA, 2199 bp, Unknown
  Unknown gut bacteria
cagcaaaagcacaagcattcccgtgactatgacgatttcggcaaaataccggacgccgaatatgtcaagtatgtcgactcgttctcaatggattacaactccgatttgacggtcgacacgtgtatgtcctcgaacagacttcttgtattcgagcacaaaactctccgcccggaaataccggaggatctcgaaaaagaagagcgcgaccgcatctccgaagaatggaaccgtgacgcggtaacaagaatcaaggcatactgcaccaacgcaaaacgtcaaaagctgttcgcgttctgtgaaataatcgacagattcctgcgcggtcaggacatcaccgacgacgaccagatattcgagcagttcaacgccaagtgtccgaagtgcggtcaggtatacgaaaaccagtaccgcagagtctgcacgcactgccagaagaagggcgcggttatagagagacttctcgcgttcctcattccctataaggctcaggcggcggctgttatcctctgtatgctcgcaagctccggcatttcgcttatctcacctatcataaacggtcgtatactgtacgataacgttatcagcacttccggtaagtggcatacggttgaaaagctgttcatcgtcctctcggtaattgtagctctcgcgctcgtttctctgggtatcaacatcatccagaaccgcgcgaacgcaaagctgtcgacgagaatgaccaacaaaatgaagcagaacgtgttcgacgctctcatgggtctgtcgctctcctacttcaacaaccagtccacaggcagacttatcaaccgcgtaaactatgacgccgacagaatccgcagcttctacatagacggcgtgccgaacttcgtcataaacgcgctgaactttatcggtctgacgttcttcctcttctcgctgaactggaagctcacgctcatggtattcgtgcccgtgccgattatagttatcatattccgcgtaatgctcccgaagctgtggagaatgtactccaagcagtggagagcttcctcctcgatgaactcaatgctcggcgtcccgctcaacggtatccgagtagtaaaagcgttcgccaaggaagctgaggaaactcaccgcttctacaaatactccgacagactctttaacgcaaacctcaaggttaacatcacctcgctgacaatatttcccgtagtcagccttcttatcggtatgtcctcacagatgatctggggcttcggcggtttttccgtcatgggtgagcagatgacatacggtgaattcaccacatacctcggatatatcggaatgatattcggtcctctccagttcttctcgacattcacaaacctcatcaccgacaccatcaacgccgcgcagagaatgtttgagatactcgacatggttcccgacgtaatgaacgcacccgacgctgtcgaaaagccggagttcaagggagacatcgagttcaaggacgtttccttccactacaacccgaacagacccattctgaaggatgtcaacatcaagattcatcccggagacaacatcggtcttgtaggtcatacgggaagcggcaagagcaccatagtaaaccttatcacgcgtatgtacgaccccatctcgggtcagatcctgatagacggcatggatttaaagaagattaaaatctcgtccatcagacataatatcgcaatcgtatcgcaggagatattcctcttccgcggaactattgccgacaacatccgttatgcccgtcccgacgctacaatggaagaggtaatagcagcggcaaaggcagccaacgctcacgacttcatagtgcgtctccccgaaggctacgagacggaagtaggttcgggaagccgttccctctcgggcggtgaaagacagcgtgtttccatagcgagagcgctcctcatgtctccgtccatcctcattctcgacgaggctaccgcggctatggacaccgaaaccgaaagacttatcggcgacgctctctccaagcttgttgaaggacgcacctgcataacgatagcgcacagactttccacactcaaggactgcaactacctgtttgtaatcgaaaacggtgaaatcgcggaagaaggacctccggcagatcttcttgccaagggcggagtttactacagactgtacaagctccaggcagaagctatgaagaaagtcctcgcaggtatgtaa

SEQ ID NO: 790 - DNA, 1617 bp, Unknown
  Unknown gut bacteria
atgaaactgcgataccccgactttgccgttgtttacacagaaagcggcagtcacagatttgaaaaaggcaatatgtcagcggacgacgtagctctttctctcgctgccgagaacgacgttatggcgctgaaagttaaggctgactctaccccgctgaaatacgtcaagctgcgttttaacttcaccgaggacgaaatacgacatgacagcattaagatactcggagacgcgtttgagagaggctacggcaatctcgcgtggatgggaataacaccggacagaatcatgccgtggtacatactcgtatcaaacggaagcgaccttgagaaggaagtcggcggcagatttaccgaaggctttggcgtaaaggttcagccgtcctcgtttgtcacatggcagtatgacgcgggcggaattacaatgtgggcggacatcagaaacggcggagaaggcgtaattctttccggtcgtgagctgacggtctgcgaaatcgtattcggcgagtacagagacatgactgcattcgacgcgggcgtgctgttctgcaagaagatgtgcccgactacatcccacctgccgaagcatcccgtttacggctcgaacaactggtactacgcttacggaagatcctcacaggaagagataatctccgacacaaagctcgttgccgaaagatgcgcgggacttgacaacataccctacatggttatcgacgacggatggcagaaatacggctgcgacggtccttgggatgagctgagagacacgttccacgacatgaaggctctggcggatgagatgagaaagctcggagttcgtcccggaatctgggtgagatatctggtggactcacatcacgaagtaaagtccgttcccgaagaatgccgtatgctccgagacgcgaactacttcgacccctcatgcgacgaggtcatcgaatacgtcagacgtgtgacaagaatgctccgcgaatggggttacgagcttatcaagcacgacttctcctcctgcgacatctgcggtcagttcggctttgccatgagacagcagattatgcgcgacggctggcacttccgcgacagaagcagaaccacggctgagatcactctgaacttcctccgcgccgttcaggaagaagcaggtgagtactgcgttatcataggctgcaacacgttctcgcaccttgtggcgggtctgtacggtctcaacagaacgggagacgacacaagcggctacgactggggcagaacccgcaagatgggcgtaaacactctcgcattcagaatgattcagaacggctcgttctacatgactgacgcggactgtgtgggaatcaccggctctatagactggtccctcaacaagcagtggctcgacgttctctcaaagagcggttcccctctgttcatctcctgcaagccgggcgttctctccgaatccgagcttaacgacctgcgcgaaggatgggcagtaaactcagttcagacgaaccgctgccgcccgctcgactggatggaaaacgaatatcctacagtgtgggaaatcgacggcaaggttgtccgctacgactggtacctcggagacggcacaaacgacttcgacccgaaccgcaaatga

SEQ ID NO: 791 - DNA, 1971 bp, Unknown
  Unknown gut bacteria
atgaaaggtatgacagatatgcttgaaacacttgtaaaattttcaaataagtacggcagagagcacgaatacgttcttgccggcggcggaaatacctcatgcaaaaccgaagacacactttacataaaaggaagcggaacatctctcgcgaaaatcacggctgacggatttgtcaagatggatcgcgtcgcactcgagaagatatggacaaaggcttattccgataatcaggctgaaagagaagcggaagtgctgtccgatatgatggcggcaaagctccccggagaagaagcaaaacgcccgtccgttgaaacactgctccatgacctgttcccgcagaagtacgtgctccacgttcatccctgcgcagtcaacgccctcacctgctcacagaacggcaaggctgacatggaaaagctgttcccgaacgcagtgtgggtaaacgagtgcgagcccggctacatccttgcgaaaaactgccgcgaaaagctccttgaatataagaagaacacgggacgcgacgccgacgtagtattcctccagaaccacggaactttctttgcagctgacacggaagaagagcttgacaaaatagtagccgacgttatgacaaaaatcaaggcaaaaaccggcgaatatcccgactttactcccgtagacgagccggagagaaacaccgcagccgcagcagtcgctccaatgataagaatggcgtatgacggagagggaaaggcattcgtgaagtttgccgcagacaagaccgtgctttcgttcgccgaatcaaaggaagcattcgagacactgcgcgagccgctttcccccgaccacatcgtatactgcaaggctgaacctctattcatcgaagaagcgacggctgacagcataaaatccgctttcgcagagcttgagtcccgcagaggcttcaagccgaaggtagttttcgtgaagaatataggtatgttcacagtcggaaagacgctcaaggaagccgagacagcacttgacgtatggcgcgacgctatgactataaccgttctgtcaaaggcgttcggcggagtgcgtcatatggctcccgctatggtggacttcatcgtgaactgggaggttgaaagctacagagcaaaggtcagcctcgcgtcaggtgcggaaaagaagctgaacggcaagatagcgatagtcacgggaagcgcacagggattcggtgcaggcatagcggaatatctcgcgtccgagggtgctgctgtcgttattgctgacatgaactacgacggtgcgcgcgctacagccgaaagaattgcagaagaatacaaaactcccgctctcgcagtgtccgcaaatgtttccgacgaggacagcgtgagagagatgatagagagaaccgttctcaccttcggcggacttgacgttttcgtaaacaacgcaggtatcgtccgcgcaggctctcttgaagacatgacaaagaagaactttgagattgtcgcatccgtaaactacactgcgtacttcctctgcgcaaaatattcatccgccgttatgaagaagcagagagagatttctcccgaatatatggctgatataatcgagataaactcaaagtccggtctgtcaggctccaacaagaactttgcatatgccggaagcaaattcggaggaatcggacttacccagtcgtttgccctcgagcttgcgccctacggaatcaaggtaaacgctgtctgccccggcaacttcctcgacggtccgctgtggtctgatcccgaaaaaggactgttcgtgcagtatctcaaagccggaaaggttcccggagctaagacagtcgccgacgttcgcgcgttctatgaagctaaagttccgctcggaagaggatgcagaatagaggacgtagcgaaggctgtgctgtacataatcgaccagaaatacgagacgggtcaggctgttcctgtaaccggcggtcaggaaatgctgaaataa

SEQ ID NO: 792 - DNA, 1803 bp, Unknown
  Unknown gut bacteria
tttgtccgcgaaatcgtatctaacgcctgcgacgccattacaaagctgagaagactgaattctctcggccaggctgacgtggatatggacggcgcgaaaatcaaggtaatactcgacaaggacgcgtctaccatcaccgtaaccgacacaggcataggcatgacggaagaagagctgaaaaagtacatctgtcagatagctctttccggtgcgcttgattttatccagaaatacgagggtgaaaacggctcggacaacggcataatcggtcatttcggtctcggattctactcttcattcatggtcagcgattccgttgatgttatcacacgttcctacaccggcggtgacttcatcaaatggacctgcaccgacgacggaaactacgagataacgaccgactttgacaaggatgaagcacaagagcttataggcaagttcggcaccgctgtagttatgcacataaacgatgagggcaaggagtttctttcggaatacaagctccgcgaagtcctcgacaaatactgcgctttcatgcccgaagagatttactttgatgacggccagcatgaagaagaacatcacgatcatgaggacggctgtgaatgcgaagagtgcaaggatgaaaagaaggaagtcaaaccgataaacgatacacatccgctttggctgaaaaatccctccgactgcacggaagaagaatacaaggaattctaccgcaaggtatttaacgattggaaagaaccgcttttccatattcacatcaaagctgactatccgctcaatttcaagggaatactctacttcccgcgtatcggcagtgaatttgaaagccttgaaggtcaggtaaagctctactacaatcaggttttcgttgcggacaatatcaaggaagttatcccggaatatcttctcatgctcaaaggtgtgcttgactgtcccgagcttccgcttaacgtatcaagaagctatctgcaaaacagcggctatgtcgcaaagatatccgctcacatcacaaagaaggttgcggacaagctaaactccatgttccaaaatgaccgcaagagctacgaaggaatatggcgcgacctcaaaacatttgtggaatacggctgcatgagagatcgcaagttctacgacaaggtttcaccgagcattctctttgaaacaactgacggagaattcaaaacagtcgacgaatatcttgaagccgcaaaggaaaagcacgaaaacaagatatactacgcgtccgacgttaccgctcagtcaaagtatgtaaagatgttcaaggacgaaggaatagaagtcgttctccttgacagagttattgacacgcagtttatcaacacaatcgaatccaaccgcgaaggtgtaaagttcatcagaatcgactccgagatagctgacgtcctcaaggctgacggcgacaagaccgaaataccggctgttacggagctgttcaagaaggttgcgggagagcacactaccgtaacattcgagagactcaaggacgaaaaaactcccgctattctgaacctttccgaagaagcgcgcagaatgaacgacatgatgaagctctataagatgggttcggatatgccggtagaacagactcttatcgtcaacacctcctctccgctcattgaaaagctcaccaagctgacggaagaaagcaaaaacgacgaggctgagctgatagcgcgtcagatatatatgcttgcttccctttcacagagacagcttacatctgacgaacttctcgcgttcctcggcgaaagctacgatattctcggcaagctctga

SEQ ID NO: 793 - DNA, 2292 bp, Unknown
  Unknown gut bacteria
atgttcgcgttctttttgctgatagccgcgtgggtcgtgggaaggctcgccagctaccagataaaaaatcacgattactaccagtcaaaggttttaaatcagcttacgatacaaaccgaggtaacgccggaaagaggtacgataaccgaccgaaacggaaacatcctcgcgacaaacatcacggtctacaacgttatcctctccccgtatgatattataacacatatgcagaaggacagcgagaaaaactccgacaacgaccccgaaaatgacgttcactacgagtatacggacagcgactacggaattaattactccggcagacagcttgacgacatgatagcggaggtgctctcgaagtaccttgacgtcgacaaaagctccatcctcgagaaaaccgctaaggtcaacagatactacgaggtcgtgaagaaaaacgtagacgcggacatagcggaaaaaatcgagattttcatcgcccggttcgacttaaagaaagacatttacttcgtcgcttcatcaaagagatattatccgaagggcgaccttgcctgccacgtcataggctttacaaactcagacggcgtgggaatctacggacttgaagcgtactacaataacctgctcgagggaacatcaggcagatacatcctcgctcaggacggaaagaaaaacgatatgccgttcgagtatgagcggttcatagaggcggaaaacggttataatataacgacgacgcttgatatgtacatccagtatgagcttgaaaatcagctggaaaaaaccttcaacgagtccggcgcgggagacagagtctgcggtatggtgtatgacgtcgataccggcgaagtcctcgcgatggctacatatccttcgttcgacttaaacgacccgtacaccatcgatgagtattcacaggcggagcttgacgcgtcaggtcttaaagaaggcacggacgaatacaaaaccgagtacaacagattgatgtaccgcatgtggaacaacaaatgtcttaccgagacatacgaacccggctcgacgttcaaggttgtcacaagctccatggctctcgaggaaggagttgtaacgccagaaacaccgttctactgcgcaggttctctcatggtagagggatggtcaaagccgatttcgtgcgctaaccacaacggacacggagctgttacattccgcacaggtttacagcagtcgtgcaaccctactctcatgcaggtggcggcgcttatcggacgtgagagattttactactacttcaaggcgttcggctacggcggaaaaacaggcatagatctccccggagaagtaggctcaatttacgcgtcatacgaaaacttctcgggagtttcgcttgccgtttattccttcggtcagacgttcaaaaccactcccgttcagcagctcagagctataacagtcgtcgcaaacggaggatatctcgtaacgccgcatctgctccgtgagataaccgacgacgacggcaacgttatccagacatacgaatccgaacccgtcagacaggtagtcagcgaaaacacctgcaaaacgctcaccgatatccttgaagaaggcgtggcaacgaacggagcggcgaaaaacgcgtatgtcaaaggctacagagttgcggcaaagacaggtacatccgagaaaaaggacgaattcgacgaaaacggcaacacaccgtacagagtcggctcgacagctgcctttgctcccgcagacgatccgcagatatccgcgctgataatggtcgataagccgctgaaaagcgcggtctacggcggtacagtcgcggccccttatatatcgaatcttctctcctacgttcttccgtatatcggagttgaacctcagtacacaacggaagagcttgccaaactcgacgtaactctttcaagttatgtcggcgcaactgtggagaacgcgataaacgacctctcatggcgcggcttcagctatgagataatcggagacggtagcacagttaccgcacagatacccgaagccggctcaaaaatctccagcgatacgggacttctcatactctatacaggcgaagaaactcccgcgaacactgtggaagtaccagatctcatgggaatgagcgcatataacgctaacaacgctgccgtttcacttgacttgaacgtaacattctacggctcgacaaacggctcgacagcgactgttataaatcagtatcccgcggcaggaacaaaagtcccgagaggcacgataatcgaaatagagcttcgccacctcgacggaacggactga

SEQ ID NO: 794 - DNA, 1704 bp, Unknown
  Unknown gut bacteria
atggtcgactatttccagcttatcgtacctgagctttacaaaaccgtagtcaacgggttaaacgacggtgcggtaactctcgctgacggaacggttcgcgctttcgacatggcgttcctgcttgacgaagtttgcagacctatgattttcgtcataataatcatggttttcggtcgttttctctggagaatctgcttcttcggaacggcgctcaaggttgaaaccgatctgagaagccgtatgttcgaccgctgcaaggatctctcggtttcgttctatcaagtgaacaaagtcggagatctcatggcgaagttcataaacgacctccagactgtgcaggactgcttcggctcaggcattctcatgttcttcgatgcgcttcttctcggagtgctttcagtgtggaaaatgtggaacatgaaccatatgctgacctttttgtccctcattccgatgatacttctcttcgctgtcggaactgttgtcggtaagaatatgcgccgcaagtgggaaacaagacaggaagccttctcggctctgtccgacttttcacaggagagcttttcgggcatttccgtcataaaggcgtttgtccgtgaagccgcagaactgtccgccttccgcaagctcaacaccgaaaacgaggatgcaaacgttgaatacacaaaggcgtcgaccttcctcaatattttcgttacgctgttcgttgagtcggttatctgcgtaatcctcggctacggcggctctcttgtgcatgataaaatcttcaacgcgggcgagcttattgagttcatcggatacttcacggcagtcgtatggcccatcatggcgatatcacagcttatcgaaatggcgtcaagaggaaaggcgtccctcggaagaatcagcgcactgctcgacgaagttcccgaagtaacggacaaggacggtgcaaaggatatcgacaacattcgcggggatatcgagtaccgccatctcacattccgctatcccggagctgattttgacgcgcttgacgacgtatgtctgaacataaaggcgggagaaaacataggcatcatcggcgcgacaggctcgggcaaaaccacgctcgttgacctgctgctgagaacctacaatgttcccgacggaacgctgttcattgacggaaacgacgtaaacggactgaaaatcaaggatgtgcgcaccgctatagcttatgttccgcaggataacttcctcttctccgacacgattgagaacaacatcaccttcgccgacaacagagcaaatcacagtgcggtagaggaagcggcgataatctccgacgtacatgacaacataacagagttctccgaaggctacgaaactgttctcggagagcgcggagttacggtttccggcggtcagaagcaacgtatttccatcgcgagagcaataataaagaacgctcccatacttatccttgacgactccgtatctgccgtcgacacgaacacggagaaaaagattctcgacaacctcagacgcactcgcaagggaaagaccacccttctcatcgcgcacagagttacggctgtcgagcaaatggacaaggttgtcttcataaacgacggaaaaatcgctgctgtcggaacacatgacgagctttacaacacaaacaaggcttaccacacaatggtagagcttcagcgtcttgacgaagaaaaggaggacaagcagtaa

SEQ ID NO: 795 - DNA, 1542 bp, Unknown
  Unknown gut bacteria
atgaagaaaaaaacggcactgcttatcgctctcctcttgactttacaaacgttcgcttcatgcgcggacaatcaacaggacgagacgacaggcgaaacaactgctacggcggcttccgaaaccatagcggaagaaacggaaagtgaaaacccgtattacgacggttatgtcgacccgtttgttgacactgacctcggcggagaaaccctcaccatatacaactccgtaaacgaacgcggtactctcacgtcttcaaactacctcatagaaggtccggaagagataacaggagacgccgcacctgactccgcatatcagcgcaacctcgacgttatggaaaagctcaacgttaaccttgcgtatgaaaactgcaactatgcctacgatcaggtggcgttaaatatacgaaagctcctgcaatccggcgactccgcttatgatattgtaataaacgacatttacggtcttgcgccgctgactccggagggacttttccataatattaacgacggaaagaactttgacttcgataacccgtggtggtacgacgacttcatgagcgatatttcaattatctccgacatgcgttttatactggcgggagactattttatagatatgctccgctgttctcactgccttatcatgaacaaaggaatgtaccgcgacatttacggcgatccggaagatgtatattcttccgtgctgaacaagacgtggactctggacagcttccgaacacttatagacggtgcggcaaaggacctcgacggcaacggaactatgacaaaggacgaccagttcggctttgctatatttgagtattggggacccatgattccgtggctcatcagcgcagaccccggatttatcgaacgcgacgaaaacggatgcccgataatcacgctgaacaacgagcgttccgttatgcttaccgaaaagctgaacggcatattcaacaacaccgcgactgccgtaagcctgaccggcggaaacgaagcacagacggaaaacattttcattgagggcagatctctgttcctcggctaccagagactcggctctcttgaaaacactacggttcgcgacaccgatgtagacctcgctatcctgccgtacccgatgcttgacgaaacgcagaaggattatgtgacctcgactcacgacacggcggagcttggattcattccggtttccgttcctatgagcaggcttgactttatcagcactgttatagaggtgctctgccgcgagacatatgcgcaggtgcttccgaactactacgaatcgtcgctgaaggtaaaatacacccgcgaccagtcctctgcgcagatgcttgacataatccacgaccatttcggaaacggctttgcactggcgtactcgaatgcgctgggcggatatttcttaaacaccacgttcaacgatgcgatatcgaaaaactccaccgattttgtttcaagagcaaaaacgaaggagaagcttgttcagaaattactgaacaagatggtaaagaacacagaggaccttcgtcaatcataa

SEQ ID NO: 796 - DNA, 1248 bp, Unknown
  Unknown gut bacteria
atgaaaacgaaaataacagctctccttgtactctcactcctgctcctctccgcctgcgcaaaggaaaaagtaacattgcaggaagaaactccgccgctcgaaaaacccgacgagacgttctctgctccctccgaggacgagagcgaaagccatgtctttgaggtagaggaaagcacggaaaccgagactgaaacagaagaagaaagcaagccgacgccgccgataaacaagacaaacgtaaacctttgcagtcaaaaaagcgaggtatactatctcacctcctccaccggcaaggactacggcgaagcaggaataaaacccgaaaaggcaaacgaaattctcggcgcggtcatattcgacaatgttcccacctacatgacgatagtgcagaacaccgattacgtcgaccccatggcaatgcaaggctcgctctacggctggtttgacggatgtatgtacggcatatcggaaaagtgcatggcgggagacgcgctctcctttgtcacgaagaaaggctcgttcgacctcagctctgcggaaattctgaaaggcaagacagcggacggcacagactacaccttctacaagaccgaagccgacgtttactcacaggtctacgagtcgtcgcaccgcttcacactgtactgcggatttgtcgcggtaagtgaggacaagatggcggctatggtgttctccgacaacggcgtgaaaataacggacgacgacggaaacgagaccgacgtatgggaagaagcctttaagccgatgctcgactccgcgagaatatacacttcctccgacgacagcgcgctcgaatacacgatagaggtgggaaaatacgactccgacgacgctcccgtgtacgatgcaagcgtaactctgcccgacacatgggagatggactacaccatagcctccgacataccgcgcacactcgattcaagatatgccacaaagagatttgagatataccgcggatttgacgtaagctccgacggaatgaacacgacaaacaaaggtatcggaacaacagcgcagagctacgactacacatggtacacttcacgcggagtatcggagggtgagaaaactctcggcgtaacatggtactacatttttgtgaacgtcccccacacggaaaacaagctgtttatgacattccttgtgtatgacgacgacgagccgaattactacgaaaactactgtctgcccgtcctcgactcgctgacgatagaaaaggcttcctaa

SEQ ID NO: 797 - DNA, 1326 bp, Unknown
  Unknown gut bacteria
gtgttcgagacgctgaaaaacgcttggaaagtcgctgacctcaagaaaaaactcatttacacaatggtcgtcatcgtactgtatcgcgttggtacagcgatcccgatcccttatgtaaactctgctgccctcagctcttctatgctggctacaggcggctccatattcgcatacctcaatatcttaacaggttctgcgttctctaatgcaaccctgttcgctctgggtattaacccgtacatcactgcgtccatcgtacttcagctcctctgcatcgctattccttaccttgagaatctctcaaaggaaggcgaagagggcagaaagaagatcgaccagatcacacgctatgtaactgtaggtctcggacttatcacagctatcggttactatcagctcctgaagtcctataacctcctcgttgagacaggcttcttcgcggctctcgttatagtaacttgctactgcgcaggttcatctctcgttatgtggctctccgaaaagattaatgaaaacggcgtcggcaacggcatctctatcatccttttcgcaaacatcgtatcccgtattcctactttcgtactccagctctggaatcttatcatcggcaagacccagttcacactcggcggcaaagctgttacggttccgatctgggcaggtatccttatcactgtattcgctctcgctctcgcggttgcaatgatcggcttcatcgtttggatgaccaacagtgaaagaagaattccgattcagtacgctaagaaggtcgttggaagaaaggtttacggcggtcagtcgtccaaccttcctctcaaggtgaacatgacgggcgttatgcctatcatcttcgcatcctccatctgctccatcttcccgactatccagatgttcgcgcatcctgctgaaggctctttctgggacaagttctttgatatctttgccacagacagcgtcctctacacggttcttacattcgtactcatcatcgcgttcgcttacttctatacctcgatttctttcaatcctatagaagttgccaacaacctcaagactaacggcggttccatccccggtatccgtcccggccgtcctactgctgagtacatcactaagattctttcccgtgtaacattcgtaggcgcgctcctgctctccgttgtagctgttctcccgctgatacttaaccttatctccggcggcaacttaaacggtcttgcattcggtggttcttccatcatcatcgtagtcggcgtagttcttgaaactatccgtgagatcgaagctcagacaacgatgcgtcactacaagggattccttgaataa

SEQ ID NO: 798 - DNA, 1005 bp, Unknown
  Unknown gut bacteria
atggttaactccgatatatacaacataagcgtcatcacacactataactatcagtctctcatggaccatatcggctcaggtaaggactgggacctcgcgcgtcgttcgggtggtatcaaaatccttcccccgtacatcacggcatacgcgaacaacgtaaactcgctctacaccacgagacttgaggcactcaagagcgtcaactactccatcagccgcattaccgacgaatatgtagttctctccgactgcgacgttatctgcaacgtagacttcaacgatatgatagaatatcacaagaagagcggcgcggacatgacttttgcggtaaagaacgttgaactcacccgcgaaaaggctaagaacaacactctcctcacttccgacgaaaacggcagaatcacagacgtgctcgtatatcctaccgattttgaaggcagagcggacatcacgctgaacatggtagtcataaatacatcgtacctcagacagatagtgaccgactctatcgcgcacgactacaagagcctttccagagacatcatcgcgagaaactacaagaaaatgaactaccgcgtgtacagatacgacggatatttcgcctgcatttcctccttcctcgattattatcagcacagcatggagcttctctcaaacgcaaaagcacgcgaaatgctgttcaacgtggaaaaccgccccgtatatacaaaggtaagaaactccactcccacatattacagcgacaagtcaagcataaaaaactcaatggtagcggacggctcgtatatcgagggaacagttgaaaattccatcatattccgcggcgtaaaggtcggcagaaacgctacggtaaagaacagtattctcatgcaggataccatagtaggcgacggcgcattcctcaattacgttatcaccgacaagaacgttgtgctgcgtgaaggacttatgctctgcggcgccgacagtcagccgttctatgtagcaaagggaaaaatgctttaa

SEQ ID NO: 799 - DNA, 2637 bp, Unknown
  Unknown gut bacteria
aaccaccacagagcttcggacgatgcggaaatgctcgcggcaatatttaactgcatggcaagccgtcttaaggaagagggaatcgacaccatttcccgcatgaacttcgcgatggctgaaaaatccgatgtaaagaagctcaaatcctatcaccagataatccttgtaaagaaccagacgggcatgaagaacctctacaagctcgtctcggactcatatcttaagtactactacagacaccccaggataccgagaacgcgtctggaagagctcagagaaggcttaatacttggctcagcctgtgaagcgggagagcttttcaccgcaatgatggaaggaaaatcggagagcgaccttatcgagatagcgcagttctacgattatcttgaaattcagcctatcgccaacaactcgttcatgatagctgagggcaaggttccggatgaagagacgctccgcaacttcaacagaagaatcgtggagcttggcagaaaagccggacgacctgtctgtgcaacctgcgacgctcactataaaaatcccgaggatgaaatctaccgcagaatcattctcacgggtctcggattcaaggacgccgaccgcgaaacaaagctgttctaccgcaccaccgaggaaatgctcgaagaattctcgtatctcggtgaagacgtcgcgcgcgaggtggtcatagaaaacccgaataaaatagcggatatgatagagacagtccgtccgatacctaaaggaaactacccgccgcacattgacggagcagaggaagagcttaccgaaaagtgccactctcttgcaaagcagctctacggagatccgcttcccgaggttgtttccgcaagacttgagagggagcttgactccatcatcaaaaacggcttcgcaatcatgtacatcatcgcccgcaagcttgttgaaaacagtgaatcaaagggatatcaggtaggatcaagaggttcggtaggctcgtcatttgcggcgactatggcgggaataacaagggtaaatccgcttcctccgcactacagatgcccgaaatgcgcgtggtcggagttcttcacacacggtgaggttggctcaggctttgacttacctccgaaaaactgcccgaaatgcggcacaaaatgcgagcaggacggacacgatatcccgtttgaaaccttcctcggattcaagggagacaaaacgccggatatcgacctcaacttctcgggagacgtgcagggagacgcgcataagttcacggaagtcctcttcggaaagggaaaagccttcaaagccggaacaatcggtactcttgcagacaaaaccgcatggggattcgccgcgaaattccttgaaggaaagggaatatcggtgaaccgtgcggaaatggacaggcttgtaaacggatgtctcggtacaaaacgtactacaggtcagcaccccggaggaatcatcgtcgttccgcgtgaatatgaaatatacgacttctctcctgtacagcaccccgcagaagaccccaattccgatatcataacgacgcacttcgagttcaagtatctccacgatacgatattaaagctcgacatactcggacacgatattccgacaaagtacaagcgtcttgaggaatactcacacacaagcgtgcttgacgttcccatgagcgaccctgccgtgtacaagagctttacctcaaccgaacctataggagtaacgcccgagcagattgactccaaaaccgcgacgctcggactgcctgagatgggtacaaagttcatccgcggcgttcttatggaagctcagccgaagaatttcacggacctgctccagatatccggacttactcacggaacaggctgctggctcggaaacgcggaagagcttatcaacgataagatatgcacgatttccgacgttatcgggtgccgtgacgacattatgatgacgcttatccacaaatacggcatggaaaagagcctttcgttcaagataatggagttcgtgcgaaagaacaaaaaaggtcttgttatcccgaaagagatgcaggacgctatgttcgagcacggtgttccgcagtggtatgtcgactcgctccagaagatacgctatatgttcccgaaagctcatgccgcggcttacgtaatcgacgcgataagacttatgtggtacaagatttactaccccgtagagttttacgcggcatacttcacagctgctcctgacggctttgacggggagatagtaatgggcggtaagaatcactgcaaggaagtcttaaccgactataacaagcgcaggaacgaaatctcggcgactgaggcggaagtagcgaacgcactcatgctcatcaacgagtattacgaaaggggattcgactttcttcccgtggatatctataaatcccacgcgacaaagtttgttcccgaaaacggaaaaattcgcctgccgttcgcctgcctgcccggtctcggaggagctgccgcggaaaacatcatgaacgcaatgcagtccggttctgtgttctccgtggatgagctgaaaacgaagggaaaggtatcaaaatccgtccttgacctgctcgagaaaaacggcgcgcttcgcggaatgtcaaaaacaaatcaaatatcaatgttcatgtaa

SEQ ID NO: 800 - DNA, 1161 bp, Unknown
  Unknown gut bacteria
ttcaagcccttcgtaatgaagagacttgttgaaaccggcaaggctgccaacgtcaaggaagctaagaaaaaggtagaaaagatccatcccgacgtatgggattcactcgaaaacgtaatcaaatctcatcccgtacttctcaaccgtgcgccgaccctccaccgtctgtcaattcaggcgttcgagccggttctcgttgagggtaaggcaataaagctccatcctctcgtttgtaaagccttcaacgcggacttcgacggcgaccagatgcctgtacacgttccgctttccgcagaggctcaggctgaggcaagattcctcatgctctccgcgaacaacctcttaaagcctgtcgacggacgcgctatcaccgttccttcacaggatatggtcctcggttcgttctatcttactctcgacaagcccggcgaactcggagacacaggcgacccggatcacccgaagatgttccgcgacttcgacgaagctgtcatggcttacgaaaacggacttctcggactccacgcgcctattgaaatcatgatgaccaaggtaatcgacggcgtggaaaagacaggcagagtgcgcggtactctcggtaagttcatcttcaaccgtcccatcccgcaggacctcggctatgtagacagaagcatccccggcaacgaattcaagcttgaaatcgacttcaacacaagctccggtaagctcggcgatatcgtcgacaggtgtatcaaataccacggattcgccaccaccgcggcagtgctcgacgaaatcaaggctatgggctacaagtactccacaagaggctccatttccatctccgttgccgatatcaccatcccgccggaaaaatacacactcatcgcgcaggctgaaaagaacgttgaagttatccagaagcgttacaaccgaggcgaacttaccgaagacgaacgctacaaatccgtcataaagctctgggaaaagacgacggacgacgtagtcgcagctcttcaggcggacttcgacagatacaacccgattaagatgatgtcggactccggtgcccgtggttctatgacacagatgcgtcagctcgccggtatgcgtggtcttatgttcgctacaaacggacgtacaatcgaaatcccgattaagtcaaacttccgtgaaggt

SEQ ID NO: 801 - DNA, 1668 bp, Unknown
  Unknown gut bacteria
atgatgaaagatatgaagacggttatagatttatttgaaagaagttgcgaaaagtttccggataatccttatttatgggaaaagaaaaacgggaaatttgcggctacatcatatatggaggtaaagcgagaagtattgaacttcgcgggtgctttgtgtcaattaggagtggataggggagaccggattgcattgttaagcgaaggctgtaatgcttgggtgtactcggaattggggatgttatacgccggaggcgtgaatgtaccgctatccattaagttgacggataacgaaattgtttttcgggtggaacactctcaagctcgttttttgattgtgtccgcaaactttttgaatcgagttcggggaattgaagggcgaatcggaggggtggaaaagattatcgtgatacattcagatataaatgaaggtaaatacgtatcctttgagttattacaacgagaaggggagatttggcggggagaacacaaggagttactgaatgaccggattcgtgccgtgacggaggatgatctggtaaatatttcttatacttcggggacgacggcggagccgaaaggaatcatgttgtcccaccggaattacgtgacgaacgtgttgcaatcagattccttgatacaaatcccggcatattatcggatattattgtttttaccatgggatcatagttttgcccatacggtagggctttactcttttatgtataacggggcctcgctggcttctgtcgattacgggcagtcgggaatggagtatttgcgtaatatcccggagaatctgcaggaagtgaagcctcatatattattgagcgtacctgccttggcgaaaaattttcgaaagaatattgaggcggggatcaaagcgaaaggacgttttacggatagattttatcatctgggattgaagattgcttatacatataatggttttggggacgatcgaggacggggatggaaggtgttgctgaaaccttgggtgaagttatgggatgccctcttgttctcgaaacttcggaaacaggtctttggcggaaaccttcgttttttcgtgggaggtggggccttgttggatattgaattgcagcgttattacgcggctttgggaataccgatgtttcaagggtatgggttgtcggaggcctctcccgtgatcagttcgaacacccccggacgttatcgtttcggttcttccgggatattggtaaaaccgattgatttgaaagtttgtgatgaggaaggacaggaattaccccaagggcaaaaaggggagttgtggataaaaggaggaaacgtgatggctggatactggcgaaacgagaagagtacggccgagacgatcgtggacggctggctgcatacaggcgatttggggtatctgcaccccgatggttggttgtacgtgctggggcgtttcaaatccttactgattgcgaatgacggggagaaatacagcccggaaggaatcgaggagaccattgccgaacagtcgaaatatatagattattgtatattatataataatcaatccccgtacacggccgggttgattgtcccgaataaaatggcgttacgggagtatatcgagaaacaggatgttgaatcggattctatggatgcctaccgggttatgttgaaaaagatccagagt

SEQ ID NO: 802 - DNA, 1053 bp, Unknown
  Unknown gut bacteria
attcttgaaaacgtgttgaaaggtcacccggtattgttaaaccgagccccgaccctgcaccgattgggtattcaggcatttcaaccgaaattgatcgagggtaaagcaatccgtttgcacccattggcttgtaccggattcaacgccgacttcgacggtgaccagatggctgtacacttaccattaggtaatgaggccgtgctggaagctcagattttaatgttgtgttctcataacattttgaatccggctaatggtgcgcctatcacggtgccttctcaggatatggtactcggtttatactatatcacgaaaccgagaaagggcgtgaagggtgaaggattgaagttctattctccggaggaagtgattatcgctttcaacgagagagctgtagacttgcatgctgaaatcgaggtgaagattgataacgtggacaaggacggtcaaccgatcagacatatgatcaaaacgacggttggtcgtgtgattttgaaccagtttaccccgaaaaactatccttatatcaatacgttgattacgaaaaaagcgttgcgtgacattatcggtgacgtgttcaaacgttgcggtgtggacgtgacggctaaattcttggatgatattaaggatttggggtttcgtaaagcatttgagggtggtttgtctttcaacttgggagacgttattgttccggagaacaaacaagatttgttacaagaaggatacgatcaggttgaagaggtaatggcgaactataacatgggattcattaccaataatgaaagatataaccagattattgatatttggacacacgtgaatgcgaacctgaccgccacgttgatgaaacaattggcagcggacgaccaaggattcaattctatctatatgatgttggattccggagcccgtggatctcgtgagcagattcgtcagttggcaggtatgcgtggattgatggcaaaaccgcagaaatcaggtgctacagggggacagattatcgagaaccctattttggcaaactttaaagagggactttcggtgttggagtac

SEQ ID NO: 803 - DNA, 837 bp, Unknown
  Unknown gut bacteria
tcatttgaagaggctgtaaaagttgtaaaatccggagaccggattcacattcacagtgtggcttgtgccccccaaggtctaattcaagctctttgcaacagaggacgtgcaggagaattgagagacgtcaagttgcaacacttgcacacggaaggtagtgccccgtatgcagaagcagaattcgaaggaatcttcttcctagaatcctatttcgtaggcagtaacgtgcgtaaaccaactcaagaaggatatgcagattatgtacccgttcatttgagtgaaacccagaaactgatcagaagcggtattcacccggttgatgttgccatgatccaagtttgtcccccggacaagcatggttttgtatccatgggaacctctgttgatgccacgttagctgccgtacagaatgcaaaaatcgttattggtgttatcaacccgaacgttcctagagcatggggagatgctatcatcaaattatcagacatcgacatcttctgcgaggataatactccacttatcgaggctcatccggcaacattaacagagcaagatattgctatcggtaaaaatgtagcctctttgatcgaagatggagctactctacaaatgggaatcggagccatccccaatgcagtactttcccaattaggaaaccacaaaaacttaggtattcacacggaaatgtttgctgacggagtattacccttgtatgaaaaaggtgttgtcaacaacatgaataagaaattcgacaaaggtaagatcgtatcaaccttcttgatgggatccaaaaaagtatatgacttcatcgatgacaaccctggagtagctatgatg

SEQ ID NO: 804 - DNA, 1401 bp, Unknown
  Unknown gut bacteria
atgtggaattttttaaaaccagcacctcacaaggatttattaccggaaggtaagatcgactcgacttacaagagcctgcgttggcaggtctttgtcggaatcttcatcggttacgccggctactacatcgtgcggaagaacttctcgatggcgatgccgtttctaacagaccccgccggaccttacgggttcgacaagggatcgctgagtatcgtgttgtcgttgaacgcggtggcctacgccctgtcgaagttcttgatggggagcgtttcggatcgtagcaacgcgcgggtgttccttcccctggggttggtactggcggccctgtccatgatgttcatggccgtgccgatcgagctgttcggggcaagcacgacttccatcgtgatcatggcggtgttgaacttcctggtcgggtggtttaacgggatgggatggcctccctgcggccgcgtgatgacacactggttttccgtgaaggaacgggggacgaaaatgtctatctggaattgcgcccataacgtgggtggcgctctcgtgggcccgatggccgtgtacggggccatgtggttcgggtcgtggttctacggggtggacagttcaaagtactttatcattggttcctatattttcccggcggcggtggccctgttcgtggccctgctggcgtacgtgttgattcgtgacaccccgcagtcctgcgggttgccgacgatagagaaatggcggaacgattacccgaaaaattacagcgaaaagcaggaggaagtcctcaccacgagagagattttcttcaagtacgtgctgaataacaagatgttgtggtttatcgccatcgccaacgccttcgtttacatggttcgttacggttgcctggactgggccccgacctacttgaaggaggcgcaagggtacgatattaaagaggcaggctgggcttatttcgcctacgagttcgccgccatcccgggcacgctcgtttgcgggtggttgagtgacgtggtgttcaagggacgcctcgctctcacgacgatcatattcatggccctggtggccttgtttatcttcctttactggcagttctcggataactacatgattgtcacgctatccttgatcgccatcggtttcttcatctacggcccggcgatgcttatcggggtgcaggcgcttgacctggctcccaagaacgcggccgggacgtcggccgggttgaccgggttcttcgggtacttcttcgggacggctatcctggcgaacgtggtgatgggatacgtggcggaaagttcattcgggtgggacgggacgttcgtgctgttgctcgtcgcctgcgccttgtccatcgttttcgtcggctttacttacaaggaggaacaatacctggtgcaaaatagaaaataa

SEQ ID NO: 805 - DNA, 1587 bp, Unknown
  Unknown gut bacteria
gagcctgaggtgtacaaggagatttctttaaagctggaaggaacacgggaggcccgtgaaaaatatatcaacgagtttattgcccctatcgtggaagaattcaataaccggggaattaaattcaaggtgaaatggcgtaccaagacgatcgcttcgatcttgaacaagatgcggaagaaacaggtggagttcgaggaaatctatgacatattcgcggttcgttttatactggatagcagggggccggaagagaaggccgattgctggagggcatattcgattgtggccgacaagtacacgcctaacccgcagcgattgcgggattggatttcagtgcctaaatccaatggttatgaatcattgcagaccaccgttctcggacctaataaccgatgggtggaagtgcagattcgtacggaacggatggatgagattgctgaaaagggatttgcggctcactggaagtacaaggggggaacggcggataaggcgatcgaggagtggctgactgagttacgagagatattggagagttcggaagtcggagccgtggatatgttggatgatattaaaattaacctgcaagataaggaggtacacgtgtttaccccggcgggagatttgaagactttaccggcgggagcgacgttacttgactttgcttatgctatccacacggccgtgggatcccgttgtgtaggaggaaaggtaaaccaacgtaacgagaccttgcgctatgtgttgaagaatggggatcaggtatccatcctaacctcgaataatcaacagccgaatgccgactggttgaatattgccacgacttcgaaggctcgtaacaagattcgtcagtttcttaccgaagattcgcgggctcaggccacgctgggtaaggaaatgttggctcgtcggtttaaaaattggaagttagagttgacagacgaggtgattcatcgtttgcaacaacattataaatataagtttgctattgatctttaccaggcgattgccgaggaaaagttagatatggcggagattaaggagttcattactcgcccgaaagaagaggagcgtacggtggccaccccgagagaagaggtgcaggttattccgtcccgcccgattagtgaggatgtgttattgatcgaccggaatgtcgataacgtggtgtacaagtttgcccgttgttgtaacccagtattcggagatgatattctgggattcgtttctattggtgaggggattaagattcaccggacccagtgtaagaatgctcttgatttgcagcgtcgctacccgtatcgaatcgtgcaggcagcttggacgaatgccggtgcaacttcttaccagacggtgttgagtatcgtgggacgtgaagatgcgggaatggtgactaagattaccgaagtgatagcgaaggacccgaagatcacgttacggggattgtccattaattcgagcgagggattatttgacgggcaaatcaccgtgttggttagtgatacggaacacttatcacaactgatttcccgtttaaaacgtatacagggagtcatgcgggtatatcgtcatgactctgtgaaagagtag

SEQ ID NO: 806 - DNA, 1107 bp, Unknown
  Unknown gut bacteria
ttctttcttcccctattctttgccttttcgggattacacacggaaatcggtttgattaacacgccggagctatggggtgtgtgcttactgttcatcgtggtagccattgccggaaagtttggagggtgtacgctggcagcacgggctgtgggcgaaaactggaaagatagtcttatcgtcggcacgctgatgaacacacggggactcatgcaactcgtggccctgaacatcgggttcgagatgggaatcctttctgcccaaatgttcgtggtattattgatcatgtctttattgaccacgttcatggcaaccccaatgttgtcgctcgtggaaaagatatttgccaaacaagaggaaaaagcccatcaccacgagaaagtgttgctctcctttggtcgtcccgaaaccggtagaaccttactgggtatggctgatcttttactaggacatcggctgcaaaacagtcaacttattgccacgcacttcacgttgggaactgacttaaatcctgccaaagcggaagagtttgcagaagagagttttatcccccttcgggaagaggctcgccatctgaatttacaggtagatgaacgttatcaagtaaccgacaaactaattcaggaaatggttcacgtggccaagaaagaacacgtggactacctgttcgtcggagcaggacaacaattcatgcaggacaatagcacggcccccggaaaactaggtaaacgattcaccacgatttcccgctggctgaaacaattaaaagatcgcccgttacatttaccgggaacgctactccggcaaaaactggaatctatcatggatcacgtggattgttccgtgggaatcttcgtgaacagaggtttcacgcaggcttcccatatcttacttctcgttgatagtgaagacgacttgttcctcttcaattacgccagaacccggttgggcgaacaaagcatgaccatccggatttgttttatcaacgaacaggtggataaacaactacaatccagaatcatgaatgatttcgttcaaatcgattcaaacaaattcgtactggacaaaccattaaccatgaacacttttattgaaaacaaagaaacctga

SEQ ID NO: 807 - DNA, 1038 bp, Unknown
  Unknown gut bacteria
gattgcgatgcattacatgggtatctgagtcaagcacagcgggataacgtgatgaacgctttccgggcgaaacgattgaaagtgttggtggcaaccgatgtggcagcccgtgggttggatgtggattgcttgacgcacgtgatcaattacaatttgccggaagacgtggagagttacacgcatcgtagcggtagaacgggacgtgcaggaaaggaaggaatctctattgcgattattcactcgaaagagaaagggaaattgcgtcggattgaaggtatcttgaaaaagaagttcgagtacaagcaagttcctgtaggtgaggagatttgccgggctcagttggcattctatgcagataagattttagcatcggaggatcaagaggatatggatctgtatgctccggatgtgtacgaaaagttcgcagagctgacgaaagaagagttgattcaacatttggtatcctacgagttcggtaagctactgaagaagtataagaatacagctgatttgaatattagcgaggatgaccgtggaggtcgttcagagcgaggtgaacgtggtgatcggggtgataggcgtgatcgtcggggacgtggagaagagactgtgtacagcacgtttatgctgaatgtcggtcgggaagatgggctgacacctcgtgatttgatgggcttgattaataaatattctcgtcgtcgggggattggtgttggaggtattcgtatttttgatacagatactaaattcgagattgacgaggagagtgcatctgatttcgccgtagatttcagcaaggttctctttaatggtattccattggagataaaggctatcccgactcgggataatggacgtcgtcgggatgatcgaagtcgaggcggcttttccggaagacgggaacgtcgtgatcgggacaaacgagatagccgaggtggcggacgtcgggaagaaaagagtggtggaaagagaagaggaagaccgggaagtgatccgaaaaagccgagaaatttcaatagatcgtcttctcgcgactag

SEQ ID NO: 808 - DNA, 777 bp, Unknown
  Unknown gut bacteria
gagggggtcaaaacttccggagaattccaactcagcctatccgcaaaaggggaatattacgagaatcatcttcccgcttttgacttgcgtttcaacattctgaacgcaaatctaaagtacccggaccttcccgaatcggttgaaaaaatcaatctgaaactggcagtgaccaaccccggcggaaccatcgcacaaaccaaggcagatttaagtactttgaccttcacggttgccaacaacccgttcagcatgaacctgcttgtagttaacccagacgacccgacattaaagggtggcatgaaaggcgttattaacttcgagagtttgaaaaaagccttaccgttaaaagacatcacgttaaatggtatcttaacaaccgatctctcctttgacgggaagtaccaatatatagagaaagaacaatacgaaaagttcacggcaaacggtaagattgccctacaaaacgtgttgttcaagaatgcggacttccctgccggaatttctgttccgtctggagaggtaaccatcacacccgcccgactgaacttgaaagacttgaaagtaaaaatcaactcttcagacttcgccctagtcggttatcttgccaactacctgccctacgtgttcaaggaccagaccttaaaaggtaactttaccttgaattccaacaaaatcgacttgaatgaattcatggcaaacatgacgacctccgaggccgacacgatgcaggctgcaacaacacaaagttcggccccggcagaagaaacatcaagtgta

SEQ ID NO: 809 - DNA, 1074 bp, Unknown
  Unknown gut bacteria
aatacggtgattgctgatgccttattgggaatgaacgtgaccgatcaggtaggaattgatcgtgtcttattggaattggacggtacgccgaccaagagtaatttaggtgctaatgcattattaggagtgtctttggcttgtgcgaaagctgctgctaacgcattggaaatgccgttatatcgttacattggtggtgtaaatgcaaaagtgttaccggtgccgatgatgaatattattaacggaggatctcattctgatgcccctattgcgttccaggagtttatgattcgtccggttggggctgaatctttccgagaggctttgcgtatgggagcggaggttttccatagtttgaagaaagttcttcacgatcgcgggttgagtacagccgtgggggacgagggaggttttgctcctgcattgaaaggaacggaagatgccttggaatctattattaaagctattgaggctgccgggtataaggcgggagaggatgtgatgatcgggttggattgtgcctcttctgaattctataaagatggagtttacgattattctaaatttgaaggagcgacgggcgcaaagcgttcttcagccgagcaggtagcttatctggaagaattgatttcccgttacccgatcgattctatcgaggacggtatgagtgagaacgattgggaaggctggaaattactgacagagcgaatcggggatcgttgccagttagtaggagatgatttgttcgtgacaaacgtgcagtatttgaagaaaggtattgaaatgggatgtgctaattccattttgattaaggtaaaccagattggtacattaaccgaaacattggatgcgattgatatggctcaccgtgctggctatacgtcggtaacttctcatcgttccggggagacggaggatgcgactattgcggatattgcggtagcaaccaattctggacaaattaagacgggatcattgagccgttctgatcgtatggcaaaatacaatcaattactgcggatcgaagaagaattaggtgataatgctcagttctacggacggaaattcagcaagtaa

SEQ ID NO: 810 - DNA, 981 bp, Unknown
  Unknown gut bacteria
agaaaacacatttttaatgccggaccatgtaaattgccggattctacattggaaaatgtatcaaaagcggtattagagttcggtaacacgggacaatctatcatggaagtgtctcaccgttctgcagattttcaagctgtttatgaagaggctgttgccttgttcaaagaagtattgaatattccggaaggatactctgttcttttcttgggtggtggtgccagcatgcagttctgcatgatccccttcaacttcttgaaaacgaaagctgcctatgtaaataccggaacttggtcaactgcagctattaaagaggctaaaatgtggggtgaggttgaaatcgttgcttcttctgaggctgatggatttacttattatcctgaattcacgattccttcagacgtggattacatgcacatcacttcaaacaacacgatccgcggtacggaaattttctatgatccgacttctccggtgcctttgatttgtgatatgtcttctgatatttgcagccgtccggttgacgtgtctaaatatgccatgatctatggtggatgccagaaaaacctcggacctgccggtgttactttcgtgatcattaaaaatgatttcttgaacaacgtggttgctgacagaatgatcccgacgatgttgagatacaaaactcacgtggataaagaatctatgtataacacccctccatgtgtcaatatttttggggtaaaagaaaccttgaaatgggtgaaagctatgggtggtgttgaagctatggaaaaattagctatcgaaagagccgatatgctttacgctgaattggaaagaagcaaagtgttccgtccggttgtaaaagaaggttctcgttcaagaatgaacattcctttcttgttgagagaaggatatgagtcattggagaaagaattccttgatttcgctaagactaaaaacttggtaggattgaaaggacaccgttctgtaggtgga

SEQ ID NO: 811 - DNA, 1191 bp, Unknown
  Unknown gut bacteria
gacgacgtggaattaccaaacctgaatcactttgccacgcaaggagcatcgggtggtgtggttagtatcgtgaatatcgatttcgtgaaggaagtcaatttctactcgggagcattccctgcctcccgggggaacctgatgagttccttgcttgacttccgacaaatagcggggaacccggacaaaataaaagtgcgggggactttaggggcaacagatttcgggctatcgctggacgggcctctggcacctaaaaccacattcatcatgtccgcccgcagaagttacctgaaattcctgttcgacatgatcggtctcccttttctgcccgtgtataatgatttccagttcaagacggaaacaaagttcaatcaaaaaaacgaattaactatactgggcatcggggcgtacgatcttaataatctcaataaagggatgaaagatcccgatgatgaccaaagatatatgctcaactacctgccggagagcgtgcaatggagttacacgcttggaattacctacaaacattacgggaatcgttggaaccaccttttcgtactcagtcgcagtaccctacaaaacgagatcgagaaatacaccaacaacgacaaaagccaaacgaaactggtggattataattccggcgaaacggagaataaattccgattcgaacacaatcatttgttacgacatgacatcaagttgaatgtcggggccgggatcgaatatgctacttacaaaaacaagacaacaagagaattatataccctcggaaaattgaatcatgtacaccacgacaagaattttgatttcttcaaatggtctctcttcgggcaaatcagtaaaaatttctttctagaacgtctcgcagtttcggtaggagtccgagttgacgggaatagttacacgtcgggaatgaacaatcctttcaaacaggcatcaccccggttgtcactctcctactcactctcccccgaatggtttattaatgcaaatgccggacgctattatcaacttccctcgtacaccacgatgggatatgccgacgagcaaggagacttggtgaacaaacaaaacgggttgcaatatatcggaacaaaccactacgtggccggtttggaatatcgccccggtagccggacaaaaatcacgctggaaggattctacaaaacgtacgaccattacccagtt

SEQ ID NO: 812 - DNA, 798 bp, Unknown
  Unknown gut bacteria
ggggacacggatgtcgattcacacttggcattacccttgattcgccactccgcagcacgtattgacacggttgaattgtaccccttccgtcaacttttcgaggctgggataccgggcgtcatgattgcccacctaaacgtaccttcctatgatacggccaatatcccggcttctctatccaaacagatcatcacggatctgctacgcaagaaattacactttgacggtctgtgtttcacggatgccatgaacatgaaaggtgtcaccaaaggaagaactcccggagaggctgatgtagaggcgctagcagcaggaaacgatattctgttattcccggaaaacgtggaagcctccgtgaaaaaaatcaaagcagctatccgcaaaggtgttctcacggaagagatgatcgacgaaaaatgccgaaaagtacttgaagcaaaagcagaattcgtactcccgtatgctgctgccgtggacaccgcccggctgaccgaacgattgagttccccatcagccaaagctttattacaagaaacatacgccaaagcgattactctcgtgaaaaatgacggcctcctgctcccgttgacacatttagacacgctacgcattgcctcattgaattttggagaccggaaagcccccgttttcgagagtacactagagaaatacgccccttgcgctcacttttctctatcacccggtgcctcaaaagaaaaagtggagaaactgattaacaatctatcggaatacaattgtgttatcctgtataacagtgctgcccgtaacacggcatcc

SEQ ID NO: 813 - DNA, 903 bp, Unknown
  Unknown gut bacteria
gtagggttcgtggaaaagaaagtatgggaacccaattgctggattaatgttgtttcacccactcaggacgatcttcgctacctgatcgacgaaatgggagttccggaggcttttatagatgacgtggaagacgtgcacgagcgttcccgtttggaagtagaggatggatggacgctgatgatcctgcgtatcccctttaagtcggtagatacaagtattcctttcatcacagtgcctttggggattatcgtgaaggaggatatgttcgtaaccgtgtgctattacgagacagaaatgatacctgatttcatcaattacgtgattcgtaaaaacttggagattgccaataattgggatcttgttttccgtttgtttctttctgcctccgtgtggtatttgaaatacttgaaacaaatcaacgcccaaatgcacatggcagaggtcgaattggaacgttccatccggaatgaagaattacaacggttgctgaaaatcgagaaatcgttggtattctttatcacttctttgcgtgggaatgacaacttgttgatcaaaatgaaaaccttgaaagtgcagcggcaattcttcgacgaggatttggtggaggacgtggagatcgaattgcggcaagctcaggattcggcccgtatttatagtgatattttaagcggtacaatggatgcctacgcttcggtgatttccaataatttgaatatcgtgatgaaacggatgacgtccatctcgattatattaatgttaccaaccttgattgctagtttgtacgggatgaatgttccgaactctttggaggaaaatccttatggatttttgatcgtgattgttatctcgatactcttttccgtgttcggtttcatcgtgtttaaatggcggcattggttttaa

SEQ ID NO: 814 - DNA, 546 bp, Unknown
  Unknown gut bacteria
atcggcacgacgaaagatgctgactttagtcttgccttgtatatgaatgtaaaggcaatggaagatgggggtatgcaaatgaacatgggaggaacttttgccggagaatctaccggaaaaacttatggtgtggatggtgatgaaacttcttttgattgggatattgctttccatcggtatgatataaagacgaatgacggggctgccatcatgttgcagaccacggatttggaaagtgttacttctgctagtgttaccggagaaagtttcacttcagatgtggacggggaagtcatggtggatatgtcaggaatgatgagtggttttgttgggtatcaacccacgaaggttaacgaagtgttggctaaatgggtaacggcaactcctaccggatcaatgcccccgtattcttatgagattaatggtaacgtgtttgttgtgaaaactgccagcggtgaatatgcaaaattgcgtttcacggatatgtctgatgctacgggtaagaatgaggccgctacatttgactacgagtttcctctaaaataa

SEQ ID NO: 815 - DNA, 1023 bp, Unknown
  Unknown gut bacteria
atgtttatcgaggagattctaaaatacaacagtatagcaatcgtgggtctggcaaaaaatgccggaaaaacggaatgtctgaactatattcttcggaaagtgaagaatacgggaaagcgtttcgcccttacctcaataggcatcgacggggaaaacagagatcaggtttgccaaacgcccaagccggaaattgaaatctttgaagacatgatattcatcacgtcggagatgcattaccggtcgaaacgtctggtggcagagatcatggatgtcagcacacaacaaacctcgttaggacgtctggtaaccgccagagctgtcagttcggggaaagccttgttatcagggcctgccgacacgggatcattaaaagccctcatccaagggatgaaacgttttgacgtggataccaccattgtcgacggggctctctcccgactcagtctcagctctccggctgtgacggaagccatggtgttagccacgggagccgcagtatcctgtaatattcctcaactggttagaaaaacaaaatacgtgtatgacctcatttgcttggagacagcagaaccggagatgatccggcaactgattgacatcgagcaaggcatatggtccattgacgaaaacgggaaagttcacgatctgaacattccttccgtgtttatgcttgaaaataacaaagacgaagttttcaagtacgggaacacgttatacgtggcaggcgccatcagtgacaaattattgcaattcctacggcaacagaagcaaatcaaggagatcacactgattatccgtgatttcaccaaaatgttcgcctctatggaaacatactatgctttcctcaaaaaaggcggaaccatgaaggtattgcaaaaaagtaaactattggctgtttgtatcaatccccaatccccggaaggatattgtctggattccgacgaactgagagtagccatgcaagagagcttgggtattcctgtttatgacgtcaagagaattgaaaatcaattaattcagtga

SEQ ID NO: 816 - DNA, 861 bp, Unknown
  Unknown gut bacteria
ttcattaaccgtacgctggtgttgacgcaaaagtattttgccaaccgggtgccggagcggggtgagttgacggattacgataaagaagtcctggctgaaattccgcaaatcgtggaacgtgtagagaagagtctggaaaccttccatttccgtgatgcgttgaaagaggcgatgaatctggctcgtttgggtaataaatacttggcggataccgaaccttggaaagtgatcaagacggacgagggacgggtgaagacgattctgaatatctgtttacagatttctgccaacctttccacattgatggaaccgttcatgccgttctcttctcagaaattacgtgagttcatgaatattgacgtgattgattgggttaaaatgggggatggcgtgattcctgccgggcatgaattgggagaggccggattgttgttcgagaagatcgaggatgcaacgattcaagcccagatcgataaattgttagcaaccaagaaagcaaacgagatggcttccgtgaaggccgcccctgccaaggagaatatccagtatgaggatttcatgaaaatggatattcgggtaggtacgatcattgctgccgagaaagtggctaagaccaaaaagttgatgaaattgaccgtggacacgggaattgacgaacgtacgattgtttcgggtatagccgagcattacacgccggaagaggtgatcggtcgtcaagtcagcgcgttggttaacgtggaaccgaaaccgttaaaaggcatcgtgtcacaaggaatgattttgatggccgagaatgccgatggaacgctttcctttgtttcaccggataaagaggtgaaaccgggatcggaagttcgataa

SEQ ID NO: 817 - DNA, 1125 bp, Unknown
  Unknown gut bacteria
atgcagacaattgataattacaactttaaaaacaagaaggcgcttatccgcgtagacttcaacgtacctttaaatgaaaagttcgagatcacggacgacacccgtatgcgggcagccgttcccacgatcaagaaagtgttggcgggaggaggttccgtaatattgatgtctcacctcggacgcccgaaaaatggaccggaagacaaattttcattaaaacatatccagaaacacttggaagaactgttgggagtacccgtgaagtttgccgataattgcatcggggaaagcgcaataaaagctgcagcagacctgaaaccgggagaagttctcctgttggaaaaccttcgattctacaaagaagaagaaaaaggagacgagaacttcgctcaaaaactggcttctttagccgacgtttggatcaacgacgccttcggaacagcccaccgggctcacgcatccaccgctgttattgccaaatttttcccgaatgacaaactattcggctacgtcatgcaaggagagttggaaagcgtggataaagtaatgcacaaccccacccgcccgttcacggccatcatgggaggctccaaagtttcatccaaaatcgacattattatgaacctcatggataaggtagataacctcatcctagggggaggaatgacttacacgttcaaaaaagcactgggcggtcatgtcggcaattccatctgcgaggaagataaactcgacctggctcttgaaatcatgaaactagccaaagaaaaaggtgtaaatcttgtattggcaaccgacactgtcgctgccgacgctttcgacaataacgccaacacccaaatcgttccttccatggaaattcccgatggatgggaaggattggatgtaggcccggaaagtattgcttccttcaccaaggtcatcgagcaatccaaaaccatcctttggaatggtcccgtgggtgtatttgaaatgccgaaattcgcagtgggaaccaaagctatcgctgatgccattgtaaaagccactgcaaatggtgcattctctttaatcgggggaggagactcggttgccgccatcaaccaattcggtttagccgacaaagttagctacgtatccaccgga

SEQ ID NO: 818 - DNA, 807 bp, Unknown
  Unknown gut bacteria
acccggcgtattctttttggatttgatatttcgttgacagacttacattcatattttgcagaggttacagggaaggtgtcaagttacgtgtttattgtaaatgaacgggggatattactttcgcatcctgatgaaaatttattggggacttcacctttccaaaaggaagagttggattctatcaaggaagtattaaaaagtcagagtgaattggaaattatggttcattctaatttcttgtcttcacaggtacttcgaatttactatcccctacttgtcgggagtgaaaagtgggtgattgctgttaacgtaccgcagtatggaaatcgggagatattggatgaatttcatcgttacacggcgatgattgccttgattacggtagttatattcgcaattttgttactttttgcccagcataaatggcgtagggaataccgtttgcgacgtagtttggaacaggagtctatggagctgcatttacagcagttgaaaaatcagattaaccctcactttttgtttaattccttgaattcattgagtgtgttaattggttcggattcgacgttggcgagggaattcgtgttgaagttatcgaaggtgtatcgctatttgctggagacaagaaacgaaagcttatccacggtgaaggaagagatcgagtttacccggcaatattattttttgcagaagattcgttttggggagcaattggatttgtctatagatgtgagaccggattgtttggaagcaaaggtgccttcgatcagtttacagatgttagtagagaacgctataaaacataac

SEQ ID NO: 819 - DNA, 948 bp, Unknown
  Unknown gut bacteria
atggaagcgattgtaaaaacaaatttcaaattcccgggacagaaagatgaatacgtcggtaaagtacgcgacgtgtataacatcaatgacgaatacctcgttatgttggtatccgacagaatttccgctttcgacgtagtactcccgaaaggaataccttacaaaggacaaatattgaatcaaattgccgctaaatttctggacgcaacgtcagacatcgttccgaactggaaaatagcaacacctgatccgatggtgacagttggtcacaaatgtgaaccattcaaagtagaaatggttattcgcggttacttggccggaagtgcatggagagaatataaagcaggcaagagaaccctttgcggtttacctttaccagaaggaatggttgaaaaccagaaattcccgactcctcttgtaactcctaccaccaaagctatggaaggacacgatgaaaatatctctaaagaagaaatcatctcgtccggattggttagtaaagaagattatgaggccatcgaaaaatacactcttgcccttttccaaagaggaacagagattgctgccaaaatgggattaattctcgtggacacgaaatacgaattcggtaaaaaagatggaaagatctatttgatcgatgaaatccataccccggattcttcccgttatttctatgccgacggttacgaagaacgcctagcaaaaggagaaagacaacgtcaactatccaaagaattcgttcgtgaatggttaatggaaaatggtttccaaggaaaagaaggtcaaactgttccggaaatgactccggaagtggtagccaacatcacaaatcgttatattgaattatacgaacatatcacaggaacgaaatttgaaaaagccgacagcacgaatattcttgcccgcatcgagaacaatgtaaatgaatgtttagctagcctgaaataa

SEQ ID NO: 820 - DNA, 912 bp, Unknown
  Unknown gut bacteria
cccatgcccctcttcgggttaggaacttatcaatccaaagcaaacgaactacacgatgccatcattagtgcgctgaaagacgggtacaggttgattgactgtgccgcctattataaaaatgaagaaatcatcggggctgccctgcaagaaacattcacgtccggactcgtgaaacgggaagaacttttcattacctccaaattatggaataataaccacgccccggaacacgtggaagaggctcttcgaaagacgttgctcgatctccggctagactacctggacctatacttgattcattggccgatagcgctgaaacacgacatcgaatacccgcaacaagcatccgacttactttccctcgaagaatgtccccttacggagacttggaaagcgatggaacaaatgcaggcaaaagggctatgcaaacatatcggggtttcgaatttcagcatcccgaaattgaaagaactgatcgccgtggcaaaaaataaacccgaaatgaaccaggtagagatccatccttacttgcaacaaaatgaattatttcaattctgtcagtctgaaggaatttacttgacggcttattcccctctcggacgtaatttacccatcaaaaacaaacccggcctgaccaatgaaccgattattatcaatttagcaaaaaaatataattgcacaccggcacaaattatcattgcttggggagtacaacgaggaatcgtgattatcccaaaatcagttcacccggagcgaatcaaagaaaacattaaatcactggacatcaatatttcaccagaggatatgaccaaaattgccaccctcgactcacacacccggatgactgatggttcggcttggattttccccaacggaccgtacacgatgaaaaatatttgggatgaaaaatga

SEQ ID NO: 821 - DNA, 942 bp, Unknown
  Unknown gut bacteria
ccggaggatgatgcctacttgaatgattttcgtacggtttcttttctggtgatccagaatgatagtatcgtgtacgaggaatatcggtccggttggaatgacacaaagacatccaatatattttcatcgaccaagagtatcgtggggttgttggtcggcattgcttatgacgaggggaaaattaccagtctggatgatccggtggggaaatatatcccggaatttaacgagggaaaaaagaaaaatatcacgattcgcaatctgttaaccatgagtggcgggttgaattgggatgaggcttacgcatcgctattttcggtaactacacatggctactacgggaacgatctttatgatttagtgactacgttggacgtgatcgaggaaccggggaaacaattctcataccggagcggggacacgcagattttggcttttgtcgtggagaaagcgactggaaagagcattagtgattatgccgaagagaagttatggaaaccgatgcaagcctgtcaggacgcttattggttgctggataaaaaggacggggacgagaaatctttctgttgttttcacaccacggcgagggaaattgcccgttttgcccgtttgatgttgcatcacgggaactggaacgggaaacagttggtttcggaagaatatattaacgaggccatgagtccggcggggtatctgaaggacgaatggggtaaggattctttggattattatggtttccagatttggattatgaactataaagggcaacagaatccctatttccggggaatgttgggacagtatattattgctattcccgaaaagaatgccataattgtccggttggggcataaaaaggacgaggaacgtatccgggagaccacccgggatgtgtatcgttacatggatatcgggacgaaaatattggataacaggaagtag

SEQ ID NO: 822 - DNA, 990 bp, Unknown
  Unknown gut bacteria
aaactggtttccattctaggccccacgaacatatacgggaaaggagaagataacaacaccctctactccgaggatggatggtatgattccaacttgggacatgccgaactatacaagaacaatcgggttacccacttgagttacgagggcgtggccgacaccatggtaatcgacagtataactggtatggcttatctctactggaacgtcacgctcgtggacaccgtgaacaacgtgattgtgaaaggtgaatacgcgcaaatggaccgggaacaaaacaaggcatttgtcaccgatagcgccctgttaatcatggtcggaaaacaagattctcttttcgtacacggagacaccctcttcatggatcaggactccgccaagaaccaaattttacgggcttactacaaagtcaagttctttagtcaggacttgcaaggattgtgtgattctatggtctacctttctgtcgactccaccatcacactctacaatgagccggtggtatgggccagcggaaaccaaatgaccgcagaaaagatttccttgctcacaggaaatggaacaattaaggaattctacttgaataccaaagcttttatggtatcccgaagggaggaaaccgaaatgtacgaccagatcaaagggcgaaatatgaccggttatttccgggataacgaactctacatggtgtacgtgaacggtaatggggaaaccatctacttccccgatgataaaggaaacatcattggtgttaacaccgccaatagctccaacatccgtatcatgatcgacaaacggaaagtcacggacatcgtcttcattaacaagcctgacggggaactcaatcccttgtttttggccgatcccgaagaagcccgtctgaaagacttccgctggttgaaatacatgcaaccattgaacaaattcgacatcttcaaagaaacccaagaacctgaacctgtcgagaaagaagaggaagaaaaagaataa

SEQ ID NO: 823 - DNA, 1044 bp, Unknown
  Unknown gut bacteria
atgcggttgcaggccgtgagtaaggtgattagtggaaaacctgcacaaccgattctggataatattttgttggtagccaaggacgatacgttgtacgccacggcatctgacaaggaaacaaccatggaggccaagatcgagttggataacctggaaaccccgggaagtatcacgatcccggcgaagttgttgttggatattctgaaagagttcccggaacaacccttgacgtttgatattaacacggggacgaacgaggtgaagattatctcggacaagggagagttttccgtgccgggagagagtgccgaggattacccggtacaatccggaatggacgagagtgtgaacacgattgcaacgaattgcggtatgctgttggagggaatcacccgtacggttttcgccacggcaaatgatgatttgcgtccggtgatgaactgtatcttgatggagatgggaccggagaatttcacgttcgtggcttcagatgcccacaagttggtacgttacaaacgttttgacgccaagacggacggggatcagtttgcattgatcttgccaaagaaaccgtctttgttgttgaagaatatattaccgaaggatgacagcgagttgcgtttgcaattcaacgagaaaatggcttgtttcactttcggaaattacaagatggtttgcaggctggtggaaggacgtttcccgaactacaattctgtgatcccgcagaataacccgaaaaagattattatcgagaagaaggagttgtataattcattaagacgggtttccgtgatggcaaaccaagccagtaacttggtgaagtttgacttgagcaacggaacgatcgtgatttcagctcaagacgtggattatgccatgtcaggacatgaaacgattacttgccagtacgagggagaagagatggccatcgggttcaagtctcctttcgtgcaagaaatattatccaacctcaacacggaatctttggtattggagttgtccgatccgagtcgtccgggattgttcctgcctttcgagagcgat

SEQ ID NO: 824 - DNA, 828 bp, Unknown
  Unknown gut bacteria
aactacagtattgacgttatcaacaactacgatgtagttaaaaacgtgaacttatccgtgaaaggactgccacgaggctggaattacgaattgaaagccggcacgtggaccattagtgaacttgcggtcctaccccacgagaaaaagaacgtttcgttaaaagtggacattccgctaaaagtcaacaaaggaacttaccgtttcacggtggttgccgagggacttggagaactccccatcgcaatcacggtatccaaacaaggtacctaccaaaccgattttatcacgaatcaacccaacatgcaagggaactccaaatcctcgtttaccttcaacgccacgctaaaaaaccaaacggcagaacaacagctctacgcactgatggcgcaagctcctagaggatggaacgtagttttcaaggcaaactacaagcaagccacatccgcccaagttgaaccgaatgccacccagaacatcacgattgacattaaccctccggccaacgttgaagctggaagttacaaaattccggtacgagccacgacaagcaccacctctgccgaactagagttggaagttgtgatcacgggaacctaccagatggaactgacaacaccccgtggcctgcttagcagcgagatcaccgcaggagataacaagaatatagatttaattgtccggaataccggatcggcagaactaaaggacatccagctatctgccaacaaaccggttgactgggaagtaaccttcgaaccgacaaaaatcaatcgcttgaaagcgggtgaaaccgctaacgtgacagccacggtaaaagcatccaaaaaa

SEQ ID NO: 825 - DNA, 1416 bp, Unknown
  Unknown gut bacteria
accggggctcttgtaattgtgggtatccgggtaattagtttcttgttgggacatacttattccggaatagtacgtttcactggaacggaggatgctttgcgcatctattacgtgttgacggcaggggagattgcccttcttttggggagtggcgtgtttttcttgttgtatgattatctttttataccggtttccgttttactcacggagtatgttcttctaaccagtttaatggttatgagccgggtgatcgtgaagaaagtgtttgcgcagtatattggtgccgaacgtactaaaaagaacgtaattatatgtggtagcgatgaatacggtatcatggcaaaacatgctatggataacgtggaggatgccacgtataatattcttgcttttgttgatgtaaatgatcggaaagcgggaaagattatcgagggagttaagatttacaaaatgtcatctttacccggtttattgaaacgtaaccgggtggacaaggtggttattgccaaaaagatgatttctcctgataaaaaacgggaaattgtcgagatctgcttggccgctgatgtgaacgtactcgaagtgcctcgttttgaaagttggattaacggggagttgagtatgcggcatatccggaatatcaagatcgaagatttgttggagagggacgtgattcacatggaggagaccaatcttcgaaaacaattattgaataaagtggttttggtgaccggagcggctggttctatcgggagtgaaattgtgcggcagttgacgcattttaatccttctttgattgttttgtttgatcaggccgaatctccactttatgatattgagctggaattgaaagaagagtgtggtttcacggattataaagtcgagatcggggatgtgcgtgatgcgagccgggtggaaggaatctttaaaacatatcatcccaatatcgtatatcatgcggctgcttataagcacgtccctatgatggaaaaacacccgattgaaggagtgaaaactaatattttcggaacgaaaaatgttgccgattgtgctgtgaagtatgattgtcagcgtttcgtgatggtctccactgataaggcagtgaacccgacgaatgttatgggtgcaagtaagcgtatcgcagaaatttatacacaatcattgaatcgcattgcgaatactcgttttattactactcgttttgggaatgttttgggatcgaatggttcggtgatccctcgtttcaagaaacagattgaggctggtggtcctataacagttactcacccggaaataactcgtttttttatgactatacccgaggcgtgtcaactcgttttgcaggcgggagcgttgggaaatggcggtgaaatattcgtttttgatatgggcaaaagcgtcaaaattgttgatctg

SEQ ID NO: 826 - DNA, 1467 bp, Unknown
  Unknown gut bacteria
atgaaaaattatttatttggaccgaatggattagctaccaagattgtacacacgagatacctgagtcgctggatcgtgatggggattgacgttgtgctttcaactttggtaacggtttttgcttactggcttatccggtttgtcagggaagaacctattgtttggtcgtgggttgcatatttggcattattggcggcggtcattagtgctttggcatttgccatattacatgctcatcgtgtcgtgatgcgtttcaccacgttacgggaaacttggcgtttggggatagcgatggctttgaaagtgatcattctttaccctttgattcatgtattctacccgcaggtatctaatgagagattgattttaggggctttgttggacatgatgacaactaccgtagtgttggtttccgtgcgagtggtgttagtgagcttgtatgactttttgaaagtccgtttacatggagaacaaaagcgggtgttgatcttcgggatggatgattgttctgcctccctcaatacggcagtttctaacagttttctgccatcttacaaggtaacggggtatttgactatcggaaaaagatataagcattaccggttatccggtgaatcagtatactttatcacgggagaagaaggatttaaccggttggtaaagcgtttacgggttgatggaatcgtgttcccgaattatcggaccgctcaggaggaacaaacacgattagtgcgttattgtcagaaattggagttggaaatgttggtattgccttccgtggaggagatgagtgatgggcagttgccgcgcccgcaaatgaaggaaatccgtttggaagaattgcttgggcgtgacgagataaagattagcatgaaggagattgcggaaggattggaagggaaagttgtcatggtaacaggtgctgccggttctatcgggagtgagttatgtcgtcaattgacacgtttcaatatcaagcaattgatatttctggattcggctgaaactccaatgcataatatccagttggaatttacggataagtttccgaagactccttttgtgcctgtgattggggacgtgagatctcttgatcgaatggattttgtgttccgtaattatcatcctcaagtggtattccatgcggcagcttacaagcacgtgcccttgatggaatcgaatccctgtgaagccgtgcgggtaaacgtgtttggtacgatgaatgttgcggatcatgccgtgaaatatggggtggagcgttttgttatggtttccacggataaggcggtaaacccgacgaatatcatgggagcctccaagcgcttggccgagatatacgtacaaagtttaagtgtggccattcgggatggtttgcaagtaggaaccacccgttttatcacgactcgttttgggaacgtgttgggatctaacggttcggtaattccgagattccgtgaacagattcgc

SEQ ID NO: 827 - DNA, 873 bp, Unknown
  Unknown gut bacteria
ggagcggagaaacccgtgcgggtgttgtccgtggagcgtattcgggaacgcctgactgttattcgggatcatggtattcgggatattcggttgttggatcgtacttttaacggatcttcccggagggcgatcagtttgctggagttattcagggagtttgctccggggatgcgttttcatttggagattcatccggcgttgctttccgatgaggtgaaggagttgttgcgggagttgcctgccgggttgttgcatctggaggcggggattcagagtttacgggagaatgtgttacaggcttgtcggcgaatcggtgatttgcaggcggctttggatgggctgcgttatttggcgtcattacctaatttggtggtacacgcagatttgatcgccgggttaccattgtattctttggaacagatgatcgaggatgtgcgagtactggccggtttcggaacgggagagatccagttggagttgttgaaattattacccggaacagcgatgcgtgcagaggcagaggctttgggaattgtctattccccggacgtgccgtacgaagtgttgcagacgaaagcgatgtcggtggaggatttgcgtcaagcccggttgttgtctcgtttgattgatggtttttataatgctttggcatggcaggaggtgactcgtaagttgatcgggcatgatgaatgttttctgtcggattttctacgctggatggaggaacgggagttgttggagcaaccgcttagtttggaacgacggggagcgttgttgtacgagttttgcgaggaacggtacccgatgtttctgactgatatttctgtagcttgggttgttgcggggattccttttgctaaggaaccgagtaag

SEQ ID NO: 828 - DNA, 1035 bp, Unknown
  Unknown gut bacteria
gacgccttcgaaaacccgaatacccaaatttccctgacagaagcaaagaaaatcgatgccgactacgaggtgggagaagaagtgaccgacgaggtaaaattcaaggatttcggacgccgttccgtgctggctttaagacaaaacctttcagcccggattcttgaactggagaaagatcacatcttcaccaaatacaaagagaaagtgggccagatcgtgaccggggaggtttaccaagtatggaaaaaagaaattttggtcttggatgacgaaggcaacgagttgattctcccgaaacaggaacaaatccccagtgatttcttcaagaaaggagatactatccgggcagtcgttattcgcgtggaaatgaaaaacgcctccccgtacatcatcctttcccgtacatcacccgtattccttgaaagattgttcgagaacgaggttccggaaatatttgatggcttaattacgattaaaaacgtggtacgtgttccgggagaacgtgccaaagtggccgttgaatcatacgatgaccgtatcgacccggtgggtgcttgtgtcggaatgaaaggttcacgtatacatggaatcgtccgggaactgagaaacgaaaatatagacgtgattaactacacgaacaacatccaactatacatcacccgcgcattgaatccagccaagatcaacaagattgaaatggacgaggaaaacaagagagcgaacgtttacctaaacccggaggaagtttccttggccatcggtaaaggcggtttgaatatcaagcttgccagccagctcacgggctacgagatcgatgtttatcgtgaacttgaaaccgcagaggaagaagatgttaacctggaagaattctccgacgagatcgaaccatgggtaatcgaggaactgaaacgcgtgggttgtgacacggcaaagagcgtgttagagttaagtgaatcagaattagagagcaggactgatcttgagatagagaccatcagggatgttctcaaaatattaagagccgaatttgaataa

SEQ ID NO: 829 - DNA, 738 bp, Unknown
  Unknown gut bacteria
gctccaaggcatttgcgagccataaaagacacggggaatcagttggtagctgcttatgataagtttgacagcgtgggcatcatggatagttatttcccgaattgtgcttttttcacggagatggagttgttcgatcgtcattgttcaaaattgaagaagacagacgaacgggtggacatggtatcaatctgtacgccgaattatttgcacgatgctcatatccgttatggtttgcgtttgggggctgacgtgatttgcgagaaaccgttggtattgaatccttggaatatagatgcattggaggacgtggagaaagagactggacataaagggtacacgatcctgcaactgcgtttacatgagtcaataaaagctctgaaaaagaagatcgaggaaggaccgaaagacaaggtgtatgacgtggatttgacttatattacttctcgtggaaattggtattacacgagttggaaaggggacgagcggaagagtgggggtgtcgccacgaatatcggggtccatttttatgatatgttgtcatggatttttggtccggtaaaggagaatatcgtgcatgtgatgagtcacgaccgagttgccggtttcttgggattggaaaaggctcgtgtacgttattttttgagtataaatgctgacaatttgccggaaaatgccgtgcaaggggagaaaagaacttatcgttctatccgtattgagggggaggaatttgaatttagt

SEQ ID NO: 830 - DNA, 1365 bp, Unknown
  Unknown gut bacteria
atgaaacaaacattaacagttaacctttccacgatcgcttctacggaaagtaaaattaaggtcgattatttcgacacgagcgtagaggcgttcgataatggagaatatttgcagtcgttctatgctttattggattatgtgaacgacgaattccgtgagaaatacggaaacgtgaaaggaacggaatttaatattcctcatggttcaatcgtggtgaatataaagatcgaagatgatcgattgttgattcacgcaccgtttctctctttgccggagaagaatcgtgttcccttgttacggcaggttgcaggcttgaattttaacgctatggacttggctcaagttgagttgaaaaaggatcgattggcattcgagtacacttgcccgctggcactggcaaatcctgacaaggtttattatattcttcaggagatttgtaacacgggagacaaatatgacgacgagttcgagaccaagttcggggcccaacggatatatgaaccgaaggtaaccccttttgacgatgagacgctgaatatggtttatgaggtggtacaattgagttgtaaggagtgtatggatgcagtgaaagatttcgaggcggaccggaaatacgggtttgcgtggaacgtgctggatacgacgatattgaagatattgtattacgctcacccgcagggacagttgttgaacgatttgaataaggccgtttccgagatggatcgggaagatattccgttgccggaagtggtgaattacgggaagtctgtcattgcccgcttgcagggaatgacgaaagagcaatgggctgaggatttgtactacgtggagacctttatttcggataaacgtcgttctaatttgaagaatatccaggagaatttcgagaattcatacaatcgtgccacccaagcgtttgaaacgggtgattacatgacgtgttgcttgatgattgtatacaaattctacgagatgtactattataataacgtgcaggatgacgtgaatgcggttgtggtgcgtgccttggaaaaagcttctgccaaaccttgggatgaggcagccccgatcttgcatgcggccatggataatattatggagggagagttggaaccggatgatgacgacgacgaggaagatgaatttgatatgtcccagatgatgcaaggaatgcaacaaatgatgcaacaaggaatgcagcaagcggcacaagccatgcaacagggcggtggaatgatggagtatatgcagaaggtgcaggagttgcagcaaaagttagctgccggacaggtgagtatggaagattatatgttgaaggtacaacagttagccgccacttatatggggaatggtcagcaacaataa

SEQ ID NO: 831 - DNA, 1272 bp, Unknown
  Unknown gut bacteria
atgtttgataaaagcgtgtatgtaaatagaagaaagcaacttatcgacaagatgagtggcggcttggtattgatactgggtaatgaggaagctcctgcaaattatccgtctaacacgtataaattccgtcaggatagttctttcctttatttctttggtttgaacatgcccgggtttgccgggttgatggacgtggattccggggacgtttgtctgtacggaaacgacgtggacatggacgatattatttggatgggaccgcaaccgagcgtgaaggatttggctgccagcgtgggtgtgacttgttccgctcctttcggtaaattggccgaggctttgaaagaggccatcagccagggacgcaagattcatttcttaccgccttatcgttatcacaacatgttattgttggaggatttgttgggtattcatcactcgctgattaagaattactcttctttagaattgatcaaggccgtggtggcattgcgttccgtgaaggaggcttgcgagatcgagcaaattaacttggcttgtaacattggttacgagatgcacgtggctgctatgaaacatgcgttaccgggacagaaagagcaatatattgccgggttgattgagggaattgcggcttcttacggaagtatggtttctttccccgtgatcctttcccagaatggcgagacgttgcataatcacgatcatagtaagacgttgaccgtgggacgcatgatgctgacggatgccggggcggagaataatatgaattattgttccgattttacccgtacggttcccgtgggaggacgttttgatcaacgtcagaaagatgtatataatatagtattggattgtaataataaagcgatggagattgctcgtccgggagtaacgtaccagtacgtgcatctggaagtttgcaaggttttggctcaagggttgaaagaccttggcttgatgaaaggcgacgtgaatgctgcggtggctgccggggctcatgctttgttcatgcctcacgggttgggtcacatgatgggactcgacgtgcatgacatggaggatttgggacaaatttacgtggggtatgatgacgagactcgtccgattgaccagttcggtacttcttccttgcgtatgggacgtaagttacaaccgggattcgtggttaccgacgagccgggttgttatttcattcccgctttgatcgaccagtggaaagaacagggattgcacaaggacttcttggtatatgacaagatcgagacgtacaag

SEQ ID NO: 832 - DNA, 1617 bp, Unknown
  Unknown gut bacteria
ctttacgaggagtacggaaccgggttcttcaacaagttaaacggtattttcgcttttgccctactggatcaaaacaataaccgtctgattctcgcacgggatcatttcggaactaaacctctacactatttcctaaaagatggtgtattagttttcggttctgaacaaaaatccattatcctacacccgaaatatgaacggaaattaaatttaaaagctttacatatacacttgaacttgcgttacacgcaagggaatgagactctttttgaaggcatcaaacgtcttcccccagctcactttgccgtgtttgaaaatggtctgttcacggtaaaacgctactggcagctggctgtgaatattgatcgatccatcacggaaaacgaggcgaaagagaagatgaacgaattgatcaaacaggccgtgaaacgccaattagtcagtgatgtcccagtaggcgtgtatttatcgggcggactggattcctcaacaatcgtgcagaaaatgcatgaactgggagtccccgatatcaacacgtttaccctaggttttaatgagcccacggacgagtttcccgatgcccaacagattgctgatcactttcacacgcatcatcacacgttgagtctgtcgatgaatccgatgcaacaaatgcccaaggtaatctggcatgccgaggaacctaaaattaacttgttgcagggattcaatatgtcagcttttgtccatccaaccgtgaaagttattcttggaggactaggcggagacgagctatttgccgggtatgatatccataaattcatttacccgttcaaaaactggcatcaccatactccacaatggctgcaacgtatgttacgctggaaatcagattttattttccgtcttcagaataattctaaatcattacgttacgacgaataccgccggggcgtacaaatgttactgtctattgggaacgtggaacgcttttacctcatcctgcgaaacacgtgggatttcgataccccgttctacaagaatatctattcggaatcgttcttgaaacagcaagaaatagaacaatttaaggtacataaagaatttgacaagatttttgaatctgtacaccatcagaacgggttggatcaagtgttatatgccgaattccaatccaaaatggtaaacgattatttgcttacagatgaccggatgtccatggcccattcggttgaagaacgaattcctttccttgaccgggatttagtagacttcggctttactctccccgtggagatgaagatcaaaaataaccaaactaaaaatcttttccgggaagccatgaaaccatatcttccccccaagattatcacgaaaaagaaatggggattcacagtgaacccgtatctacaattcaaaaaggatttaaaagatacagccgaaaagattcttacaaaagaatatatcgagaaacaggggatattcaattatgactatatccgctatatcctgaattacccggcacacccgaaactccggtggcactacaattttatctggatcattttgggactggcaatttgggaacaggagttcatacacaaacgagtagaagataacctcgaagcttactattaa

SEQ ID NO: 833 - DNA, 1212 bp, Unknown
  Unknown gut bacteria
ttgattaatacattaattgatcaggtagtgaatactgagttagtcatagatgtaaaagcggaagaagtagtaatcgccttgttaaaggacaagcggttggtagagttgacaacggagaagactagcgttaaatttgcggtaggtgacatctattacgggaaagtgaagaaaatcatgcccggtttgaatgccgctttcgttaatgtcggctatgaaaaggatgccttcctgcattaccttgatctcagtccccagttttattctttggatagctatataaagcaatgtatagcccggaaggggatgcctgtagccaagttaaaactggagccggaaatcagtaaaaacgggaagatcggggacgtgctttctgttggccaatatgttgccgtgcaggttgcgaaagaacctatttctaccaagggaccgcgtttgacctccgagttaagtattgccgggcgtcacctagttctgatgcctttctcggaaaaggtatccgtgtcacaaaagataaaatcggttgaagaacggaagcgtttgaaaagactgattgaaagtatacgccccaagaatttcggggtgattgtgagaactgtcgccgaaggcaagaatgccgagttattcgatagtgaattgacggaacttgtagagcgttttgaaactgcgttcaaacatcttcgggatatagagcctcccaagctaattttgggagagatagaccggaccagtgttattctccgggatatattgaatccctcgttcgagaacatttatgtgaatgatttagcattgagtaaagagattaagcgttatatcagcacgatagctccggagaaagaaggtatcgttaaatttgtgtcaaccgaggtaccgatcttcgatcattttggggtggacaagcaaatcaagtcttcgctgggacgtaccgtttcgtttaaaaacggggcatacctcattatagaacacacggaagcttttcacgtgatagacgtgaatagcgggaatcgtgtgaaattgggcgacgatcaggagtcaaatgctctggaagtaaacttggctgctgccgacgaggtggctcgtcagttacaattgcgagacatggggggtattatcgtgatcgactttattgatatgcaacaggcggaaaaccgccagaagttgttcgataagatgcgttcggcaatggaactcgatcgtgccaagcataccata

SEQ ID NO: 834 - DNA, 1053 bp, Unknown
  Unknown gut bacteria
atggatgtattagtaaagatattgcagtttttgttgagcctttcgattctggttatgttgcatgagttggggcatttcgtggcggcaaaaatatttaaagtacgagtggagaaggtttttattttcttcaacccgtggttttccctgtttcgttttaaaaggggagaaactgaatacgggatgggatggttgcctcttggcggatacgtgaagattgcaggaatgattgacgagtccatggatctggagcaaatgaaagaaccggcaaaaccttacgagtttcgttccaaaccggcttggcaaagattgatcatcatgatcggtggggtacttgttaattttatcctggcgtttttcatttacatcatgattctttacgcatggggagagcagtacttgcctaccgagaatgcgaaatatggagttgtatgcgactctttgttgcttaatgccgggttgcgaaatggagatatgatattatccttggacaataaaaaagtagagaatttctttgaaattccgggatatattttaatggagaacccgaagactatacaggttatgcgggatggtcaagtgatgaatataaatcttccttctacgctaatcggggagatgctggcctattcctcgaaagggtttaagcggatagctttactgacacctcgttataaatatgacggttcgatacaagggtttgccgatgaatcgcctgcccggaatgccggaatgctggaagaagaccgggtgttggaattagacgggcattcgtttactttctatgacgagtatattgatttgattcgttcacaccgggacagtatattgaatgtaaaagtcttacgtgggagtgataccctttctatccctattgctctcggaagtggtaaagtgatcggggtgtatccgaaagtgataaacgatttcgagtacgccgtgaaagaatattccttctttggtgctattcctgcgggaattaatatggggtttgactggatcaaatcctatctgaaacaattcaaattatttaaaaacccggaagctttcaggtcc

SEQ ID NO: 835 - DNA, 1014 bp, Unknown
  Unknown gut bacteria
gaaacagaccagaatattgttgaaaaaagtattcttcactcattattggcagaactctaccaaatgtacttcaatacccaacaatataaaatcaaccggagaaccccaatcacgggttacgtacctcgcaatatggcagaatggacagggaatatatatagagaaaaaatattccaacacgcactggatgcagtaaaagcccgcccccaactcaccgaggttaattgcctcacgtacaaagaaattctcgtactcggaaaaaattcaccggcacttcgtccgacgatgtacgatttccttgtgtatcgcagtattgacatattaaacactatttctcgttacaataaacaagaacctatcacgaacaagcaactactgttcgccccagtgaaagaatttgtacaaatgcccatcgaagtaaaaaagatggatgcttattcaaacacgctcaaactttatcaatcgttattacaatccgagatcgcagctgaacgcacggatgcaattcttatttccgacctagaccgtttggagtatgcgaacaatatcatcggtttaagtcagaacgattctttatacattcagtctttagaacaattgtcacaacaatatagcaaaaacccttacaaagttgaaattctctacaaacttgcccaatattattaccagggaaattatatttcaagcaatagagatcctcaaaaagccttggatatatgtaataacgggatacgccagtttcccaagtatttccggatagacgttttaaaacaattagccaaggaaatcacccaaactaccgtatcttattctataaaccccaacgtgtacccgggacacaaacaagaggtgaacctttccttcaagaacttatccgagatttcaatctcgctgtacaaaatctcggaatccactctggaatacttgaatttgaacaaaagagttccaaaacttgaaaaaatatcaactcacacgtatcgtcttcccaagcgattggattctcaggacacgatt

SEQ ID NO: 836 - DNA, 1359 bp, Unknown
  Unknown gut bacteria
gcttatttaaaagtaaacgatgcaaattctctatcatacagcaactttgacatcagtggcgaagtcgtgcaacaaggaataaaaggtttcatttatggagaacggggcgtgtggcgtccggggaatgaaatacacctctctttcatgctggaagacaaagagaagacaattcccgtgggacaccccatcattgccgaactctacgacccgaatggtaacgtggtacaaacgaaacgggaaggacgtaacgaacacggtctctattgtttcaccttcaaaacagacgagcaagccgtcacgggttactggcgggcagttgtacgtatcgggggagtctctttctggaaaaccatccggatcgaaagtatcaaaccgaatcgcctcagtatcgtgaccaacctgccgaatgacattctaggaaatggtatcccggataattccattcccgtgcagacacgttggttgcatggagccaaaaccagctcgctgaaagtcaacaccgaattaaagttatcccagagtaacaccacgttcccgggatacaaagaatatagttttgatgaccgatcccgttattttaactcaaccacaacgaccttttttgaaggaactactgatgcagagggtaattttaccctatcggccgatgaaatcagcacggaaaacgcaccgggaatgttgaatgcactattcacgctgcgggtattcgaacctggcggggacttcagcataacgacagttggattcaaatattcaccttataaagaatatgtcggcgtgaaactcccagattccgaggataactggtactccgctggcaaaccgatccccatcgcaggagccgtgcttacggccgacgggaagccggtttctgacagggaaatcgaagttgaagtttatacattggaatggcgctggtggtgggattccgaaagggacaacatcggatcatacgtgaaccgctcctaccgtaaaccggtcttcaataaaaccgtgaaaagccaaaatggcaaattcaatattgacgttacctgcaaccaatggggacgctactacgtgatcgctagagacaaattctccggccactcttgtggaacgaccttctacgtaagttcttggcggaatgacatgaacattccgggtatggccaccctactcacgttgaccagcgataagaaagcataccgtgccggggagaaaataaaaatcaccttcccttcttccgagggtagcgtggcactcgtgagcgttgaaaacgggaaaaccgtaaaagacatattccgtgttcccacatctgccggctccacctctttcgagatcgaggcgaccagtgaaatgtgtcccaatatctacgtcaat

SEQ ID NO: 837 - DNA, 678 bp, Unknown
  Unknown gut bacteria
ttttctttgttattgttgctgttacagctaggggttcatgaggtttcgtggggatacgtggttgtggctttgtttttcgggttggccatactcaatatatataatttcatggatggtataaacggtattaccggaggatatagtctggttgccatgttggcgttatgggggatcaatgcatttgttttcccgatagcgccggcggggtttattcctgtggtaatactgtcattgctagtgtttaatttttataatttccgttctcatgccaaatgtttttccggggatgtgggagcgatatcaatggcttttattatactctttttgttgggtggctttataatacataccggtcacgtgtcagcattagtgtttttggcggtttatggagtggatggtgtgctgactattatacatcgtatcttgttgaaagagaacattggtcaacctcaccggaagcatttataccagttgttagccaacgagggaaagtttgctcatttgcctgtttctttgatctacatgggtgtacaggctgttgttaatttggggtatttgttggtgttggtgtatactccagggtatacattgatttattttattatttctatagtggtgctggtggttgtttatttacctttgagacgtaaattttatgcgttacgagagcaagtatga

SEQ ID NO: 838 - DNA, 678 bp, Unknown
  Unknown gut bacteria
ggagccgggatgtttcaatatatcacgttccggtcagcctgtgcggtgattttgtcattgttgattgccacggtagtgggaaagcgtattatccgcatattacagaagcaacaggttggggaggaaatccgggacttgggattggaaggtcagatgcagaagaagggaacaccgacgatgggcggggtgattatcctgctggcgattctggtgccagtgattttgtttgcccggttggataacgtgtatatccagttgatgattgtttctacgatctggttggggttgagcggttttctggatgattatatcaaggtgttccggaagcacaaggaggggttgaagggacgtttcaaggtgatcggacaagtgggtctggggctgattgtgggggtaactctttacgtgagcgatgacgtgctgatccgggagaaggtttccatttcggaagtcggggtggtaaccagcactgtagatgaggggtttgtgtccgagaatagccagacggttctgacgaaagatattaaatcgaccaagacgacgattccttttttcaagaataacgagtttgattacgcttggttcggggcgcttttcggggactatgccgaggagatcggttggatcgtgtttattattatcacgatcgtgattgttacggcgggggtgggggggggg

SEQ ID NO: 839 - DNA, 741 bp, Unknown
  Unknown gut bacteria
ggcgtgttacaaaaaacgattcttttcccgcaacatgccgggacgttaacgatagagccttacgagttgtattgtcttgttcgccaacgggtggggagtcgtggtggaagtatctttgatgactttttcgggaattcccgtgatgtccgagtactctgcaagagtaaacccgtgaaaattaccgtgaaacctttacccgaggccggaaagcctttaggatttagcggtatggtgggaacccttaccatgacaacctctatgtcaacagataccttgaaggcgaatgatgcgttaacgtacaaggtggtattacgcgggaatggaaacatgaaattgttagaggctccgaaaatcactttcccgcatgattttgacgtgtacgatccgaaagtgaccagggatataaacggaacgtccggaactgttacttttgaatatctcgtgattcctcgttatgcgggagattacaagattccagccgtgcaatattcctattttgacccgcaagccggggcttataagatgttgaagggaaaggagtatgctgttcgggttgaaaaaggaaatgaatccagtcaaggatctggggaggcagccttacagtcattcaagaaagaagatgttaggatgttgggacaggatattcgctatatcaagacacacaagaacgatctccgtccgaagggcgtgttgtatttcgccacgatggaatactggttgagtttcttgattccttttgta

SEQ ID NO: 840 - DNA, 678 bp, Unknown
  Unknown gut bacteria
aaagagtatatcgctcgcctgattcactcgatgagtaaccggaaggatgggcctttcgtggcggttgattgcggggcgataccgaaggaccttgccgcacgtgagttcttcggacatattaaaggttctttcacgggcgctgttaccgataaacaggggtatttcgtgaccgcatcggggggtccaattttcttggatgagattggtaatttgccttatgacgtgcaagttcagttgttgcgcgcgctcgaagagcgaaaggtgcatccggtgggtgggaatgttgatattccttttgatgttcgtattatttcagccacgaatgagaatctcaaagaggccgtcgcaagtggtcgtttccgggaagatttgtatcatcgtttgaatgaattttccattcaggcattgccccttcgggagagaaaggaggatattctgatttttgccaatcatttcttggataaggcgaacgaggagttggggaaacaagtggctgggtttgatgaggaggttatgcgtatttttagaacttactcgtggccggggaatttacgggaaatgcgtaatatcgtgaaacgggcgacgttgttgtgtatggggagtttgatttctaaaacttgtttgcccccggagttggagcaaaaacccgtggagcctgaaaagacatctacaacacgg

SEQ ID NO: 841 - DNA, 1158 bp, Unknown
  Unknown gut bacteria
atgctggcctcgttgatcgtggtgtattcttcgacggggagtctggcgtttcgtgtgcggggagggaataccagttattatttgattaagcagttgtttttgatgttcgggtgtatggtggtgattctgacattgcagtcgtttcactacaagtacttcctttcgtttgccaagatcgtactggggatgtcgttgatatttctgttgtgggcgaagtttgcgggtactacgttgaatgatgcggggcgttgggtgacggttccgggaatcgggttcacgttccagccttcggaaatggcgaaattggggattattatgtactgtgcccgtgcgattgcttttgaacagacggaggagtgttgtagcaataatgtgttgtggcggatgacgttggtggtgccggtgctgttcttaatttttatggagaatttctcgacatcggcgttgctgggtggggtttgtttggtgatgttgtttgtcggtcgtttatactggaagacttatgcgaagttgataggggtgatcgtggggttgctgattctgatgttggcggttgtctttattgttcccgaaaagcatttaaagtcagcgggacgtttgctgacggtaaaaagccgtatagagcatttcgtgaacccgagcgagacggacagtgacgattcgtaccagtctgatcaagcgaagattgccgtggcaaaaggaggattgatggggctgggaccgggaaatagcgtacagcgaaatttcctgcctcacccgtattcggattttatatttgctatcattgtggaagagtatgggctggttggggccgggatcgtgatgttactttacctgattattttgtatcgtgtaggggtgatcgtgcgacgttgtacgaggatgttcccggcgattctggtggctggattagggttgtgtattgtgtttcaagcattgattaatatgggggtttgcgtgggactttttcccgtgaccgggcaaccattaccgctggtgagtatgggggggacttccctgttgtttacgagtgcttcttttgggatgattttgagtgtcagtcatacattctcggaagagggagaacgggaagagaaggagaaactaaagatggctgctcaaggtataaacgaggaagaagagaacgaggaaaattga

SEQ ID NO: 842 - DNA, 522 bp, Unknown
  Unknown gut bacteria
gttcgggctttagtcaaaggggccgtggatatgcgggcgtacagcaaaggtaacggggcagaactttccgccacttatgctgctgttcggaacgccctctacgaaaaggggtacgtgatcgagatcacggtgaacttcaacccgaaactgcattacgttgccgaatggtggaagcagctttacggggaaagcgagggaaaagagaataagggtatattccccgccagcgttgacttcacgacagatttgcactccatgggacaatacatacaggaaggacgtcgcaatctgttcgagacagtcctttccatcgataaaacgaaatacagcttgcaagtgccttgcgatgctcatgacctcgataaactgaattatctggccgggaaacgcgttgatgaggtaaacaagatggctgaactgggaacccaactcgcccacgtggacggtggggtaccgaatatccgggtcattatcccggaactgacggagtactacttgggtcagctattctatttctacgag

SEQ ID NO: 843 - DNA, 588 bp, Unknown
  Unknown gut bacteria
atgagcgaatatttttacacgaaaaaagaagcagaaaaagccattcttgtaggtgtagcactacaatcagaaaatatcagctacaacatgatgtgtgaatacttggacgaactcgcattcctagcagaaacggcaggagcggaaactgtgaaaatattcacgcaaaacttggataagccggtaacggctacctttgtcggtaaaggaaaattggaagaaatcaaaacatacgtcgaagataacgatattgacttgattatttttgatgatgaactaagtccgacacaaatcagaaacctggaaagagaactaaaaggcagaaaagtacttgaccgcaccaacctcatcttggatattttcgccaaaagagcccgtacggcagaagcaaaagctcaagttgaactggcacaatatcagtacttacttcctcgtctaacgggtatgtggacccatttggagagacaaaaaggaggtatcggacttcgcggtccgggtgaaagtgaaatcgagaccgacagacgtatcatccgggacaaaatcacccgcttgaaagagcagttggccaagattgacaaacagatggtcacg

SEQ ID NO: 844 - DNA, 672 bp, Unknown
  Unknown gut bacteria
atgaaagtcccctgtacccaaggagttttatctattaaatttaactgggcagactacatgatgattgacgatcgttacgtggaagatacccgtctacataacaaatccgctttcttaaaaataaaacctcatcaacgctgggaaatcattgtcggccttgaacattgggctcaatgggcaggaacctctcccgatagaggcaaacaaccttcatcattcaaggattatatccggatcatttgtgccaaagaaggaggaaccggggccagtgtaagcgattcgattaacgcattaggaaatcacctgggaagggaacatttggccattaattatttggcagacaactatattttatctttctaccacgacatcccttttgaagatggttcgggtacggattttcgctctttcccggatggaacttattgtttctattatggttccaagaaaaaggatcaatggattacggacgttatttacgaattctattacacaaaatatcaatccggttcccggcacgaccgtcctgcaactccggaagaaatggaaaagcaagacccgaacagccatttttatggccgaaaagtccttggtggatgtgataactatttcaacaacggcgaatacagaagcggatggaccttatacgagagagtcatcggtagcccattc

SEQ ID NO: 845 - DNA, 543 bp, Unknown
  Unknown gut bacteria
tcggagcgactggtaaagaaagggtatatcacaccgattcatgatcttgtaatcgaacaccccacgcttggtaacatcacagaagaaatcctagaagatgataatcacacgatcctcgccgtagcatacaaccttacccagagtgacgtgcaataccaacccgctatcaaccgactggcagagtatgcccaagagaaaggaattcgtttctatgggttaacctcatcctcggaacgagacattgaaacatataaaaagcggtatcacgttccctacgaattttgtacagctgacgagattcagttaaaaaccatgattcgctctaaccccggcgtgatcattctccgggaaggcacaattctcgacaaatgggccggaaaagatgttcccgacgtgaaagaattacaggataccgacttgacagcttattgcgtgtattcaagggaacaaatgcaacgaatttatttggtttactccattatccttcttttctttgtagcatatttactgattccacgtagaaaagggaaaagaaacaattaa

SEQ ID NO: 846 - DNA, 624 bp, Unknown
  Unknown gut bacteria
aaaaactatatcaccgacccggaacaaaaacaacaggtattccaaaaggtaaatcattacttcgaggctttatggggacattttaacgaaatcacgcttcaacttcaattaaacttgcatcaggacaacggccctcttcatgacatagatcccatgttcggagcttacagtcccggctctcatttgattaatgatttttacaacaataaaatcggctttatcattgccctcaatttcccggaagtacctttacaggaaaaagaaaaactaggtaacgaccgtatggcttgggcctatgctcgcctcggagacgtgtttacccaacgggttccggcagaactaatccaagctggtgtgaaagcggaaagtgatgcagacgtgtatatttcaagttacaacatttatatgggccacgtgctaaacgccaaaggacaaaagcttttccccgaagataaaattttgcttactcattggaatttaagagacgaaatcaaggccaactacaacaaagggaaagaaggtttggacaagcaacgtaccgtttatgaggttatgaaacggattatctcgcaggagatccccgtgcaagtcatcaattccggagcttacgactggaatccttac

SEQ ID NO: 847 - DNA, 1278 bp, Unknown
  Unknown gut bacteria
ataaaagggggattaaaaggattggtcatcggtcatgtgttaacttgcgaggcacatcccgattcggaccatctacacgtgacgactgttgatttgggaacgggtgaaccggaacaaatcgtctgcggggcccctaacgtggctgccggacagaaagtagtcgttgccaccgtaggaacaaccctttacaaaggtgatgaagagttcgtgatcaagaaatcaaaaatacgaggtgtagcctctaacggtatgatctgcgccgaagacgaaatcggtgtcggaaccgatcatgccggaatcatggtattacccgaaaataccccggttggaataccagccgcagactatttcaacgtttaccgggacacggttatcgaagtcgatattaccccgaaccggattgacggagcctcacatctcggtgtagcccgtgatctagccgcttatttacaacagacacaagatattcactatactcttccctccgtggaaactttccaaccggacagtacggatgctaaaatcaccgtacgagtagaacgtccagaagcctgccgtcggtatgccggaatatgtattgaaggagtaaccgtaaaaccttccccggaatggttacaaaaccggatgaaagccatcggattacacccgatcaacaatatcgtggacgtgaccaactacattcttttcggcctaggacaacctttgcactctttcgataaagacaaagtaaaaggcaacgaggttatcgtgaaaagtgttgcccaaggaactaaattcacaactctagacggagtggaaagagagttacacgaggacgacctgatgatctgtaacaccgaagcccccatgtgtatcgccggggtatttggtggacaggaaagcggtatctcagacacgacaacaaacgtgttcttggaaagtgcttgtttcgacccggtatttgttcgcaaaacagctcgccgtcatggtttgaacacggatgcctctttccgttatgaacggggaacagacccgaacatcgtgatctacgcactgaaattagccgccatgatgattaaagaagtggccggaggtaagattacttgcgctcccatcgacatctacccggaacccgtgaaagatttcgacgtgtccataaaatatgctcatgtggatcgattgattggtaaaaaaattgaccatgaggtaatcaaaaacatcctccgttctcttgaaaagaacagcgtggaagagtgcgaagagggtcttttattgcatgtccccccctaccgtgttgac

SEQ ID NO: 848 - DNA, 810 bp, Unknown
  Unknown gut bacteria
atgatgaaaaaattaaacattgggaatctctcgatctcagttcccattgtacaaggtggtatgggtgttggtatatcactttcaggattagcgtctgcggtggcaaatgagggaggagttggtgtgatttccagtgcgggattaggtttgttatatcggaatttatccaaagattatattcaggctagtatcatgggtttgaaggaagaacttcgtaaagctcgtgagaaaacaaagggtgtgattggcgtgaatgtcatggttgccatgtctaattttgcggatatggtgaagactgcgattgctgaaaaagcggatattattttctccggagcgggattgccgttgaatttgccgagtttcttgcaaaaggatagcgtgaccaagttggtaccgattgtttcttctgcacgtgccgcaagggttattaccgagaagtggcataatttgtataattacctgccggatgcgtttgtcgtggaggggccgaaagcggggggacacctagggttcaaggacgagcagattaatgatgaacatttttcgctggaacatatcttaccggaagtgattgacgaggtgaaggatattgaaacgcattacgggaagaatattccggtaatcgtggctggtggaatttacacgggtgaagatattaaacgttttatggatatgggagcagctggggtacagatgggtactcgtttcgtgaccacggaagaatgtgatgcctccgatattttcaaacagacttatatcgaggcaaaacaggaagatatacaaattatcaaaagtccggtgggaatgccg

SEQ ID NO: 849 - DNA, 744 bp, Unknown
  Unknown gut bacteria
aagatgtccgaggcgattaaagaatataccgggtttgacatcacgggtaagagtgaggaggagatccgggcattctgcctgtctatcggtctgaacgtggacgaaaccatgggtaagggtaagttgattgacgagatttttggagagaaatgtgaaagtcattatatacagccgacttttatttacgactatccggtggagatgtctccgctgactaagatgcatcgttcagatcccggattaacggagcgttttgagttgttcgtgaatggtaaggaggtggctaacgcttattccgagttgaatgacccgattgatcagttgaatcggttcaaagatcagttggcactccaagagagaggggatgatgaggctatgtttatcgattatgatttcgtgcgtgccttggaatacggtatgcctccgacctcgggaatgggtatcgggatagacaggctttgtatgttcctgaccaatagtccatctatacaggatgtgttgttgtttccgcagatgaaaccggagaaagtggctaccgtggatgctgacgagaaatttatcgagctggggatcccggctgattgggttgctgtggttcgtaaggccggttaccagaccgtggaagccttgagggcggtagagaacccgaacaagttgcatcaggaattgagtggtttaaataaaaaaatgaaattaggcttgaaaaccttatctccggacgaggtaaaaagctggtttaactaa

SEQ ID NO: 850 - DNA, 777 bp, Unknown
  Unknown gut bacteria
gcaagcctgaaaaagttgggaaggcatgaggaggcgttactctggtatgaagaggttttaaaggaattgccggattcaagtaggcttggacgttacgggattcaggtagccgaggcttattctggattggggtatcacgaaaaggcacgggaaatattgaggggcgggttgatgaatgaaaaacgaggtggaatgcgcaacgtgttgcttactcgtgttgccgaatcttttattcaggagggacttcgagattcggctttgatagcattaaaaagtgcgatcgatttctacgagatatatgctcgtgaaaatcaattgaaggttcccggtgtggtgttcatgaattatttaagatatgggcgttgtttgtgggagatgggggagaaggatgaggctattgcgtatctggaaggtattagttataaaaaagcagaatccccggagagtcaattggttcaggctcaggtgttggaattgttgagcgaatatcatgaggatatggaaaaccggcaggcgttttgtgacgtcttgcatcgacgggattcggttttggagttgtacgattccttttatgataacgggcgttatcgtcaggtgttgaaaaaatacaagaatcaaaaatttctgcgggagattgaagagatgaaccggaaacaggagtctgccaactggtggttggtgctggcattgcttgtgaccgtgggattgatcgtttcggccttgatatatacctgggtttcgtggggaaaagaaagagagtataataagagaaaatag

SEQ ID NO: 851 - DNA, 3036 bp, Unknown
  Unknown gut bacteria
cccggcagcaccgaacccctgaaggacggcgaagaagcgctggcaaaggccatcgagtttggcttccccatcatcctcaaggcggcagccggcggcggcggccgtggtatgcgtcgctgcgacaagcctgaagaagtcgtggcagcctatgacatggttcacagcgaagccctgaaggcgttcggcaacggcgacatcttcattgaaaagttcctggaacgtcccaagcacattgagatccaggttctggctgaccagtacggcaatgtcgtccacctgttcgagcgtgactgctctttgcagcgccgttaccagaaggtcgtggaatacacccccgctttctctgtggatcagtccatccgcaacgccctgtatgaagacgccatcaagatctccaaggccgttggcttcgtcaacgccggcaccctggaattcctggtggacagcaagggcaaccattacttcatcgagatgaacccccgtatccaggtggaacataccgtcaccgaaatggtcaccggcatcgacctggttcgttcccagatcctcattgcggaaggccgtcccctgagcgatcccgccattggcatctccagccaggctgacgtgaccacccgcggctactccatccagtgccgtgtcaccaccgaggatcctgccaacaactttgcaccggacaccggtaagatcaccgcttatcgtaccagcggcggtttcggcatccgtctggacgcaggcaacacctatgtgggcgcagagatctctccctactacgacagcctgctggttaagatcaccaccctggacaacacctttgagggcgcttgccgcaaggcactgcgtgccctgagtgagaccagaatccgcggcgtcaagaccaacatctccttcgtcagcaacatcctgtccaatccggtcttccaggctggccagtgctacaccaagttcattgatgacacacctgagctgttcaccatcagccagtctcagaaccgtgccaacaagatgctggaatacatcggcaacatcgttgtcaatgaccccaccgcaggtcagaagctgtatgagacgccccgcttccctgacgtacccgaaggggatcccaagcccggcctgaagcagtacctggatcagaacggccccgaagccctgagcaagtgggtgctggatcagaagaagctgctggtcactgataccacctgccgtgacgcccatcagagcctgctggccacccgtatgcgtacccgtgatatggtcaagtgcgcaccggctatggccaagatcctggcagactgcttctccctggagatgtggggcggcgctaccttcgatgtggcataccgtttcctgaacgaatctccctgggaacgtctggattggctccgtcgtgagatccccaatatccccttccagatgctgctgcgcggctccaacaccgtgggctacaccagctatcccgataacgtcgtccgtgaattcgtccgtctgtccgccgagggcggcattgacgtgttccgtatcttcgactccctgaactggctgcccagcatggaagtcgccattgacgaagctctgaagcagaacaaattcgtagaaggcaccatctgctacactggcgagatcaccgatacttctcgtaactacaccttgaagtactatgttgacatggcaaaggaactgaaaaagatgggctgccactccattgccatcaaggatatgtccggcctgctcaagccttactccgcaaaggttttggtctccggcctgaaggacgctctggatatccccatccacctgcacacccacgacaccaccggcaaccaggtggccaccaccttgatggcagccgaagccggcgtggacatcgcagaccttgccatctcctccatgagctccctgaccagccagccctctatgaacgctgtggtcgccgctctggaaggacaggaacgggataccggcctgagcctgatggatctgcagaagctgaccgattactgggcagacgtccgggaacgctatgtggacttcgagtccgacctgaagacgcctgtcaccgatatctatcgttacgagattcctggcggtcagtataccaacttgaagccgcaggtggagagcctgaacctgggacaccgtttcctggaagtcaaggaaatgtacaagaaggtcaacgatatgctgggcgacatcgtcaaggtcacgccctcctccaagatggtgggcgacctggccatcttcatggtgcagaacgacctgacccccgaaaacatcgtggaaaagggcgcagctctgagctatcctgactccgttgtcagctacttcaagggcatgatgggtcagcctgcatggggcttccccaaggatctgcaaaagatcgtcctgaagggcgaagaacccatctccgtccgtcccggctccctgctgcctcccgctgacttcgaggctgctaaggaacacctgcgcaaggtctgcggctatgaaccttctgagcgtgacgtcatttcctggctgacctatccgaaggtgctggaggactacttcaagaaccgtgcggaatacggctacatcacccgtttgggcagccatgtgtacttccacggcctggcagtgggcgagaccaaccgcgtcaacatcgaagacggcaagacgctggtcatcaagtatctgggtctgggcgaccgcaacaacgacggtaccatcaacgtccagtttgagctgaacggcatgcgccgtgagatcaacgtccaggataagcacgccaaggcttccgtccacgcagtggaaaaggccgatcctgacgatgtgatgcaggtcggtgcttccatccccggcgcagtcagcaaggtgctggtgaagaagggcgatgcagtgaaggaaaacgacgtcctgctcatcatcgaagccatgaagatggagaccagcgtggtcgcccgtgcagatggcgttgtcagcgacatcaaggtggaagcaggcgacagtgtggttgccggtcagctgctgatgaagctgaagaaagcagaggacgaagactga

SEQ ID NO: 852 - DNA, 2121 bp, Unknown
  Unknown gut bacteria
atgaaaaatgaccgttggtcaaaatggaaggaagggatcacggtgctgaaattcggcgaaaagatcgtcaaactgcgtatacccattctcatcgtcagtatcctgctgctcattccggcagcgatcggatacttcaacacccgtatcaactacgacatcctgtactatctgcccaaggacatcgacaccatgcaggggcaggacgtcttgatggatgaatttgggaaaggcgcctatgcgctgtttgtctgtgagggcatggagtacaaggacgtcgccaacctcaaaaccgacattgaaaacgtagaccatgtagcacaggttatctggtatgactctgttgccgacctgtccgttccggtggatgtgctgccggataaggtcaaggatgtgttcaattccaaggacggggacgccaccttgatggccatcttcttcgacaccaccacttcggcggacgagaccatggatgccattgaggagattcggagcatctccgggaagcagtgcttcctgtccagtatgtccgctatcgtcacggataccaagaacctggtcaaccaggagctggttccttatgtgctcatcgctgtggtgctctgctgcatcgtcctggcggtgaccatggactcctttgtcatcccagtgctgttcatgctgagcattggcatggctatcatctacaacctgggcaccaacgtgttcaaaggagagatctccttcatcaccatgtccctggtggctgtcctccagctgggcgtgaccatggactactccatcttcctatggggcagttacaaggaacagcgggagaccatagcggataagaacgaggccatggctcacgccatcgccgctaccatcacctcggtgaccggttcttccctgaccaccatcgctggcttcatcgccctgtgcttcatgagcttcaccttgggactggatatgggcgtggtcatggccaagggcgtcctgctgggcgtcatctgctgtgtcaccgtgctgccttccttgatcttggtctttgataaggccatctggaagactgctcacaagaccgtccacctgcccactgacggcttgagcgagttcgtcatgaagcactacaagctgtttgcaatcattatggtagtgctgtggattccggctctgtacggcaacgccaactacaacgtctactacaagctggacaacagcttgccagattacctgccctccgtgcaggccaaccaggagctgaacaaaaagttcgatatgaactccgtggaaatgatcctctgtcgggatgacctgtcccagaaggaggtcaaggccatgctgaaagagattcagaacgtggacggcatcaacttcgccctgggtctggactccctcaccggtgacctggtgcctgatgagctgattccccagtcggcacgggagaaaatggagagcggcggctatcagctgctgatgctcagctccaaatatgaagttgccaccgatgaggtcaatgcccagtgcaacaaggtggagcagatcctgaagaagtacgacgaaaaggggatgctcatcggggaggcaccctgtactcgtgacctgatcaagatcaccgaccatgacttcatggtggtcagtgcggtctccatcctggccatcttcgtcatcatcctgctggtgctgaaatccatctccctgccggtcatcctggtggccgtcatcgagctggccatctacatcaacatggctctggcctacttcaccggtaccacgctgcccttcatcgcctctatctgtatcggcaccatccagttgggcgctaccgtggactacgccatcctgatgaccacccgttacaaaaaggagcgtatggctggctgttccaaggaggaggccgtcaagattgccttgtctacctctatccactccatcatgtccagcgctctgggcttcttcgccgccaccatcggcgtggggctttactccgatgtggacttgatcggctccctgtgcctgctcatggcacgcggcgccatcatcagtatgtttgttgtcatctttatcatgcccagtatgtatatgctgcttgataaactcatctgtaaaaccaccctcggcttacgcaatacggtggatgtctaa

SEQ ID NO: 853 - DNA, 2352 bp, Unknown
  Unknown gut bacteria
atgggagcaaactactttacaccggaaaacgcttggcggcatctgttcttcatccacggctgtaccgcagatgagttctacaccgatggcggtctaaagctgaatatcgagcagctgacccagctggagctgaagcgcagcggctatgcgcgggtggtcttttacgacaaggatcagaagctctactgctacgatgacgaatccttcgccctcctgcgggggcggagcggtgcgggcaaagaatcggctcccgcaccggaaggcgctgcgcccacccatcggaagggcggcctgaaacggggcaagctgggcaaaaaggcggctgcgtcagcagagcctgtccagccggtggaggcggaagccgttcccgaccagccggagcagaccaatggaacgtggacgcccggcgccgcctccggcatcggcatccgccggatgggcgatggctcgctccacctgggcatggtggacaacaccttcgtcaagcgccagatagacgcctatatgtatgacgccagcatcaagacggcggtggtcatcaatgatccggatgacttcctgcgggagttcggcgatgaccctatgcacgccctcaccgccggatacgagcggatggggacggagaaccagaacatcatggtctttctttacaccgataaacgcttgggcaacgtctaccaggtcgcccagttcgacccccaggggaagaacgtcaacgatattcagatcggctgccccaatgtggccgagctgcgcaacctgctcacctatctgcgggtgcgccacggcttgcggatgtcccttcgggatttgacgcccaacgccctggccttgcgccaggccatgtctctcagcgagcaggaggtgcgcatcaaggatctatacacccgcctgcggacctttggcgatcggcagcctctgacaccggcagcctgctatgagctgttgggcgtgaaacagcctaccccagccaaggaacagctggcatcgctcatcgggatgcagtccctgaaggatgctttggctcagtttgacaccggtgacgccgaccaggctggcgcactggcctacttgactgcctcccgcctccagcctgacctgccccatcccaagcccaaggaggagatgatccacttccttctcaccggcaaccccggcactggcaagaacaccaccgcccacctcatcggacagctattctacgagatgggctatctggagactggacatgtggtggagactgaccgttcccagctggtgagcaaccatgtgggcgagagcgccctgtggacccgacagaaggtgcaggaggccatgggcggtgtgctgttcatcgacgaagcctataccctcaagcgcaatcgcgacagcggcaacgactttggccaggaggtcattgacacgctggtgaagctgatggatcaatacaaaggcaaattcatcttagttgcggcaggctaccccagggagatggagctgtttgagaagtccaaccccggtctggccggacggttccgccacctgcacatcagcgactacactccggcggagatggaacagatcgtggccttccacacacggaagaacaacgccgtcctctctgacgaactccaggcagcactgcccaacttctgtgagaactgggtgaacctggcgggcacggagtggaacaacgctagagaagcggtgaacctgctggatgaaatgctgcggaactggaaacaggatccggaagcccagtcggtgaccgatgagacgggggtcacccacgccctcctggaaccacgccacattccggaagccctgtccggcaacctgaaaccggtggcggagatgcaggcggaagcgctgaaccggcttaacagcctgaccggtctcaatggcgtgaaggcgaccgtagagcggcttcgccgccggatgctggcaggcgatcagaaggagccgggacactacctgttcaccggcaaccccggcacaggcaagaccaccgtggcacggtacatggggcagatcctgcgcaacctggggatgctgaagcgggggcacctggtggagttcaccgcttcggaattgatgtcccaggtgttcaacgaggagcatcagggggacttctatgagacggtgaggcacgccatggatggagtgctgttcattgatgaggcctatcagctgaccaccgacaccaccggccgtggccgtcccatcctggatgcgctgctgccctttatggagaacaatcgcaacaatctctgcgtcatcgtagcaggctatgaggacgagatggacgacttcttgaagtacaattccggcttccagagccggttcaccgagagcgtacactttgacaactac

SEQ ID NO: 854 - DNA, 2076 bp, Unknown
  Unknown gut bacteria
atggctgattataacaagaccatcaatctgcccaagaccgacttccctatgcgtgccaagctggcacagcgggaaccggggatgctggaagaaatgaatcgcaaggatctgtaccgtaaggtgatggaacggaacaaggataagactccgtttatcctccacgatggccctccctatgccaacggggatattcacattggcaccgccatgaataagatcctcaaggatatgatcatccgctacaagaatatgaccggccactatgcgccttatgttcctggctgggacacccacggtatgcccatcgagaccgccattcagaagaagggcgtcaagcgcaacaccatgtccgtgccagaattccgggacaagtgccggaactttgccctggatttcctcaaccgtcagcgggaacagttccgccgcctggggggcattggcgattgggagcatccctacatcaccctgaagcctgaatttgaagccaagcagatcaaggtattcggcgcaatggcagaaaaaggctatatctaccaggggctcaagcccgtctactggtgccccacctgcgagaccgctctggcagaagctgaggtggaatatgctgatgaccccgtcaccaccatttacgtcaagttcaaggttcatgatgacaagggcaagctggcacagtacggcgatctggacaagatgtacttcgtcatctggacgaccaccacctggactctgcccggcaacatggccatctgcctcaatccccagttggagtactctctggtcaagaccaatggcgagatcctcatcatggccaccgatctggtggacagcgtcatgaaggattccggcatcactgagtatgagacggtaggcaccctgtttggggacgagttcgaatacatgaccgcctatcatccctttatgaatcgggattccctcatcatccggggcgaccacgtcaccctggatgccggttccggctgcgttcacaccgctccctccttcggcctggacgacttctatgtgtgccagcgctatgacgagatccccaccggcgtggagatggaagtctccgtcaacgcacaggggttcctgaaccagtttgccggcccctatgaagggctgcatgtgaccaaggcacatccggtcatcttcaaggatctggtggacatgggtgccatcctgtccagtgcggatatcgttcatagctatccccactgctggcgctgcaagaagcccatcatcttccgtgccacccagcagtggttcgccagcgtggatgccatcaaggatgccgctgtggaagcctgcgacgacatcacttggaagcccgaatggggcaaggaacggatgatctccatgatccgcgaacgttccgattggtgtatctcccgtcagcgtacttggggcgtgcccatccccatcttcttctgcaaggactgcggcaagccctactgcacgccggaatccatcgaaaagatttctgagatcttcggcgctgaaggctccaacgcctggtgggcgaaggaagcggaggaactgatgccggaaggcgctgtctgcgaatgtggctgcaaggaattcaccaaggagaccgacatcatggacgtctggttcgattccggctccacctgggctgccgtctgcgaccacaatccggaacatcctgaactggtctatcccaccgacttgtacctggaaggcggcgaccagtatcgcggctggttccagtcctctatgctcacctctattgccgcccgtggtgtggcaccctataagcacatcatcacccacggctggaccgttgacggccagggcaaggccatgcacaagtccttgggcaacaccgtcgccccgcaggacatcatcaaggactacggcgctgacatcctccgtctgtgggtctcctccagcgactacactcaggatatgcgcatctccaagcccatcctgaagcagctgtctgacgcctacctgaagatccgcaacacctgccgttatatcctgggcaacctgaccgggttcgacctggctgccgacctggtggagtacaaggatctgatggaactggatcagtgg

SEQ ID NO: 855 - DNA, 939 bp, Unknown
  Unknown gut bacteria
atgaaataccttttgaaaaaagtattcactctcattattacattgtttatcgtttcccttctcgccttccttgcgtttcaggtgatctcggatccggccactgccattttaggcaccagcgccaccccggaatctctggcggcgctgcgggaggagatggggctgaaccgtcccatttttgtccaatacggaagctggcttttgggcttcctccaaggggattttggcacgtcctacagctaccatataccagtagcggaaatgatcgcccaaaagctccccatcaccgccatgctcaccctgttctccttcctgctcatgatcctggtgtccatccctttgggcatctggacggcacggaaagagggcggcctgctggatcggagcctgacggtcatcaaccaaatctttatgtccgtcccgcccttcctcttgggcgtggcctgtacttatatcttcggcgtaggtctgcgcatctttgtccccggacagttcgtgtcctatacccagtcctggccgaaattcctagtctacctcatcttcccagccatctccattggcatctcacggatcgccatgacggtgaaaatgctccgtgcctccatcctgaaccagatggagcgggactacgttcgcactgcccggagtcgggggagtacgaaggatcgcatcctgagaaaacacgtcctgcgcaatgccatcatcccagtcatcacgttcattgcaacgtccatggcggagatcgtggccagcagcatcgtcatcgagcaggtctttgccatccctggcattggcgtcctcctgctctcgtccatcaacaaccgtgacttcccggtggtgcaagccctggtgatgatcctggttctctgggtggttctggtgaacttcctggccgacctgctctaccagtacatggatccccgtattcggttacgctga

SEQ ID NO: 856 - DNA, 1599 bp, Unknown
  Unknown gut bacteria
aagaccaagaaggtcaacggcaagaacgtgaccatctatcagcccttcctgatggtctccggcctcctggtggacaacgataagatgtccaacgtggaagtcaccaacggcaaagtcatcaacagcggcgacaagaccgtggtcgtgggcatggcactgcctggcctggaggagagcttgggtctggctgatctgaccgacagcgacggcaagaagattgacattgatgtgcctcagaaggtcaccatcaaagcggatgtctccgacttctccctgctcaccaccgtcaccatggcgtccaacagcgcactggaagaactgaatctggacgatgtggactcggttgacgacctgaaggactccctgaaaaagctgggcgacagctccaaagagctggtggacggcaccaagaaactggaagacggcgtaggcgagctcaacgacaagagcggcgacctggccgatggcgtggacaaagtgaatcagggtgcaaaggatttggataagggtgccaaagacctgaacaacggcgcaaaggatttggatgacggcaccaacgagctggccacccaggtcaaggatctgcccagctctgcccagcagttgttggacggcgccaagagcatcaagtccgccctgggcaacgccgacagcaagacccagaccatctacaccggcgccgctgccatcgaggaaggcgcacagcagatgtccgataacctgaagaacaccaacggcaagagcatctacgaagccgcagctggcatccaggaaggtgccgcaaaggtcaccagtggcgcagcaaagctgtctgacgggctgaacaccgcagcagctaacttggatgaatccatcaagctgctgaacgccgcagtgggtcagctggaagatttgcagaagactacggaagacaccacaacgctgcaaacctatggcgcgctcatcaaagagatcaagggcagcatccagtatcagcagggcgtgaagcaggcactcacaagcaccttacagtctggtatcaccagcatcaaggggggcgcaaccctcatcgacacctacgccggtaagatcgccgatggctctgtgaagctggtggaaggcgcagcaaagctggaggctggcgcaaaggccatccagagcggcgtagacactatgatctccggcaacaacggccagaacctgaacgctatgatcgccggcctgagcatgctgagccagcagagtggcaagctggtggctggcactcagaagttggcggacggctccggtaaactgctggcaggtaccgataccctgaccgaaggcaccggcaagctggcaagcggcaccggcgaactgtctgatggtaccgacaagctcatcagcggcatcggcgagctgctggacggctccaaggatctggcggaaggcatggccaagttcgatgaggaaggcatccagaagctgaccagcctcactgacggcgacttgggcgacatcgtagatcgcctggaggcggtgcaggactatgccgaggaatacaagtcttacggcggctgccctgctggcctggagtgcagcaccaagttcatctacaagaccgattccatcggggaatga

SEQ ID NO: 857 - DNA, 1851 bp, Unknown
  Unknown gut bacteria
atgattgacgcaaagctagagcgcattttgttgcgcgtacaaaagcccgcccgctacaccggcggggaatacaacgagatcatcaaggataaggcagcggtagatgtgcgctttgccatgtgctttccggacacttacgaaattggaatgtccaacctgggactgcgcatcctctatggctccatgaaccaggcggagggcgtctggtgtgagcgtgcctttgctccctggggggacatggaggaggagatgcgcaaagaacatatccccctctacgccctggagagcggcgacagcctaaaaaacttcgattttgtgggcttttccctgggctacgagatggcctataccaacgtgctgaatatgctggatctggctcacatcccccttcacagcgaccagcggggggaggacgatcccatcatcgtggccggcggcacctgcgtgtacaacggggagccgttggcggacttcatcgacattttctccttgggtgaaggggaggacgtgaccctggagatgatcgacctgtaccggaaggggaagcaggctggttggagccgggcggagtttttgcaaaatgccgcccaggtgcctggcctgtatgtacccagcctgtatgaaatttcctaccaccaggacggcaccgttcaggccatcacccccacccacggtgcgccggagcacatccgcaagcgcatcgtggcagacctggacaagtcctatttccccgtcaagaccatcatcccctccaccgacatcgtccacgaccgggtgatgctggaggtgttccgaggctgtatccgaggttgtcgattctgccaagctgggtattgctaccgtccggtgcggcccaagagcgtagacctgctggtgcagcagggcatcgcatcctgcaaggactccggctaccaggagatgaccctctccagcctgtccaccagcgactaccgccccctgaccgagctgtgcgatggcctgttggagtactgcgacccccgcaacatcaacatcaacctgccctcccttcgggcggacgggttttccatgggcatcatgcagcggctgcagcgggtgcgcaagaccagcatcacctttgcccccgaggcgggcactcagcggatgcgggacaccatcaacaagaacgtcaaggaagaagatttattacagtcctgccgcaccgccttcgagggcggctgcaatgcggtgaagctgtatttcatgctgggtttgcccaccgagacggatgaggacgtcatcggcatcgcccgactggcggagaaggtgtactggacgtggaaaaattacgccgtcaacaagagccgcggcctgcgcattaccgtctccacctccttctttgtgcccaagccctttacgccattccaatgggaggcgcaaattacgagagatgagtaccaccggcgggtggacttgctgcgaggctccatcaaaaacaagtccatccagtacaactggcacgagatggagaccagctacatcgaagcagtgctggctcgtggcgaccggcggctggggaagctgctggaaacggtctggcgcaagggcgggcggctggactcttggagcgagtatttctccttcgagcgctggatggaagcctttgccgagaccggcatcgacccagatttctacgccctgcgggagcgccccaaggacgaaatcttgccctggagcatgatcgacattggcgttcacccggaatacctgtggcgggaacgggagcaggcatatcgctcggtcatcaccccggactgtcgggtgcagtgcatgggctgcggtgccaactgcctgctgccggacggcgtgttctgtgacgaagatcggaggtaa

SEQ ID NO: 858 - DNA, 1632 bp, Unknown
  Unknown gut bacteria
atgagcaagaagcaaaaaagggtgctctatcgcctcatcctcgctgctgtcctcctggtggcggcatccctgctgccagtgactggtgtttggaagtttttgtgcttcctggtgccctattttatcattggctatgacgttctgctgggcgctctccatggcatcgtcaacgggcagatctttgacgagaacttcctcatggccatcgccactgtaggcgctatgggcgtgggggactacaaagagagcgtggccgttctgctgttctaccagctaggcgagctgttccagagctttgccgtgggcaagagccgtcagagcattacccagctgatggacatccatccggagtacgccaacgtgaccgatgagaacggtcagttggcgcaggtggatccggaagaagtggaagtggggacggagatcaccgtgctgcctggggagcgcatccccatcgacggggtcatcctcacgggcacctctaccctgaacaccagcgcactcaccggtgagagtctgccccgttcggcagtgccgggggatgcggtcatcagtggctgcgtgaatttggatggtgtgctggtcatccaaaccaccaagctgtatgaggactccaccgtagctcgtatcttggagctgacggagaattccgccatgaagaaagctagggcggaacggttcatcacccgttttgcccactactataccccgatcgtctgtatctctgccttggtgctggccatcctgccgccggtcatccggttggccatggggttcagcggggaatggggcacatggatctatcgtgccctgaccttcctggtcatcagctgtccctgcgctctggtcatctccattccgctgaccttcttcggcggcattggcggtgcttcccgtcacggcatcctggtcaagggtgccaacgacctggagactttggccggtacccgctgcatggtctttgacaagaccggcactctgactcagggcgtgttctcggtcaccgaagtccatccggcagaggggtgggacaaggaacaagttttgcgcctggctgcgctggcggagcagttctccaaccatcccatcagccgcagcatccaggcagcttgcactgatgacctgaccggcgtggaagtgacggatgtccaagagcgtggcggtcacggcatcaccgctcaggcggatgggcacaccatcgccgccggtaatcagcggctgatggatgcgctgaacatcgctgtgccttctgacctgaatctgaatggtaccactgttttggtggcctgtgacggcgtgtatgtgggcgtcatcctggtggccgaccaggtgaaggcaggtgcgaaggaagcgctggccaagctgaaggcagtgggcgtgggcaagaccgtcatgctcaccggcgacggggatgctccggctgccgctgtggccaaggagctgggtgtggacgagtaccacagcaagctgctgccggcggacaaagtgacgctgctagaacagctgttggagcaggaacgtccggtggcctttgtaggcgacggcgtaaacgacgcaccggtgctcacccgtgcggatgtgggtatcgctatgggcgcgatgggctcggacgccgccattgaagcggcggac

SEQ ID NO: 859 - DNA, 1593 bp, Unknown
  Unknown gut bacteria
tgccaggtgagctatcaggattccactggcacctacaacggctatatgcgggaagaacacgtggacaccgataacaccgatgccgctgatctgaccggtgtggtcaagaccaagaaaaagtatatcaacatccgttccgctaagagcgctgatgccgaggtggtctgcaaggtgcccgccggcaagagcgtgtccatcatcggtgcgctggatgaggagggttggtaccaggtcagctacaagaatgacaagggtacccataagggctacatgatggctcagtatatctccatccccagcatctcctctggcaccatcggcacctccagcgccgttctccgctctgcggcggacagcagttccgatatgttctgtgtcatccccgaaggcaacaaagtctccgtcctggatgccctgggcgactggtatcaggtagaatacaacgaccaggtgggctatgtggacgcaagctgcgtggaatccgaagccctgagcaagagcaagggctatggcaccatctctgttgacaccctcaacgtccgtgccaagcggaacaccgagtccaacgtggtcaccaagatgagcaagggcactaccttccgcatcaccagcgtcaaggacggctggtatggcgtgacctacaacggtgtggacggctatgcaaaggcagaatatgtcaccgctaccgacaccattgacgctggttatatccaggtcacttctcagaccttgaagctgcgctccggcgccggcactgactatgaccagctggccatcgtgccttatggcactgtcctgaacatccgcggctctctgggcagctggtatcaggtgaagtataacggcaaggaaggctatgtgtgcggtgattacacctccgccaccacctccggcggttataaggcttatcccgatttcgccaaggtcactgcttctgctctgggtctgcgtgcaaagcccggcaccgacagcgacaagaccttcaccatccccaacggcactgtggtgtccgtccgcgggatgcaggatggctggtataaggtcgttgtctacggcacccatactggttatatcgatccggcttacaccgagcgcagctccggtccggctaccgtgcctcaggtcaccacgaccaccactggtacgactggcaccacgaccaccggcaccaccggcaccaccggttcctccaccacttccagtgcatcctctagttcctccagcagcacctcctccggttcctccggcggcggcagcggcgcggcagtcctggcctatggacagcggttcgtgggcaacccctacaagtggggcggcaccagcctgaccaacggcgctgactgctccggcttcgttcagagcgtctacgcacacttcggaaagagcctgcctcatagctcctacgcagacgcacatgtaggccgcggggtcagcaagtccgatatgcgtcctggtgacatcgttgtttacggcggtcatgtgggcatctacgccggcggcggcaagctgctgagcgcactgggcaagaagtatggcatcacctattgcagcgtcaactacaagcccattcaggcggtacgccgtctgttctaa

SEQ ID NO: 860 - DNA, 1482 bp, Unknown
  Unknown gut bacteria
atgatgcacaagaatcgaaacaaaccggtttatttgttcagcagctcccccagcaaccgcggggaggaactgaaacgccgtaccaaacgcgcaaaccagcgcactgtgacctttttcctggtctttctctacctgttcactctgatctcctttatcattcccctgcgccccacctattcggatctggaacagcggaacctgactaagttccccacccccaccctggccaccatcagcaacggggagttcttcgagggggtcaacacctggtttgccgaccccttccccttccgggagcagtttttgaagctggaaacaggcgtcaccggcctgtacggcgtcaaaacctcccaggtggtgggcgatgtgaagcagggggacgacattcccgatgcccccatgacgccggatgacagcgacagctccgctgacgcctctggcgatgcgtcctcctccggtggtgcttcttcctctggcgatgccagcgcttccacgcctgctgacagcaatcagaccaagcccaaggatgacgaaagtgacgccacgatcccagagttggataagaacgccaaatccgaaaccctgggcgccgtactggtcattgatgacgcagcctatgaatacttcaatttcgatcagaaggccgccaacagctatatcaagatgatgaacaaggctgccaagaaactcaaaggcaaagccaacttgtatgacctgatcgtacccaccagcatggatgtgtgcgtgccggactccgtccggaaaggcttgaacacctccagccaagagaaagccatcgagtatatctttggcagcatgggcgatggagttcattccatcaaggtgctggacaccctcatcaagcacaatgccgatggcgagtatgtctacttccgcaccgaccatcattggacggctctgggcgcttatcacgcttatgaacgcttctgcgaagcctccggccagacagcagcttctctggacagctttaagaaggtgacctacaagaacttccacggctccttctatcgggacactaagtccaccgccctaaagaatcatccagataagattgtcgcctatattccgccctccaccaacgacatctccatcaccaatatggacggctccaagatggattggaatatcatcaccgacgtgagcacctggaactccaccgccaagtattccaccttcatcggcagtgacaaccccttcagtgtggtcaagaatcccaaggtgaagaatggcaaatccgtcatgctcatcaaggagtccttcggcaacgcctttgcccccttcctggtggagaactacgagaatgtctacatcgtggactatcgctacatcaagaatgtagataagcgttctctgacccagatggtggacaaatacaagattgatgacgtcctctttgtcaacaacgtcagcgctgtccgcaacgaaagcgccgtgaagctgatgtccgactttgtgggctga

SEQ ID NO: 861 - DNA, 1137 bp, Unknown
  Unknown gut bacteria
atgaacatgaccgagcgcagaaagcgcattctccgtgcggtagtggagcattacattgaaacggccgaaccggtaggttccaagatcatcgctgaccttgcccagttggattgttcctctgccaccatccgaaacgagatggcgaccctggagaagatggggtatctggaacagccccacacctccgccggacgcatcccctcccctgctggctaccggttctatgtgaacgagctgatggaaaagcacaagctgtccatgcaggagacggaacggatcaacgaggcgatgcatttgaagatgcgagagttggatcgggtcattgaccaagccggcaagctggtcagccagttcaccaactaccctgccttcgccctcaccgccggtcgggatcgcatctatatctctcggtacgacctgctgatggtggatcccaacagctttatcgtggtggccatgactaacaccaatgtggtcaaaaacaagctggtgcatctgcccagcaacatcacagagccacagctccagctgctcaacgcattgctgaacacctccttcactggcaagacactacaggaaattacgccggacttgatgcaggtggcagaaaaggcggcaggcagttcctacgggctgatctccctggtggtttccttcgccatggaggtgctggatgacctggaacacagcagcatccacaccgcaggagccagtcagctcctgaatcacccggaataccaggacgtagacaaagcgcataagctgctgacttatctgtccgatgacccaaatttggctcacctaaccgctcccatgatgaatgagggcaaggatgaggggccaaaggtgttcatcggaccagagaatgtggcagaagagttgaaggacaccagcgtggtgctggccagctacgacatcggcgacggcatgaaaggcgtcatcggtgtggtggggcccacccgaatggactacgccaaggtgaccgccaagctgtcctatctggcggataacctgggcaagctgttcaatggaatgtccggcaacgccctggctccccctgcgcagaaggcattggagctgaatccgccctctgagcttgacccaagtaaaaacgactccaacgatcaaggaggctga

SEQ ID NO: 862 - DNA, 1359 bp, Unknown
  Unknown gut bacteria
atgacagtaaaagaattgatcgcacgatccaaggccgcacaggaagcgtttgcctttgcaacgcaggaacaggcagatgcagctgcaagagccatctgcaaggtcgtatatgacaacgctgaaaagctgggccccatggccgcagaagaatcccgtatgggcagcgaacaggacaagattgcaaaatgccgcaataagtccgcactgatctgggagagcctgaaggacaagaagtcctgcgacatcatcaaccggattgaagaacgccgcatgatcgaagtggcaaagcctgttggcgtggtcgcttccatcatcccctccaccaaccccgtcgtcacccccatgagcaacggcgcatttgcactgaagtgccgcaactctgtcatctttgctccccatccccgcgcagtcaagtgtaccaagctgctggtggagatgttccgcgcagagctgaagaagctgggtctgccggaagatctggtgctgggcctggaagaagtctccaacgacctgacctccgaactgatgagcgccgctgacatggtggttgctaccggcggcatgggcatggtcaaggcagcttactcctccggcaagcccgccatcggtgttggccagggcaacgtccagtgcatcatcgatgaagatgctgacatcgctgacgctgttggcaagatcatcatcggccgcgcattcgacaacggcctgatctgcctgggcgaacagaccgtgttcgtacccgaagataaggaagcagagtttgtcgctgagatgaagaagcagggcggctatctggtggaaggcgaagaaaacgtggacaagctgcgggaaggtctgttccccggcggcgatgcattcagccgtgtggtcgttggtatgttcgcagaccaggtttccgatgagatcggcctgggcgcacccaagggcacccgcgttctgttcgccaaggccaaggctttgggcgcaggggatgtgctgtgccgcgaaaagctctgcccggtcatcgcttacatgacctacaagaccttcaaggaaggcgttgccatgatggaagccaacctggagcacgaaggcaagggccacagcatcgctgtccactccaacacccccgaaaacgtggaatacgccgccatccgctgctgcgtttcccgtgtggttgtcaatcagccctccggcaccaccggcggcggcagccccaccaacggcttcacccccaccaccacgctgggctgcggcacctggggcaacaacagcttcgctggtaatctgaactacgaacagttcatcaacatcacccgcgttggctatccctacgatgaatcctatctgcccgataccgctaaggctttcgaagactga

SEQ ID NO: 863 - DNA, 1629 bp, Unknown
  Unknown gut bacteria
gcctgccgcgccctctttggcggcatccgcttcagctccctgcggctcatcgtccgctgtccccaggtgcagggcggcagctggactggggtcaccctgacccaccggtacaagctggaatctgaccggcaggagtatttcttccccctgaaaaagctgaaatgggacaaagaccactacatcgccatcgccagcgtccccctaaagcagttcgccttctcccccctctattgggacatccgcatgacctttgaaaaggacggcgtccagtactggagctcggtgaaagcccccttccgctccacccagcactattggaaggatctggcctggaacgtaggcatcaagggtctgttcttcggggacagtctccgcctggacaaggacaaccagctctttctctaccgcacggtgggcaaccggttcgccctggtctatcaggagtactccccctacaccggcttccgcttccgctgcaaggaacggctggccatggctctgtactacctgcggcggaaatctctgctgaagcagagcatctacctgacgtacgaaaaatactgctgtatggcgcaggacaacgggttctacttcttccaatactgcatggagcacaacatggagcaggtcatgaatcggaagatctatttcatcatggacaaaaaggccaccgactaccaaaacctcctgccctatcgggatcacgtcatccagttcatgagcctcaagcacatgatctacatcctggccgcccgcctgctcatctccagcgactccaaagcccacgcctacgcctggcgtgccaaggagagcgtcatcctgccccaggtgaccaaaaataagcggctggtgttcctccagcacggggtcatcgccctgaaacgggtggagttctcccgctccggcaccaacagcgtcaacctgttcatcacctccaatcagcgggagcatgacatcatcatcaacgagctgggctacctgccggaggaagtggtcatcaccggcctggctcgctgggatgtgctccgagacaaatccgcccagcaggaaaagacccacatcctggtcatgcccacctggcggaattggttggaggaagtctccgatgagactttcgtggccagcgactactatcgcaactatatggcgttgctcaactcccatcggctggctcaattcctggaacagtacgacgtgtacctggacttctacatccacccgaaatttcgggagtacatcaagaacttctccatctccggcgaccgagtggcgctcatccccttcggctcccagcccctgaacgagctgatgatggagtgcaagctgctggtcaccgactattccagcgtctgctgggacgtgtactaccagggcaaaccggtcatcttctaccagttcgacctggaacagtacaacgagacccaaggctcctacatcgacatggagaccgagctgttcggcgaccgtgccacggaaccagagcagctgttcgccctgttggaggagacggcagccaacgggttccagctgaaggagaaatacgcccagatgcgggaaagtatgtacgcataccttgaccacaataatagtcagagaacttgtgacgagatccaaaaacgaaattggtga

SEQ ID NO: 864 - DNA, 1188 bp, Unknown
  Unknown gut bacteria
gtgaatcaggctttaaatcgtctgttacaagagaacaaaaccgccttttatgtctttgatatagcgaaactgaaagcccgcatcgcccacttgcaggcggcactgccgccggaggtggtgctgtgctacgcggtgaaggccaacaccttcatcaccaaggagctcatcgacactatccaccgctttgaagtttgctcccccggcgaggcggagatctgccgtgcagtgggggtgcccagcgagaacatggtcatctccggcgtgtataagacgccggaggtcatggaggccatggtagctgacctcgatttcagccccatctatacggtggagtctttggagcagtacgagctgttccggcggctggcgcagcagtatgaccgcaccctgcccctgctgctgcggctgaccaatgggagtcagtttggcatcaacaagggggacatcgaagccatcgtcgcccggagagaggagacgccggaggttgatttattgggcatccagttcttctccggcacccaaaagacctctctgaaaaagctgaaacgggaggtggggaagctggacgacctgctgaccctgctggaagaaaaatatgggtttgttgcccaggagctggagtacggccctggctttccggtgaactacttccagtcggatgagctagacgaggcggaactgctggctggcttctcggagctgctgcacgacatgacccaccaccccaagatcaccttggagctggggcgcagcatcgccgcttcctgcggcacctactacacccacattgtggacttgaagcggaaccaggagcagaactacgccctggtggacggcgggatgcaccacctggtgtatttcggccagcacatggccatgaagcagccctttttccatgtgtgcggcaaggagcatctgccggccacagatcagtggaacctctgcggatccctgtgcagcatgaacgatgtgatgaccaagcaaagcccgctgcccgacttggcgctgggcgacgtgctcgcttttgaaaacgccggagcctattgcatgaccgagggcatctccttgttcctcagccgtgacattccggcggtctacctgctgttggaaaacggcactgccgcccaagtgcggaaggcatttgatacggccaccttgaatcaaccaaattacggaaaggatgtatga

SEQ ID NO: 865 - DNA, 1188 bp, Unknown
  Unknown gut bacteria
atgaaaacaccctttgtaaccaaagatcagctggaggcgatctgccagcaatatcccacccccttccacctctacgatgaagctggcatccgccagaccgcgcgggaagtgaaccaggcgtttgcctggaacccgggctttcgggaatatttcgccgtcaaggccacaccgacccccggcatcctcaaggtgctgaaagaagaaggctgcggtgtggactgctcctcgctgaccgagctgatcatgagcgacaagtgcggtttcaccggccacgagatcatgttctcctccaatgagactccggcggaagaatatgtccaggcggacaagcagaacgccatcatcaacctggatgacttcacccacatcgacttcctgaaagagaccatcggttatatccccgaaaccatctcctgccgctacaatcctggcggcgtgttcaccctgggggagagcgaagaaggcttccaggttatggataaccccggcgaggccaagtacggcttcaccaaggaacagatcatcgagggctacaagaagctcaagtccatgggcgcaaaatatttcggcatccacgccttcctggcctccaacaccatttccgacgactactatcccaccctggctggtgaactgttcgagctggcggtggaactgaaggaaaagacaggctgccacatcaagttcatcaacctgtccggcggcgtgggcgtcccctatcgtccggagcagcgcaagaacgacatcgcagccatcggcgctggcgtcaaggaacagtatgagaagatcctggtgcctgccggcatggatgacgtgagcatctacaccgagatgggtcgtttcatgctggcgccccacggcctgctggtcacccgtgccatccatgaaaagcacatttataaggaatacattggcgtggacgcctgcgcagccaacctgatgcgtccggcgatctatggcgcataccatcatattacggtcatgggcaaggaaacagaaccttgtgaccacaagtacgatgtggtcggttccctgtgcgagaacagcgataagtttgccatcgaccggatgctgcccaagatcgacaggggcgacctgctggttatccacgacaccggcgcccacggcttcgccatggggtataactacaacggtcgtctgcgcagcgcagagatcttgctgaaggag

SEQ ID NO: 866 - DNA, 741 bp, Unknown
  Unknown gut bacteria
atgaagatatggggtctcaccgaccggggaacggtcagagagcaaaatcaagacaccttccacctctggaaggaggacaacacagccgccctcctggtctgcgatggaatgggcggtgcacgggcaggcaatgtggccagcgccctggcggcacaggcgttcacggaagccatccagcacagcgatgcccagccagatcagcggctgaccgcagccctggcacaggccaacgagcaggtgtaccagcgtgcccatcgtgatccggactgccgagggatggggacaacgctggtggctgcactggtagagggcaacctggctcacatcatcaacgtgggcgacagccgtgcctactacctgtcccaggacggcatccggcagatcaccatcgaccactccctggtacaggatctgctccaacgggggcacatcaccccagaagaagccaggaaccatcccaacaaaaacgtcattacccgtgcgttgggagtggacaacaagctggaaggggatctgttcacccaggagctggagccgggcagtatgctgctgctgtgcagtgatggcctgagcaacgtgctggaggatgaggaactgttggaggtggcactccacggcggtacgccggaggaaggctgtcaacggctcattgggcttgcgctggaacggggcgcaacggacaacgtaaccgcagtgcttttggcgtgggacgcgccggaggcaaaggaatctgaggagtaa

SEQ ID NO: 867 - DNA, 1215 bp, Unknown
  Unknown gut bacteria
gccaatatggcgcagaagtatgagaaggtcaacggcgtggtggactatgccgaagccctggtgggccccaaatacggctactacatgggctggttcatgaccaccatctactacccctccatgacctcggttctggcttggctcagcgctcgatataccctggtgttcatcaactctgtcaatccggattttaccatgattatccccgcctctgagggcggctgtatcatcggcccggaatgtatggccatgaccatgttcttcctctgttgcgcctacaccatcaacgccctgtcccccaagctggcaggcaagatccagaccacaaccaccgtcatcaagctcatcccgctggctctgatggcagtggtcggcatcatctatggcctgatgaatgggatgaccgctgcgaactttacgacgatggcaaatgtaggcgacgccgcctccggcaatcccttgctggccgctgtctgcgccacctccttcgcctatgagggctggatcatcgccaccgccatcaacgcagagctgaaggattccaaaaagaacctgcctcgtgccttggtcatcggcggtatcatcatcatcgccgtctacatcgcctattacgttggtgtcgccggcggcgctaccaaccaggagctgatcgacaacggtgcgactgtggcctttgtcaacatcttcggcaacgtcctgggcaacatcctgaatctgttcatcgccatctcctgcatgggcaccatgaacggtctcatgctgggctgctgccgtggtatgtactccgtggccgcccgaaaggaaggcccttgccccgatgtgttcagtcaggtggataaggcgaccaacctgcccaataattccgctgtcctgggtttgttcgtctgcgccgcttgggggctgtacttcttcctggccaacctggccaactcccccctggtgggcaagttcgtctttgactcctccgagatccccatcgtcaccatctatgccatgtacctgcccatctttgtcatgtggatgaagaaggcgaaggacgagaacattggcagacggtttatcatccccatcctggccttctgcggcgcagcttttatggtctacgcctgcatcatcggtcataagttcgccaatgtctactatctgatcgtctttgcggtcatcatggccatcggcggcatcttccggaagaacaagaagggggctgcggtgtga

SEQ ID NO: 868 - DNA, 1605 bp, Unknown
  Unknown gut bacteria
atgtctgaaaacaagcaacgcaaagataccttttttggcggcgcagccattttggccgctggcattatcgtggtgaaggtcatcagcgccgtctacaagatgcccctggtcaacatcctgggcagcagcggctatgcggacttcaccgccgccttcaatatttttaacatcctcctgaccgtctccactgccggcattccggtggccatgtccaagatgatctccgaggccaacgcctcccacaggcataagcagacccacaagatctttcgggtctccctgttcttcttcggcgcagtgggcatcttctgctccttggtcatgttcttcggcgccaacttcttcgccggcatcatgaatgacaccaaagcagccgaatgtatgcgggtgctggcgccatcggtggcgctggtgtctggactgtcggtgttccgtgggtacgcccaggggtacagcaacatgaccccctcatcggtgtctcagatcatcgaggcgctgttcaagctcatcgtcggcttgaccctggcctggtacttcatccgggtgctggggaagccggactacattggcgcagcaggcgccatcgctggcgtcaccgtctccgagcttgccgctctgctctatatggcctgggactatctgcgcacccagcgccacaccccttcgccggcgccttcggagcggccggacagcgccaagcggatcctgaaaacctgtctgctgctggctatccctatcaccatcaccgccgcctccacctccatcatgaccgctgtggacaacgccctggtgctgggtcggctgcaaaacgccggactgctgctcagcgaggatgccgcccgaagcctgatgggcaactacactggggtgcagacagtctatcagatccctgccgccctgatggtagccatcaccgcctccgtcatccccgccgtgaccatctgcttcacccagaaggatcggacgggcgcggccaagatcgttggctcctcactgaaaactgccgctctgctggccttcccctccggcatcgggatgctggtgctgggcaagcgcatcgtacagctgctcttccccagcctggacgcagacatcgccggcaccattctgtccatcctgggcatcgccaacatcttcgtctgcctcatgctggtggcaacttctgtactgcaagcctataacatcctctccctgcccattttcaccatgctggcagggggcgtggtcatggtgctctttgactacttcatggtaggcacggtgcaattcaacatctacggctccccggtaggcacctgcctgtgcttcggtctgacctgcgggctggatctgcacctggtgcgccgtgtggttcccggctgccccaattatgcacagctctttggaaaaaccctggccgcctctatcatcatgggtgccgccgcttgggcggtgtacgggctgaccagccacctcattggcgtaaagctggccgtcctgctggccatcctgctggcggtggtgctgtatgctgtactgctggtactgctccaggtgctaaccaaggatgatctttccctgatgcccaagggagataagatcgcaaaattactgcacatcaactga

SEQ ID NO: 869 - DNA, 816 bp, Unknown
  Unknown gut bacteria
atgagcaagagagcatatactgtgctgccgccggacagagaggagaaggtgctggggatttttgtgagggacgcatccttctaccgcaccttcttccccctgctcttggtcatcgtcctccagcagctggcggcgctggcggtgaacttggcggacaacatcatgctggggcgctactccgagctggcattgtctggggcgtccctggtcaatcagctccagtttaccctccagcagatcgccgccggcatcggcatgggcatcgtggtgttagccgcccagtattgggggcagaagcggacggagcccatcaagaagatcatctccctgggggtcaagtgcggctttttcagcggcgtcctcttttttgccatctctcagctggctccggcgggagtgctggggctgttcaccagggatacggaggtcatcgcagaaggagtgcgctatctgaaggtcatctgctggacctatccggtgttcggcctgtccaactccctcatgtacgccctccagagcgtggagaccgccatgatcggcacggtcatgtcctgctccaccatctgcatcaacgtctgcctgaactactgtctcatctacggcaacttcggcgcgccggagctgggcatcgtaggtgctgccgtggccaccctggtcagccggttggtggagctgggcatcatcctggtgtatatcctgttccgcgacaaaaagctccacatgaagctgtgggagcttttgcggtgggacggcacctatttgccggattatttgaaggtctccacccccatcgtcatctccggcctgctctggggg

SEQ ID NO: 870 - DNA, 1194 bp, Unknown
  Unknown gut bacteria
atgaagaaaaaactgctgatcttaggcgctggtatttatcaggtgccgctgatcgagacagccaagcggatgggcttggagaccatcgtggccagcatccccggcaactatccaggctttgcgctggcagacaaagtggtctatgagaacacggtggacaaggaagccatgctggcgctggccaaggcagagcaggtggctggggtctgcgtgtgcggcaccgatgtttgcgtacctgcccaggggtatgtgtgcgaccagttggggctgaaaggccccagcgaggcggcggcagagcgtgcccaggataaggcgctgatgaaggcggcctttgagaagggcggcgtgcggacggcgcggttcatccatgtggatatggataacgctaacccagtggacgtttgtcaggagattggctatccggtcatcttcaagagtgtggactcctctggcagtcggggtatcacccgagtcaatggaccagaggacatcgcctacgcctatgaacaggtgaaggagaacacccatgctgaccactacctgatcgaggagtttctcgtgggtgaggagttcggcgcccaggcgtttgtgctggatggggaagtgcagtttatcctgccccacggagactatgtgttccagggggatactggggtgcccattgggcattttgccccctatgacatgggggcagacatcgtggcggatgcagaggaacagctgcgccgagcggtaaagagcctggaggtggacaactgcgccatcaatgcagacttcatcttgtgcaagggcaagacctatgtgctggagatcggcgcacgggcgggtgctacctgtctggtggagatgaccagcttgtactatggctatgactactatgagaagatcatccagtgcaacctgggggaaaagccagactttacgcctcaggcagcgcctcagcccaacgccgaaatgctgttccaggcgccggtgacggggaagatcacggagattgacttgagcggcgtgacgccggatccgcacatcatcaacctgtccatggattaccaggtgggtgatgctgtgcggcagttccgcaaggggccggatcgcatcggacagatcatcgccattggggacagtgtgtctcaggcaaaggaacggatcgaccgagcgatggcgcaggtgaagattaccatcgacccggaataa

SEQ ID NO: 871 - DNA, 1875 bp, Unknown
  Unknown gut bacteria
ggccgtaagagcgccgcagtccgcaacaccatctcatttatcatcacgggcggggctatggttctcatgttcctgctcatcaagccgatcatgatggatggcgaagtcattgcttattggctgggcgactgggcaccggtgtccggctgggccatcggtatcggcatcgaagtggacgcgctgagcctgttcttcggcctgatcgtcacggtcgccgtgtttgcctcctgcatctatgccttcacctatatggcacacgatgacagccaggccaactacttcagcctgttcctcatgctctccggctccgtgctgggtctggtgctctctggcgacttgttcaacatcttcgtcatgatcgagatcatgaccttctccgccgtggcgctgaccgcattccggaacgactatgaaggcgccatcgaaggtgcgttcaagtatctgaccgtcggctccctgggttccactgctgtcctggtggggattaccatcctctacaaccagctgcacaccctgaacctggctcagatctctgccatgctggcggaaaagggcaacacccccatcctgatggtggccttcggcctgctattcatcggcttcggcaccaaggcgttcatcttccccttccaccccctggcagccgatgcccacgctgtggcacctgcttccatctccctgatgatctccggcgtcctcaccaagtgcggcgtctatggcatcatccgtctggtctatgcgctgttccagaacatccaggttcccgcagtgcagtatctggtggtcggctttggcaccatcagtatgttcgtctgcgtcaccatggcgttcaatcagcataacttcaagcggctgctggccttccattccatctctcaggtgggctacgtcatcaccgctctgggtctgggcactgccctgggtctcagctccggcctgttccacgccatgaaccacaccctgttcaagggcctgctgttcctgactgctggcgctgtccagcacgccaccggcagcctggatctggataagctgggtggtctggcaaagaagatgccccgcacctgcatcctgttcctcatcggcgccgcttccatcagcggcctgccccccttcaacggctttgcctccaagtggtacatctaccaggcagcctttgaaaagggcgctgagagcaacaacttcttcttcatctttgtctgcatcgttgcgctgatcacctccgtgctgaccctggcttccttcatcaaggtctcccagagcgttttcttcggccagctcaaccccgaattcaaggatgcgaaagaagtttccctgggtatgcgcatccccatgtggattctggccgtcctgtgtatcctcaccggcctgctgcccggcaaagtcaccgattacctcctcgcacctgcaaccgccgcagcttccaacgctgtgaactatgtggataagatgatgggtgacggctacgcagccgctcacggcgtcaccaacaccctgggcgacaccgccatcaacttcgccggcacttgggatcccatcgtttggctgctcctgctgttctgcgtcacttgcgctgtggctctggtcgcaatcctgggctccaacaagaaggtcggcaccctggaaatgccggctgagatcgcacaggcagatcaggttgctccggctgacgccaagtatgaacccttcttctccggtgaagaaagcgtttattctcaggttggcggctccgacctgttctggggcttcaagcataacctgaaaaagtacttcagctatatgcatgactggcacagcggtatcgttaacgactacgctctgtacggcgtggtggcgatcgcctttgtcctggtcttctgcgtcgcgtttctgtaa

SEQ ID NO: 872 - DNA, 1485 bp, Unknown
  Unknown gut bacteria
aaccccgccaccgcctttgagacgaatgagatcttggccatctcggacgagaagctggaacagttttatcaggatgttccggcgctggagggctatcgccgtcacctggatgagatccgccgccgccgtgcccacatcctctctccggcggaggaacggctgctggccatggctggggagctgtctgacaatcccgacaatatcttctccatgctcaatgacgccgacctgacctttcctgacgccattgacgcccagggggcggcgcaccatgtgacccatggttcctatatccccatgatgtacggcgccgatcgcaccctgcgcaaatccgcgttcgagtccctgtacggggtctacgagcgccacaagaacaccctggccgccaccctggccgcccaggccaaacagctgtggttcttcgcccaggcacggaactatccctccgccctggccgctgccctggatcggacggaggtgccggagagcgtctatcacagcctgatcgacgcagtgcgggagaatctgcccaagctgcaccggtacaccagcctgcgcaagaagctgctgggggtggaggagctgcatttctacgacctgtacgccaatatggtgggggatgtggagatgaagttcacctttgcggaagccaaggagctggtgctcaaggcgctggcgcctttgagcgagaactatctgaacggtctgcgggcgggctttgaaggccggtggatcgacgtgtacgagaacgtgggcaagcgctctggcgcttacagctccggcgctcgcccccacccctttgtgctgctcaacttccagggcaccctcaacgatgtattcaccctggcacacgagatggggcacgctatgcactctgaaatgtccaacgtgaaccagccggtggtctattccgattacgttatctttgtagccgaggtggcttccacctgtaatgaagccctgctgatggaatacctgctcaaccacaccaccgacaagcgggaaaaggcttatctcatcaactacttcctggaacagttccgcaccaccctgtatcgtcagaccatgtttgcggaattcgagttgcagatcaatgagctggcacagcagggacagggcatcaccgccgaccggtgctgtgagatctatcggaagctcaacgaggactactttggcaaggacatcgtggtggatgaccagattgccctggagtgggcgcgcatccctcacttctactacaactactatgtctaccagtacgccaccggctacgccgctgccattgccatcagccgccgtatcctgaaggaaggccagccggctgtggacgattatttcaagttcctgtccggcggctgctccatgccgcccatcgagctgctgaagctggcgggcgtggatctgtccactccggcacccatccaccaggcgctggagctgtttgaccagctcatcgaccagttggatgagctgttggcggaataa

SEQ ID NO: 873 - DNA, 852 bp, Unknown
  Unknown gut bacteria
atgaagaggaataagctgttctccatcccctatatcatctggatggctctgtttgtagtagcgcccatcgtcctggtggtgctctacgccttcactgccgccgatggcggcttcacctttgccaacttcacccgaatgggcaattactttggggtctttgtccgcagcttctggctggcactcatcgccactgccatctgcctggtcattggctaccccatcgcctatctcatctccaaggagagcaagcggttccagcgcatcagcatggcgctgatcatgctgcccatgtggatgaacttcctgctgcgtacctacgcttggatgtccattttggagaataccggtctgctcaaccgcttttttagcgccattggcctcatcgacctggtcaacggcatcctgggcaccaacatgacccacttcaacatgatcaacaccccaggcgctgtggtgttgggcatggtgtataatttcctgcccttcatgatcctgcccatccactcggtcattcaaaaaattgaccggaacctcatcgaggccgcgcaggatctgggttccaacaactaccacgtctttaccaaagtcatcttcccgctgagcctgcctggcgtcctgtccggcatcaccatggtgttcgtgcctgccgtgagcacctttgccatctccaagctgctggggggcagcaaggatttattgctgggcgacctcatcgagattcaattcctaggctctgcctacaatccccatctgggctccgccatcagcctggtcatgatgctcattgttgtgatctgcatggcggtcatgaaccggttcggtgaaggggaagaaacggcggttatgctatga

SEQ ID NO: 874 - DNA, 729 bp, Unknown
  Unknown gut bacteria
ttgagtgcttggtttgcagaagtgcaacagaaatttattgcggactttatcgaaaaagaccgttggacttacatcactgacggcctgaagatcaccatcatcgtcaccctgctggcgttgatcgttggcctgatcctggggatcctcatcgccatggtgcgctgtacccacgaccagacccgcccgaagtggttccgttcgcccggcaacttcctgctgaagctggctgacgccatctgtcggctctacatcaccgttatccgcggcacgcccaccttggtgcagctgctgatcatcaacttcgtcatcctggtctccgcccagaaaatcaccgttgccgtcatcaccttcggcatcaactccggcgcctatgtggccgagatcatccgagggggcatcatgggcgtggacaagggacagatggaggctggacgctccctgggcatgagctatgtgaccaccatgaaggacatcatcctgccccaggccatgaaaagcgccctgcccgccctgatcaacgagatgatcaccctgctgaaagagacgtccatctgcggctacatcggcctgaatgagctgacccgcggcggcgacatcatccgtggtatcaccttcgatgcccttttccccctgttcactgtggcgctgatctatctcgtcatggtgctctttatccagtggatcatgggcaaagtggaaaggaggctgcgcagcagtgattatcgttaa

SEQ ID NO: 875 - DNA, 1218 bp, Unknown
  Unknown gut bacteria
atgaagcgaaaacccattgcactgttactgatcctctccatgctgctggccttgtccctgaccggctgcggcaaggacaccgccctgacggtctacgccgaaggcaatttcatccgtcaggatctcatcgacgccttcacggaggagacgggcatcgaggtcaactacattatcggcacccgctctccggcagagaccaaggccaagaccgatgatgccaacagcaccaagaccgattccagtgcggacgaagaagtggtgctgccggaagaatcctcggtggacgtcctgtccgaagttcgggcgtggaaggaggaggacacccaggcgcgggcggaaagctcggaatctgatggcgccgtctgcgattatgacgtgatcctcaccgaccaggacatcctctcccagctgaaggaggaggattgcctgatggagctggacaccaagaaggtgtccaactatgacaacatcgccaagaaatatcgcaagctcaacggagatggcgctctgtacggtatccccgccctgtggggcatcgccggcatcgtctgggacaccaagctggtggatacccaagtgagcagctgggacattttgtgggatgagacttacaagggcaaaatcgtcatgcccgctaccgcgcgggaatgtgccgctgtggcgctgaagcgccagggcaaggacgtgaacaccacggacaaaaaggagctggaggacgcctacaagctgctggatgaacagaaggatctggctgccggatacaccagccgagtggcctacaccatgatgaccaaccaatccgccgccctggctgtggctgactccggtgccgccattgacatgatgagcaacaatgcaaaccttgccttcgccctgcctgacgagggcagctggcgggtgtgctactcctattgtgtccccgctgggacggagtggccggaggaagcgcagaagttcatcaactatatgtgctccgccaacaacctggccaagaacgccgtgtacagcaaatactccaccacctctggggaagcgctgaagaagatgaaccagagctggcacgacaatccgctggcctatccggacgagaccatccgcaagcagtcccccttcctcaccggcctgcccgctgaaaccgagacccttcacggctccctgttcgcccagctcaccggcgcggacacagccgcagacaacaccaacaaccctcagtcctga

SEQ ID NO: 876 - DNA, 750 bp, Unknown
  Unknown gut bacteria
atgaaccactggaaacgaaccatgggcaccttgtgcctgaccggtctgctctgcctgagcttggccgcttgcggcggaaaggcaccgaccgccagcaaatctgccccgtccagcgcccctgacacctcggagccggtcgccggagcggactggaccacctggggcatcatcaacgaccaaaagactctcatccagatgggggcggaaaaggaagtctatgtctgcacctatgacgaccgtgtggacttgaacgagaccgtcggcggcagcgcccccaccctgtatacccagctgacctatccgaaaaaggtggaatccgcggcgaaggcgtatgagggcatctcctttgtggatcggaacggcgatggacagagcgatgccacgctgaccctgaaacagggggaaaagacgaccacctgggtgtggtactgggaggacaaagaaggctttgtgtatcagagcgaacccaaccaggcacatcctgagatcagtccttatgtggggctttggtggtatgagcaggcgcatcgttggctgcacatttacgatgacgccacctggtcttttgtcaattcggaggatgaggtcattgagtccggcaccgcacaggcagacaaggacggtgtgaccctgcgctatgacggcagcggggacactctgcggctggacaatgcggaaaacggtgccctgctggacagcaccaagaacggcgaattgacttccacagagcagattccagcagaaaaatag

SEQ ID NO: 877 - DNA, 1371 bp, Unknown
  Unknown gut bacteria
gccggtctggtggagctgaagctggaggagcatggtcttttaaagcagaccaagattcacacctgtgccgccggcgataagatcaaggcgggcgccttcaccgtggaattcatccacatcaaccattccatcgctgacgctgtggccttcgccatccacacccctgtgggggtctgtgtccacaccggcgactttaagatcgaccccactcccatctccggcggcatggccgacctggcacggctgggacagttggggaaggagggcgtcctgctgatgctctgtgactccaccaacgtggagcgctccggcttcaccaagagcgagcgcagcgtgggggacagctttgacgccctctttaatggctgtgatcagcgcatcatcgtcaccaccttctcctccaacgtagatcgcatccagcaggtggtaaatgtggcggcacggtatggacggaaggtggctgtgtgcggccgcagtatggaaaacgccttaaaggtatccaccaagttgggttacatgaaggtgccagaaggcaccctggcagacttgaaccagatcaaaagcctgcccagcaataaagtctgtatcgtcaccactggcagccagggcgagaccatgtccgccctcacccggattgccttctccacccatcggcagatcgaaatccagcctggtgaccgcgttatcctctccgcttccgctatccctggcaacgagcatgccatcggcacggtcatcaacgagctgtaccggaagggagcggaagtggtcaacgagcgcttgggcgccctccatgtctccggccacgcctgtcagcaggagctgatgatcatgcacgccctggtcaagcccaagttctttatgcccgtccacggcgaacagcgccacctgaaggtacacgctcagctggcacagcggatggggatgaacccgaagaacatcgtcatcagcgagaccggccgagtggtggaagtcacccgtgaccgcatcaagctggccggcagtgtcccctccggccgagtgctggtggatggctacggtgtaggcgatgtgggcagcgtggtgctccgagaccggaagcggctggcggaagatggtgtcattgtggtggtgctcaccctgtccagcacggacagcagcctggttaccggcccagatatcgtgacccgcggcttcgtctatgtgaaggagtcagaggagctgatggacgcactgaaggagctggccaccgatgtcatgaacgactgtgaggcgcggcacatcaccgattgggcagccatcaagggcgcagtcaaaggggagatctccagcttcctgtataaaaagaccaagcgcagtcccatgatcctgccggtcatcatggaagtgtaa

SEQ ID NO: 878 - DNA, 1140 bp, Unknown
  Unknown gut bacteria
atgacattcatccttcgcttggccaaggtcggcctgcggtttctctatcttttcctgcggccgctgccgctgaaaaataaggtcgtttttttctcacgccagtccagcaccatcccgctggattttaccttgctggcccaggagattcaaaagcaatcgccggagacggaaattgtgtatttttgccggaaaatgcggcgaaaaaccaaggttttctcctactgctgctttattttacatagcctgtatcatttggccacagcctccattgccgtcaccgatacctactccatccaactctgtgtcctccatcccaagcgggggcagacggtggtacaggtgtggcacgcagtgggtgcggtgaagcagttcagctaccagtgcctggacaagcccggcggacagccgacggcgctggcgaaggccatggaaatgcacaaaaactacgactatgtgttctgcacgtccgaggccacggcggacatctacgcccagggctttcagatgcccagagagaagatcttgcccctggggatgccccgtgtagactatctgcgggaggctgatccggctctgcgggcacgttatctggaagcccggccggagctggcagggaagcagatctgtctctatctgcccaccttccgagcgggggtggaagtggggatggagcggctgatggatgccttttccactgtggaaaacgcagtgctgctcatcaagcctcaccccatgagcaagatcaccctgccggaggatgtgtcggtggggaagggctggtctacctatgagatgatgaaggtggcggactgcgtgatcaccgactactccgctgcctccttggaagtgagcctgctgaacaagccggtgtatctgtacctgtacgattacgacgcctacacggacgcccaggggttgaacatcgacctgtggaaagcgtttccccacgcagccttccggacggcggcggaggtggctcaggcagtgcagagggaggactacgattgggcggcattgcaagtctatcgggagacgtatatccagaccgctcaggaggacaataccggaaacattgtccggttcctgctccagcgcatcccggaacacctgcgaaagcagcgagaacctgcggaggtataa

SEQ ID NO: 879 - DNA, 1140 bp, Unknown
  Unknown gut bacteria
ctgttggagcagatgagcgaccggaatggggagtttgcggtcatcgccgccggatatcctaagcccatgaaggcgttcctggattccaatccggggtttgagagccggtttgaaaaggatttcctgcttcgggattatactgcgaaagagctgtgccagatcttcctccagaaatgtcggaagaagcgattcgtcctggccgaggatttgcaggaggtgctggaactgctgtttgagaacatgattgatgccaggatcaagaactgggccaacggtcgggaagcggaaaagctggaggttcggatgcgcaagctgtgggcacgggatccggagcttcgggatggacagcgggtctatgctctgcgccacctgccggagcagtacctgtcctacctgtctgacgaaggggaggaaggggaggaatctgctgcccccagccccaagcaggccaaggcatcattcaccctgtcggcggacaagctggctcagccggaaggagcgggaaactgggaagatcgctatctgaaccaggtggccagcgtggtctacatccgagcgcaaaatgaaggcggcgtcagcagcggcagcggctctatcctcaccaaggacggctatattttgacttgtaatcacgttattgagggcagcagcagcatcctggtgcgcctgaaggtggataacggtcaaaagaccttgtggaatccggcggatgtggtgtggtcggacaaggaattggacgcagccatcttgaagatggaggacggagagtatcccaccctgcctctgcgccccttgtcccagcccacccaaactggcgagtccatctatcactggggctaccccttcggtgggaagctcagcgacgacctgaacgagttgcagcccagtttgttccagggctatatctcctccacccagatcaagaacggtctggagcgcatcaataccaacatggaggccaaaaagggctgttctggcggcccagtcttttccaagaaggacggcgccatcattggcatcctctgcggctcccagacctctggggacgagcactttttagaggaaatcaactatgtgcttccggtaaaatacatttgggagcgagttgtcactcatacagaaacagaacaggagaaggga

SEQ ID NO: 880 - DNA, 1083 bp, Unknown
  Unknown gut bacteria
ttttataaatacttccaggacaccatcgagtatctgctggggccctccaacgtggtcatccactacatcaccagcgatccggacgaccagatcttcgccctggcggaaaaagagccccgcatcaagccctattacatcggcgaaaagcggctcatcaccctgatgatgaagatggaagcggacatcgtctgcatgaccatgccggacatcgagacgttccacatcaagcgcagctacatcaaaaaggacatcgagtacgtctacctgttccacggctttgccagcacccacatggtgctgcgggagactgcttttgaccactacgacaccatcttctgctccggccctgtccagatgaaggagattcgggcacgggaagaattgaaaggtctgcctcccaaaaaactcatcgacaccggctacggcgtcatcgagcacctgcgggcggcctacgaacagatggagcaggtaccgcacgaccggcctcagatcttgatcgccccctcctggcagaaggacaacatcctggagtcctgcattgacccgctcctgcgccagctcctggccgatgaccggtacaaggtcatcgtccgcccccatcccgaatggatcaagcgcttcccccagaagcaggaagccttccagcagcggcaccaggcggagctggaagccggcaaattcgagttccaaacggacttctcctccggcgatacggtgtatcagtccgatctggtcatcaccgactggtcctccatcgccatggagttctccttcaccacctgcaagccctccctgttcatcaacacccctatgaaggttatgaatcccaactaccaggagctgaacctggaaccgctggatctctccctgcgggatcagttgggacggagcgtagcgctggacgccgtgggcagccccgccggacaggcggtggccgatctgctggcggacgcagccggatatcaggagcgcattggcaagctggtttacgagttgatgcccaacttcggccacagcggtgagatcggcggcaagtatctcctccactcccttcaggagaagatccagaaccggaaggattga

SEQ ID NO: 881 - DNA, 849 bp, Unknown
  Unknown gut bacteria
tcccgcaacgccaacgaccgcttcgacgccgccttctggcgccgcagagtggcctacgccatcgcctaccgcaagaccgtcatgcccggcgccgacttccagtgctgccgcctgatccacggggaggcagaccagatgcctggcctgaccgtagaccgttacggctccatcttggtggcgcaggtgctgtccctgggcatggagcaggtgaaggacgtggtctttcaagccctctatgatgagctgacccgcttaggcgagcgcatcaccggcatctaccagcgggacgatgtggccatccgagagctggaggggatggagcagatgaagggctggcacccgctgcccaacctgccaacgcctacagagacggtcacggagatgaccgaaaacggcgtccgttacggggtggatgtggaaaacggtcaaaagaccggcttcttcctggatcagaaatacaaccgccaggcggtgaaacgattggcacaagataagtatgtcctagattgctttacccataccggttccttcggcctgaatgccgcactgggcggggcaaagcatgtgacctgcgtggacgtgtccgcctcggccattgaaatggccacccataatgcacaggtcaacggcctgtccgaccggatggacttcatcaccgctgacgtctttcaactgctcaccgacctggcgcagcagaagcacaccccctatgacttcatcatcctggatccgcctgccttcaccaaaagccgcaagaccgtccgggacgccatccgaggctataaggaaatcaacctgaaagccatgaaggtgttgccccgaggaggctacctggccacctgctcctgc

SEQ ID NO: 882 - DNA, 1410 bp, Unknown
  Unknown gut bacteria
atgctgactcggtatcagaacagcaaacactccaagtccatccttcaagacaccgccgagggcaaggtggatattctcatcggcacccatcggctgctgcaaaagagcatccagttcaaggatctgggcttgctggtcattgacgaggaacagcggtttggggtcacccacaaggagcggctgaaggaattggccaagcaggtggatgtgctgaccctctctgccacccctatcccccgaacgctgaacatggcgttgtccggtctgcgggatatgtccgttatcgaccagccgccccaagatcggcagccggtgcagacctatgtgctggagcacaactggtcggtgctcatggacgccatccggcgtgaaattggtcggggcggacaggtgtactatctgcacaaccgagtggagaccattgagcagacagccagcaagattcgagccatgctggacgatgcctccatcgttgtggacatcgcccacggccagatgacccaggagcagctctccagcgtgatggcgcggatggtggatggggaggttcagattttggtctgcaccaccatcatcgaaaccggcatcgacatccccaacgtgaacaccctggtcattgaggacgctgaccggatggggctggcgcagctgcaccagattcgaggccgagtggggcgttcctctcgccgtgcctatgcctatctgacctatcgaaagggtaaggttctcagtgaagtggccaccaagcggctgactgccgtgcgggagttcgccgccttcggcgcagggttcaagatcgccatgcgggacttagagatccgtggggcgggcaatctgctgggacgggaacagtcggggaacctgatgagcgtgggctatgatatgtacttaaaactgctggaagaagcggtattggaggaacggggcgagacgccggtgcggacggaggaagtgaccgccgacctggtcatctccgccaacatcccctcctactacgtccctgccgcggaacagcggatggatctctatcgccgcatcgccaagatccgcaaggaacgggacgctgatgacgtggtggacgaactcattgaccggtatggcgatccgcctcgtgcggtgaacaacctgatctctgtggcgctgctccgctcggcggccagtgactgtgggattcaggacattgcgcagaaggggatgaccctccggtttacgctgaaggactttgacacccgtcaaatcacaaaggtgagcgatttccccaccttccgcaatcgggtttccatgacctcagacaagcaggatcggccagtgcttgcgctgaaattgaaggccaaagaggatccgctggtgtgggcaaagaagctggtgcaggagtatgccaacgcagcagcccaaaaaaaggaagggtaa

SEQ ID NO: 883 - DNA, 1530 bp, Unknown
  Unknown gut bacteria
ctcactccggcacagctgaccgaagcggctctgcgccgcggcgaaggcaccttgagcaataccggtgcgctggtggtcaccacgggcaagtacaccggccgttctcctgacgacaagttcatcgtggatacgccgaccatccatgacaagatcgcatggggcaaagtgaaccgtcccatctctcgggaaaagtttgacgccatccgcggcaagctggctgcctatctgcaaaaccgcgaagtgtttattttcgatggcatggcaggtgctgaccccattgacacccagaagttccgagtcatcaatgagctggcatctcagaaccttttcattcatcagctgctcatccgtcccaccgaggaggagctggccaactatggcgaaccggattacaccatcctctgcgcccctggcttcaagtgtgatcctgagattgatggcgtcaactctgaggcagccatcatgatcgactatgaggcacatctgatcgtcatcgccggctctcagtacgcaggcgagatcaagaaatctgtgttctccaccatgaacttcatcatgaccgacatggacgttctgcccatgcactgctccgccaacatggatccggtcaccggcgaatccgccgttttcttcggcctgtccggcaccggcaaaaccacgctgtccgctgaccctgaccggatgctcatcggtgacgatgaacacggctggtctgagcggggcatcttcaacttcgagggcggatgctatgccaagtgcatcgacctggaggaggagaacgagccggagatctatcacgccatccgcttcggctccgtggtggaaaacgtcatcatggatccggaaacccgtgaactggacttcaccgatcgctccctcaccgagaacacccgtgtgggctatccggtggactacatctccaacgcccagatccccggcgtaggcggcatccccaaggtggtcatcttcctgactgccgatgcctttggcgtcctgcctcccatctcccgtctgacgcgagacggcgcaatgtaccactttgtcaccggatttactgcaaagctggccggtacggaacggggcgtcaaggagcctcagcccaccttctccaccctgttcggggaacccttcatgcccagagaggcagatgtgtacgcccatatgctgggggataagatcgatcgctatggcaccaaggtctacctgatcaataccggctgggcaggcggcccctatggcgtcggctcccgcatgaagctgaaatacacccgtgccatggtcaccgcagccctgaacggcgacttcgaccatgtggaatacaagcaccacgagatcttcaacgtggacgttcctcagtcctgcccccatgtgcccgatgagatcatgaatcccagagacacttgggcggacaaggaagcctacgacaaggcagccaacaagctggccgccatgtttgaggaaaacttcgccaccaagtaccccaacatcgcccagcacattgtggacgcaggcccacacgcaaagcactga

SEQ ID NO: 884 - DNA, 1032 bp, Unknown
  Unknown gut bacteria
atgcccatcgcagtgctctccgccatgaaggaggccagcacccatcagctgctggtgaaaggcgggcggtttatggaggcggtctccgtggcagacaccattctgttcgacaagaccggcaccctgacctacgcaacgcccaaagtggccaagatcgtcaccttcggcgggcaggatgaggcggagatgctccgtctggccgcctgcctggaggaacattatccccactccatggccaaggccgtggtgtccgaggcacagcggagagcactccgccacgaggaatgccactctgaggtggaatacctggtggctcacggcatctccagcaaggtcaacggcgaaaaggtcatcatcggcagtcatcactttgtctttgatgacgaaaagtgcgtgatccctgctggcgaccaggccaagtttgatgccctgcctgcggaatactcccacctgtacctagccattggcggcgttctgtccgcagtcatctgcgtggaggatcccctccgtgcggaagcggcggaagtcatccagggactgcgggagctgggcatctccaagctggtcatgatgaccggtgacaacgaaaagaccgctcgctctgtggctgaaacggtgggattgacggaattccatgcaggggttctgccggaggacaaggccaactacatccgtgccgaacacgcagcaggccgcaaggtcatcatgctgggggacggcgtcaatgactcccctgccctgtccgaggccgatgtgggcatcgccattcgggacggcgctgccatcgctcgagaagtggcggacatcaccgtaggagcggacaacctgtatggtctgctgaccctcaagaagctgagtgacgccttgatggcgcgcattcaccacaactatcgctttatcatctcctttaacttcatgctcatttgtctcggcgtggccggcatcctgccccccgccacctccgctctgctccacaacgcttccacgttgatgatcagcctgcggagcatgaccaatctgttggaggagtaa

SEQ ID NO: 885 - DNA, 1209 bp, Unknown
  Unknown gut bacteria
atgagcgggaagaaacaggtcgatcgaaatcccttcctgcccgtgtccaaggcggatatggaggcccgtggttgggattggtacgacttcttgatcatcaacggcgacgcctatgtagaccacccttccttcggcggggtggtcatcgcgcgcaccttggaggcggaggggtatcgggtggcactgttgccccagccggactggcacagtgcggatgcatttcgtgccatggggaaacccagactggcggtcatgctctcctccggcaacctagactccatggtatccctttaccccgcagcaaaaaagcgccgccgccaggatgcctattcccccggtcatcagactggcttgcgggcggatcgggcggtgatcgtctatgccaatcgggtgcgggaagccttttcggacatacccctcatcattggtggtctggaagcctctctgcggcgatttgctcactatgactactggagcggccaggtgcgccgagcgatcttgtttgacgccagagcggatttgctcatttacggcatgggggaggcggccacgttggagattgccgcacagctcaacgccggtgtgccggtcagtgacatcaccaccgtccgaggcaccagcttcgccgcaagggagcgggaagcctgtgtgtatccctgggtggaggtgccctcttatgaagaagtgaaggcggacaagatggcttacgccagagccaaccaggtggagtacgaggagcacgacccggtgcggggcaaggccatcttgcagaagcacgggaaccggtggctggtgaccaacccgccccagatgcccctgtccaccaaggagctggatcgcatcgcagagctgccctatgtgcgagaaccgcaccctatgtacgatgccatgggcggcgtgccggccattgaggaggtgcgtttttcggtcactcataaccgtgggtgcatcggcggctgtaatttctgtgccctggcctttcatcaggggcggatgatgacctgccgcagtcacgagagcgttatccgagaggtcacagcgctgacccatcaccctggatttaagggctacatccacgatgtaggcggccctacggccaacctgcgccacccaagctgtaagaagcagttgaaggagggagtctgtgccaaacgggtgtgtctggcgcccaagccctgtcccaacctggatgcggatgagtccgattat

SEQ ID NO: 886 - DNA, 1158 bp, Unknown
  Unknown gut bacteria
atgaccagaatttacatcatccgccatgcggaggcggagggaaatctataccggcgcatccatggtcaatatgatagcttggtcacccccttagggtaccggcagattcaagcgctggagaaacggttccaggatatccacttggatgcggtctattccagcgacctgttccgcacccagaccaccgccaaagccctctatctgcccaaagggctgcccttgcagctggaaccagggctgcgagagatctccatgggggattgggaggacgacacctggggcggtgcggcacggaaatatccggagcagatggcctatttctccggcggaaactcccactacacctccatgggcggtgagagctttcaagagttgcgagagcgggtggtggccacctattaccggctggcggcagccaacgatggtaagaccatcgcctgcgtcagccacggggaggccatccggacggcggtgaacgccttctatggccgccctttggaggagatgcacaacatgatccccagcgataacacagcggtcagctgtgtggagatcgagggggaacaggccaaggtgatcttctacggggacggcgcgcacctgacaccggaactgtccaccttgggcaaacagacctggtggcgggaacccaaggagaaggcagccattgagaaccaaaatatctggtatcgtccctgggaaccgacggcggagcgggagttgtatgagcgctaccgtcgggaggcttggatcagcgtccacggtgacgagccttgccccatggagcagttctatcaggcggcgaaggcgtccagtgaagcggacgccaaagcggtcatggtggccatgaatggggaggagatcgcagggctgctgcaaatggacttggaacgatacgcagaagccaacgctggatacattcccttctactatatgaacccaaaattccgccatcacggcttgggtatccagctcattggccaggctgtgtccaccttccgtcccatgggacgcaccaagctccgcctgcggtgcagtccggacaatgacctagcccagcggttttatctgcgcaacgggttcaccgacatcgggccggctgcggacagcgcagttccgctgcggctgatggagaaagagatcgggtatccggtatga

SEQ ID NO: 887 - DNA, 840 bp, Unknown
  Unknown gut bacteria
atgaatatgctttttggtgaaatgatcaatcgtctgaaggcgaatcccaagaaaatcgtctttaccgaaggtaccgatccccgtatcctggaagccgcttcccgtctgctggctggttatttcctgcagcccgttctggtcggcaaccccgatgagatccaggccgcttctgaagaagctggctacaatatccgtggcgcaaccatcgttgaccctgataactatcctgaaatggacgaaatggtcgctgaactgtgcgaactgcgtaaaagcaagggcatgacccctgaggaagcgctgcaagtgctcaagcatggcaactacttcggcaccatgctggtgaagatgggtaaggctgacgctctgctgggcggcgctacctattccaccgctgacaccgtccgtcccgccctccagctgattaagaccaagcccggcaataagatcgtatcttcttgcttcatcctggttcgtggcgctgcaagtggtaaggaagaagtcctggccatgggtgactgcgccatcaacatcaagcccaacgaagatgacctggtggagattgctgctgaaactgcaaactgcgcccgcgtctttggcgtagaccccaaggtggcattcttgagctattctacccatggttctggctccggcgaagacgtggataagatgcgcaatgccactcgtaagtgcaaggcagcccatcctgatctgcccatcgaaggtgagatccagtttgacgccgctgtggcacctcgtgtggcaaagatcaagtgccccgactccgaagtagctggctatgccaacaccttcgtgttccctgacatcaacgccggcaacatc

SEQ ID NO: 888 - DNA, 888 bp, Unknown
  Unknown gut bacteria
accaatttcatcgcccccatgctcaccggtgaggagttcaccgaggacgagcgaacgttgctggtgatctgcgaggaaggcgaggaagaatatgacgaggccgccctgggcaagcacaacgtgcgtccgatctatctggacggaaaagaggcgctgacccaggaaaaactgctgtccatcgagaaagaataccaccccacccaggtggtggtagagtacaacggaatgtggcagctgggcgacctagtgcctgccctgcccaagcactggacgctctatcagatcgtcactgtggtggatgccaccacctttgacagttatgccaagaacatggcaagcctgatgatggaacagctgcgggaggcggatttgatcgttttcaaccgttgcaccgatgaactggtagaacagctgcgccagcgcaatctgaaaatgctcaaccgtcgggcggagatgtatttggaatacaacgatgaccggatggaaaactatgacaatggtctgtgccccttcgacttggacgtgccggtgctggagctgagcgacgatgactatggcttctggtacaccgactgcatggacaacccccagcgctacgagggcatgacggtgaaattccgtggcatcgtggcacagtcccccaagttccctcgaaatatgtacgcagtcggccggttcgctatggtctgctgcgcagaagacaccgccttcttggggatgctctgcaccggaccggaacagaagcagctcaagacccgcgactgggtagaagtaaccgctcaggtgcgtatcaaaaacctcaaggttctaggcggtgaaggccctgtcctctacaccacacaagtcaccccctgccaggctcccaaggatgacctgatctatttctaa

SEQ ID NO: 889 - DNA, 1266 bp, Unknown
  Unknown gut bacteria
atgatcctcatcattgccgtgcctgtcattgccctggtcattggcctgctgatgaaggtctgtatggggctgttccgtgccatgcagcatcggctggatctgctcaatgaaaccgtccaggaaaatctgaccgccatccgtgtggtcaaatcctatgtccgagaggaatttgagaaggagaagttcaaaacctccaacgacaacttcaccaaagccggcatgaacgtgagcctgcgcatcatcctcatgcagcctgctatgatgttgggcgtctccatctccaccgtcctcatcctctacctgggcggccagaccgtcctgcgcggcgacctggagattggcctgctgtcctcgctgctgaactacgtcctcatggtgctcatgagcgttatgatggtggctatgtgcctgttgatgtacacccgtgccaaggcctgcgcccagcgtatctttgaagtcatcgacaccgactcggacattcaggacggtaccgcacccgctctgccggaacaagcaggtcaggtggaatttcgggatgtctcctttaaatatgacacctccggcaccggcgataacgtcctgtcccacatctccttcactgccaagcccggccaggtgattgccgtcattggcggcaccggcgagggcaaatccaccctggtcaatctcatccctcggttctacgacgccacggaaggggaagtgctggtggacggcatcaacgtgaaagactatccgctggaagacctgcgccaccgtattggcatggtgctccaaaacaacgtcctgttctccggcaccatccgagagaacctgctgtggggcaaccccaacgccacggaagaagaaatcatccaagcggccaaggacgcccaggcttatgacttcatcctatccttccccaagggctttgacacctggctggaacagggcggcgtcaacgtctccggcggccagaagcagcgcctgtgcaccgcccgggccttgctcaagcccccggccatcctcattctggacgactccacctccgctgtggactctgccacggaagcccgcatccgagaatccttccatcagaacctgaaacacaccacggttttcctcatcgcccagcgtatcagctcggtgcgggacgccgatcagatcatcattttggatgacggcaaggtggccgacatcggcacccacgaccagctgatggcagagagcaagatctatcaggaaatctatcactcccagctgaaaggaggggtctaccatggctga

SEQ ID NO: 890 - DNA, 828 bp, Unknown
  Unknown gut bacteria
atgtctttgaaacagcgcatcaaaattttgctgtatgatttcgtgaaagtgtgcccgcctgcccgacggctggtgcggcatatgctctttcaataccgagagatcaccttccggcggcacaccaagggcattgccaccgaccccaacctgatggtattctgcaccttctccggtcgggggtattccgactcgccccgcgccatttttgagtacatggccaaccgtccggaggagtataggcagtaccggtatgtgtggatcttccagcatccggagcggttccggtggctggaggagcagtaccccaatacgaccgtgctccagtgggccagtgtgccctatcaaagagccatggcggcggcaaagtattgggtgttcaattatcgggtcagcgaccacatttggccgaagaaagaccaggtctatctggaatgttggcacggaacgcctttgaaacgattggggtacgacctgcaaaatgagggcggaaatgtgatgaattccctgaaggaagttcgggaaaagtacgatctggatgcggcaaagttccgttacatcctgtccccctctgagttcaccacggagaaattcacctctgcttggaacctgaagcaggcggggaaggagaacgccatccttcaggagggctatccccgcaacgactacctgctcaatcacacggcggaggatgtggagcaggtgaaacgagccctccacatcaggccggaggacatcggcggcaggaaaattgttctctacgcccccacctggcgggacaaccagcacgactccgccgatgggtacagctatcagctgggggtggatttt

SEQ ID NO: 891 - DNA, 1383 bp, Unknown
  Unknown gut bacteria
atgccggatttaaagtggaaaaaccgcattatgctaattttttcactgatcttctacgcctgggcaggcccagcctatctgctcctgctcatcgggatgaccttcgccgactgggtggtagcgctccagatgagcaagaactgggaacgtccggcacggaagcggtggttggtcatcggctgtgtcatcaacatcggcctgctgtgtatctttaaatacctgaccttcttcctccagaacttccacaactggtttggtgttccggagaacgtcctggtcatcgccctgcccatcggcatcagtttctacaccttccagctgctgagctatatggtggacgtgtaccggcaagaagtgaagccccaagagaacttcttccgcctcctcctctatgtcagcctctttcatcagtgcattgccggccccatcgtccgctatgaacacgtagaacacgagctgaccgagcgcaaggcaaccctcactgatttttcctacggcatccgccgtttcaccatcggcctggccaaaaaggctctgttagccaacacctgcggcagcctggccgacaccttcttagctcccacctcgggagacaacatcctcaccaccctctcctcccagccggtgctggcggtgtggctggggatgctggcgtacaccatgcagatctatctggacttctccgcctattcggatatggccattggtatgggtcggatgatcggctttcactatcatgagaacttcaactatccgtatatctccgcctcagtcaccgacttttggcgcagatggcacatctccctgagcagctttttccgggactatgtatacattcccctgggcggcaaccgagtcagccacgtccgccacattatcaatctgctcatcgtctgggcgctgaccggcttttggcatggcgccagttggaacttcctgctgtggggtctgtactactttgtctttttggtgctggagaagtacgtcttctctgaccgctttcagcgcacccccaaggcggtgtcccacctgctgaccctctttgtcatctccttcggctggatgatcttccggtgcgacaagctgtcctatgtgggcaagatcttcctggggctgtttggtctgaccggcaatggattcaccaactacgagaccaccaccgccctgaaggccaactttatcttcctgatcgtggccatcctagcctgcacgccgctggtaaagaccctgggcgaagtgctccaggaacgagctgcgtccgagtccaaggcactgacgctgatgaacgtcatcaatgtggcagggcctatcctgttgctcctgctctccaccgccgcactggtgggagacagctacaaccccttcctctactttagattctaa

SEQ ID NO: 892 - DNA, 891 bp, Unknown
  Unknown gut bacteria
atgaccaattatccgtacaagacccgtgaaggcggcgcaaccgtcacggttttcgtcccctatgactgcggcaaccactgcccgttctgtatcaacaagcaggaatatgagaaccctgtaggcttcagcctggagaagatctgtgaatccatccgcaccatggatgagattacccccaagtgtgacttcgtcttcaccggcggtgagcccttcgctgacctggacgctttgcagaccatgctcgatcagatccccaccacccatcgggtgttcatcaataccacgctgcccaccctccaaggtgcgaccgaggatgacctggtagccttcaccgagaagaacaaggacaaaatcacctgcatcaactgctccagacatgtggtcaagtacgttgccgaatgcagcgatgacattttcagccggatcgctgttcccgtccgtgtcaactgcgtgctgtataaggattatcccaaggaaaacctgaagccctacctggatcgcttcaagccctatggcgtctccgtccagttccgctttgactacaccgacaccacccccgaaaacctgtacgaggaagaatctgacaagatcctccacgacctgaaggatctgttccactacacgggtatggacggctgccggatgcgctgcggctatcacttcgactatgacggcatggaactgacctatcataagaccctgccctactccaccattttggaggaggacgagaacggtcagacctaccgtatcctgtatgatattatcgtcaagcagaccggccagatccattccgactgggatggcaccgtgatggacgttgacgcatatcgcaacgttgtctttgaaccctatgacctggtggttcgggaaggctacatcaacgaataa

SEQ ID NO: 893 - DNA, 1437 bp, Unknown
  Unknown gut bacteria
gacgccatccaggaggacatcaagtggctgggctatgactgggaggatcggttctactatgcgtctgactacttcgaacagatgtacgactacgctgtggagctgatccggaaggggctggcctacgtctgtcagctgacgccggaggagatggccgctcatcggggcgacatcaacactcccgccaccagcccttatcgggatcgtcccattgaggagagcctggatctgttcgctcggatgcgggccggtgaattccctgatggcgctatgaccctccgcgccaagatcgacctggccagcggcaacttcaatatgcgcgacccggccatctaccgcatcaagcacatggagcaccaccgcaccggcgacaagtggtgcatctatcccatgtatgacttcgctcaccccattgaggacgccctggagggtatcacccattccctgtgtaccctggagtttgagtcccatcgtcctctgtatgactgggtcatcaacaacatctccattccctatcacaagccccgtcagatcgagttcgcccgtctgggcatcgaccacaccgttatgtccaagcgcaagctgcgccagctggtggagcagaactatgtgtccggttgggacgacccccggatgcctaccatctgcggcctgcgccgccgaggctacacccccgcctccatccggaacttctccgagcagatcggcgtggccaaggcggactccaccgtggaatactccttcctggagcactgcctgcgcagtgacctggacgcccacgccgcccgtgtcatggccgtcctgcatccggtgcgcctgaccatcaccaactacccggacaaccagaccgagacctttgaggtggagaatcaccccaaggatccgtccctgggcacccgcaccgtccccttctccaagcacctgtatatcgaagcagacgacttcatggaggaaccggtgaagaagtacaagcgtctgacccccaacggcatggaatgccgcctgaagggcgcctatatcatcacctgcactggctgcgtgaaggacgcagagggcaacgtcatcgaagtgctggccgagtacgatcccgaatcccgtggcggcaatccggcagacggccggaagatcaaaggcgctgccatccactgggtggacgccgccactgcggtggacgccgaggtacgtctgtatgacaacctgttcagcgaccctgctcccgatgccggcggcaaggacttcctgaccgccctgaacccagattccctgaccgtcttgaaggactgtaaggtggaagccgacctggccaacgccaccgtaggcaccccctaccagttcatgcgcaccggctacttctgcctggacaacaaggacagcaagcctggcgcactggtgttcaaccggtcggtgtctttgaaggacagttttaaggcgaagtaa

SEQ ID NO: 894 - DNA, 1176 bp, Unknown
  Unknown gut bacteria
atccgctccaacctgggcacctatgccatctgcatcatcggcatcatcaacaacgccgatgcccttatcgagcagtacctgaccttcagcagcgggcattttgacgccatgactggcggcaaggtcaactccacggaactggtggcggccatgatcaaccaaaagagcagctttgccgaaggcatcagcttcgcccagaacgccatcgagggcaccgcatccatcctcatcctgaaggaggacggggcgatcatcgccgcacgagatcgggtgggacgcctgcccgtgctcatcggcaagggagaggatggatactgcgtgtccttcgagtcctttgcctataagaagctggggtacgacctggaggagcgggagctggggcctggtgagattgtagagatcaccgcagacgggatcacccagctggtgccgccgggggacgagatgcacatctgtgccttcctgtggtcttattacggctatcctacctctacttatgaagggggcaaagtggaggccatgcgctatcgcaacggcgccatcatggccgccagcgacactgaggcaggcaacaaccaggacatcgactacatcggcggcgtccccgactccggcacccctcacgccattggctacgccaacgagagcggcatccccttcgcccgtccctttatcaaatacacccccacctgggcacggagcttcatgcccacccgccagacggagcggaacaaggtggctaagatgaagcagatccccatccacgagctgatcgaggaaaagaagctgctctttgtggatgattccattgttcggggcacccagctcaaggagacggtcgaattcctgtacgccaacggcgccaaagccgtccatatgcgctccgcctgtccgcccatcatgtatggctgcaagtacctgaacttctcccgtgccaccagtgacatggagctgatcacccgccgcaccatcatggagctggaaggggaagaaggcttccagcacctggaggagtacagcgattccaccaccgagcggggcaagcagctgcggcagaccatctgtgataagttccagttcgcttccttggagttccagtccttggagggcgtcatcaagtccattgggctgcctgcctgcaagctgtgtacctattgctggaacggaaagggctaa

SEQ ID NO: 895 - DNA, 831 bp, Unknown
  Unknown gut bacteria
atgaatgaccagcattttcagacgaatcgggaggagaacggcctggtgtggttctccgcccctcgtctcaatgccaacggcggcgcagtccacggcttttccagccgcttgggcggcgtcagccgagggtatctgacctccctgaacctgggcaccagccgaggtgaccagatcgaacacgttcgagagaatttccggcgctacggggaagcggtgggctttgacagcaccaagacggttttctcccagcaggtgcatcgggacgatgtacgggtagtcaccgaaggggactgcggcaagggcttgtaccgagagcgggactatgacagtgctgatggcttggttaccaactgtcccggcgtccctttggccatcttctccgccgactgcatccccattttgttccacgattcggtacaacgagtcgtggctgcctgtcacgccggatggcgggggactgccgccggcattgtgggcaagaccgtgcaggtgatgacgcaaaccttcggctgtcagcccaaagacatccgcatggccatcggccccggtatctcccgctgctgctttgagacccacgaggacgtgccccacgccatgtgggcggttctgggcaagcaggctgacccatttatcgaccggctgtcgagggagaagtttttggtagacctgaagggcatcaacggcctgtggggtcagctggcaggggtgcctgccaaccaaattgagatctccgacctctgtaccgcctgccgccaggacttgttctggagccatcggcacgttggtgaggcccgtggggtcatgtcagcggtcatccagctgacggaatga

SEQ ID NO: 896 - DNA, 1134 bp, Unknown
  Unknown gut bacteria
atgatcatgacaaaagagacaagaagaacctgggcagagatccatctcgatcgtctggcacacaactaccgtctcctgcgggaacgtgcgccccacagcaaattcgtcggcttggtcaaggcaaatgcctacggccacggcgccgtgccggtggccaaaaagctggaagccctgggggcggactacctggcggtggcctgcctggacgaggcggagcagctgcgagacgccggtatcaagtgccccatcctggtgctgggctatacgccggtggagtacaccaacgagctgatcgacaatgacatcacccagaccgtctacagcctggaggtggccaagggtttctctgacgctgctatgaagctgggcaaaaagctccgctgccacctgaaggcggacacgggcatgagccgcctgggcgtcctctgcaccctggaaaatctggacgccgcagcagacgagctggaagccatgtatcggcaggccggcctggaagtggaggggttgttccagcacttcgccgatgccgacacctgtccggaatattctctcatgcagatccagcgctataacgccatcctccacgccctggaggaacggggctgcacctttaagctccgtcactgctgcgccggcgccgctaccttgaattacccccaggcacattatgatatgatccgcccgggcatcctgctctacggctattctcccgatcacgcctgcgatggcatgatcgacgtcaagccggtcatggaggtcaagagccgcatcggttctgtgaagaagctgcctaagggcacctgcatctcctacggccgcacctacaccctggaacgggacagcgtggtagctgccgtgcccatcggctacgccgacggcctcaaccgcctgctctccaaccgccaggagttccttctccacggtcagcgggtacgccagatcggtcgggtctgcatggatatgtgcatgatcggcgtcgccgacatccccgatgtgaagatcggtgacgtggtgaccatcttcggcgaggaggggctcctccaggagaaggcggacaccgtgggcaccatcacttatgagatgatgtgcgccgtggcgccccgtgtacctcgggtctacctggacgagaaataa

SEQ ID NO: 897 - DNA, 1278 bp, Unknown
  Unknown gut bacteria
gtgaaaccgagcaaatggattccgaagatcgtcatggtcgccttctttgtcggcgctatcctctattttgtcggctatgccgtgcagaccttccgcaacgacatcaccaccgtcactgtctatgagactggggtggaggactccgtggataccacaggcttggtggttcggcaggagacgttattggaaggcagcggcgagcggatggaggtgctgccggcagaaggggaagcagtggcgaaaggggagatcatcgcccgtatctaccaggatcaggcggcattggagcagcaccagaacctcaaggccaagcagaccgagcgagaagcgctgcaatatgtcctgagccactccaccgagtcctcggacacggcggagctgagcaaacgggtcattgcctccttggaatccatccgagcgactgtgtttcatgaagatctgtccgacctatctgaccagatccagtcggtggagaacatgatttaccggcaggattatacttataagggcagcgaagcggtgaccaaggagatcaaccagctgagcaaggagatcaaacagctggagaaggaagcggacagcaccgtttccaccatcaaggccaagcaggcgggaaccttctccgctatggtggatggctacgagacggtgctggagcctgccaaactgtccggcctgacgccggcaaagctggatgagctggtcaaggcgcggcaggaggtcaaggaaggtaagtatctaggcaagatcatcaccggcggcaaatggtactatgcggtgagcatggacgtggcgaatgtggagcggatgcatgaaggcatgaccgtgacggtgcgctttgacaacgtggccggtgaacagatcatgaaggtggaaaccatcggggacgccaagggcgatcagaagcaggtcaccgtggtattttcctccacccgccacctggccgagacctccctgctgcggcagcagtcggcggcggtcatctatgagagttaccgtggcttccgggtgcccaaagaggcgctgcggatggagggggacaagtattacctctatcgagtcagcggcgcccagctgcggaaggtggaagtggagatcctgtgccaactggatgactactatgtggtctggcagggcaagtccgtggacaaggacggcaaatcggtgcagcagagcgcattggaaaaagcaaagcagattcgagacggcgacaccatcgtggtgcgggggatgaacctgtacgacggaaaagtggtgggcagtcgtgcaaagacataa

SEQ ID NO: 898 - DNA, 639 bp, Unknown
  Unknown gut bacteria
atgaagctgtggaaacgcaatgcggtggtggccgcgatcgtgctctttgtctgtgtggcggtgtatctgaactggtcctacgaccaggggcagtcggtcagcggcatgggctctgccgccgccaacgtgacgtcggagcggaatttgggcgaagcagcgctggtgaactcggacggcgccctgggcttagaggagggtagtgcctccagcagcgcagctgccagcccaaagacggaggacaagacggcccagaagaacaaggacgccaagaccacttcggatgactacttcgccaccgcccgcgtcaatcgggaggaggcacgggacaactctctgtccatcctgcaaaagacagtgaacgaccccaaggccagcaaggacgccgtagacgccgcctccaagagcatcactgccatggcctccgccaccttgcaggagtccaaaatcgagagcctggtcacagccaagggctacactgactgcgtggcctttatcggagacaacagcgtcagcgtggtggtcaaggccaagaacaatgccttgaaggcgtctgacgtggccaagatcacggacatcgtggtgggagagaccaagttcagcgctggggatgtgaaggtcatctcgtccagccagcagtga

SEQ ID NO: 899 - DNA, 1200 bp, Unknown
  Unknown gut bacteria
atggagacgtttcaaatgaaaaaactaatttgtaccttgctcaccttggcgatgctcttagggctggctggctgtacgactgctccgactggcagtggtgacgccagcgccggtgtcaccgaacctgctggtcaggattccacggaagaacccactggcggcaccggtctgcctggcaaccgcaaccccttgaccggcgaggagacggacacagatatttctcaaaattgtccggtggcggttatgctcaataacatcaagcaggcgctgccccagtccggcaactccaaggcggatttcttctttgagatccctgaggaagggggcatcacccgtatcatggcgctctatcaggacatcagcgatgtgggcaccatcggcaccgtccgcagcacccgcccctactatgtccgtctggccgttggccacgacgccatcctgacccattgcggcggcagcagcacggcctactacatcattaagaagtatatgcgcaacgcagacttcaacgacatggactgcctgaacaagggtaccaactgcgcctacagctacttctaccgcagtcaggctcgcctgaacgcaggttatgccaccgagcacaccatgtataccgattctgacaagatccaggactatctgaaaagcggcaaggacgatgtgcgcaccaagcataagaagaactttgacgccggtctccgcttcgctgaggacggcacccccgatggtgcttccgccacggacgtggatgtggagatgtcccagtataagaacaccaccttccagtacaacgccgacaaaaagacctatgcggtgggtcagtttggcaccggctacattgacgaagccaacggcaacaagcaggtggaagtgaccaacgtgctggtcatcctcacggacatctccgtggtcaaggaatccaccaagggacacctgtccgtatccaccactggcaccggcaccggctattacatcagcggcggcaagtacatccccatcacctggaagaaggacagcgtcactgcgccccagcggttctatgaccaggacggcaacgagctgaagctgagcgtgggcaagaccttcgagtgcatgatcgacaagtcccgtgatgtgaagatcgacggcaaggtgctggagaagccggcagacgccaacgagaacgacaacgaagtggataagatggcgctggcagactga

SEQ ID NO: 900 - DNA, 1545 bp, Unknown
  Unknown gut bacteria
atgagcgagccgttggatctggactccacggagcacgtggagatcaccctgggcaccctgccaggcgcggcctctttggagaccatccggggcgagctggcagaaagtgcgccggagagcgagctggtggccatccactccagcaaggagctgcattatgtggttctgctggcgtggaaagagacggcctcggcagcatccagcgttctgaaaccttatggcttctctgtagtcaagttcaaggggatggagggcagcgcagcccagaacatcgcccagctggatgagaagctggcagaggtgaacgcaaagcgcgaggaagccatccagcagatcaaggcactgggcgaccagcgcagtgagctgaagctggccatcgaccaactgacccagcaggaagccaaggaggcggtgaaggatcggttcctgaccgatggcaccatcgtctttctggagggctgggtggaagaacccaagctggacaagctggaacgggaactgaccggtctggactgtgcctatgagctggccgatccccaggagggggacacggtgcctaccctgctggccaaccccaaatggatgcggggcatcaatatggtcacggagatgtactccctgcccgcctacgacggcattgaccccaacccgttgatgtttttctggtatatcttcttcttcggcttcatgttcgccgatgtggcctatggtatcatcatctacctggcctgcaccatcatccagaagaagtacaaaccgaagaacaccttgggctatatgatgagtctgggcagatggctgggcggcagcatcaccttctgcggcatcttcgccggcggcttctttggcaactccatcaccaccttcgccgagaccttcttgggcatcacccaggatcagttcccggcttggctgtccaccttctgtgatggcatcgtggtcaacccggtggaggatcctttgaaggtgctcatcatcgccatctgtatcggctgtgtccacctggtctttggccagtgcatccgaatctatatgggcttccgggatcacgaacccctggagggcatccttgacgtggtgccctggtggatcgtcttcgccggcatcgccgtcctggtcttctgtgacacccccctggtgctcatcctgggtgcgctgtccctgatcctgacccaaggacggcataaagagggcggtatcatcaaaaaaattatgggtggtatcacttctctttatgatatcaccagctggctgtctgatgtcctctcttatgcccgactgatggcgctcatgctggccggcagcgtcatcggcatggtctttaataccatcgctgcgctccccggcaacatcattgtgttctttgtggtctttctcatcggacacacctttaacatcggtgtcaacctgatcggcacctatgtccacgatgcccgtctgcaatatctggaattcttcgggaagttctacaaagaaggcggcatcccctttaaacccttgaaatacaacacgaaatacgtagacattattgaggaggaaaaataa

SEQ ID NO: 901 - DNA, 1662 bp, Unknown
  Unknown gut bacteria
ttggctgaacagttaaaaatcatccccctcggcggtctcaatgagatcggcaagaatatgaccgtttacgaatacggcggcgagatcatcgtggtcgactgcggcatggccttccccggcgacgacatgtacggcatcgactgcgtcatccccgacgtgagctatcttgtcaagcacaagaaccgcatccgcggcatgttcatcacccacgggcacgaggaccacatcggcgccgtgccctacatcctcaaaaaggtgaatattcccatctactgcacgcgcctgaccgcgggcctcatccgcttaaagctcgaagagcacggccttctcaaatcgacgaagatcgtcacggtggaaagcggcatgaccgtcaaggccggcaagttcagcgtggagttcatccacgtgaaccactccatcgcggactctgtcgcgttcgccatccacacaggacttggcaccgttgtccacacgggcgacttcaagatcgactcgacgcccatcgacggcgaggtcatcgaccttgcccgcttcggcgagcttggcaagcagggcgttttggcgctgctcgcggattcgacgaacgtcgagcgcccgggctacacgatgagtgagcgcacggtgggcaggaccttcaaccgcctgttccagggctgcaagcagcgcatcatcgtcacgacgttcgcctccaacgtccaccgcatcaagcagatcatggacgccgcggaggagtgcgggcgcaaggtcgccgtcacgggccgcagcatggaaaacgtgacaaaagtcgccatggacctcggctacatgaagccgccgaaaaacaccgtggtcgacatcaacaagatcaagtcgatgccgctggaaaagcaggtcatcgtcaccaccggctcgcagggcgaggagatgtccgccctgtaccgcatggcgttctcccagcacaagcagatcgaggtcggccccggcgaccgcgtcatcatttcggcgagcgccatccccggcaacgagaacaccgtttcgcgtgtcatcaacgagctcttccgcaagggcgttgaggtcatctacgaccgcgcggacatgctgcacgtttcgggccatgcgtgtcaggaggagctcaagatcatccacgcgctgacaaagcccaagtatttcatccccgtgcacggcgagcagcgcatgctccagctgcacaaggatctcgctctccagatgggcatggaccgcaagaatattgtgatttgcgacaacggcgacgccgtcgagatcggtgcgcgctcgatgaagtgcgtgcccggttatgcgcccgcgggcgaggtgtttgtcgacggctatggcgtcggcgacgtcggcgcggtcgtgctgcgcgaccgcaagcatctggcggaagacggcatggtcgtcgtcgtgctgccgatctccgcgcagaacggcgaccttctggccgagccggagattatcacgcgcggctttatctacgtcaaggattccgaggagctgctgcaggacctcagaaacctcacgatgtccacggcggaggcctaccgcggcaagcgcgggcgcgacctgaacgaactcaagggcgcgatccgcagcgcggtgagcaactatctttttaaggcgaccaagcgcagccccatggtgctgccggtcatcacgaggctttaa

SEQ ID NO: 902 - DNA, 1950 bp, Unknown
  Unknown gut bacteria
atgaaggtcatcttagctgagaccgctggcttctgctatggcgtggagcgcgcagtcaaccttgcgcgcgaaacggcaaaagcgcgcggcggcgcgatgctcggcagcatcgtgcacaacgcgggcgtcgtgcgcgagatcgaagaccttggcatgtgcctcatcacgtcgcccgaccaggcaaaggcgggggagaccgtgctcatccgcgcccacggcgagtcgagagcgacgcttgatgcgctgcgagagcgcggggcagaggtcgtgagcgccgtgtgcccgcatgtcgagcgcatccgaaagcttgcacaggaggcagagcacgagggacgccgcgtcatcctgatcggtgagcgccatcatcccgaggtgcagggcatcgcaggatggtgcagcgacccgctgatttttgaaaatgtgcaggaagcgcaaaaatacttgcaggaacaccccaattttgcccatttacccagtatcatgctggcgcaaacgacctgcattcgtgcgctttgggaaagttgcgtgaaatttctaaaaaaacagtgtacaaatctgaaaatcaatgatacaatatgcaatgctacgcagaaacgtcaaactgaggcagcagaactttccgccaaggtagacgcgatggtggttgtgggcgaccgaagaagcgccaacacaaggcatttgaccgagatttgcagagagaactgcggaaaagtcctccagatcgaatccgcagacgagctctcaccggaattcttttccggatgccgtgtggcgggactgacagccggcgcatctactcctgcgagtatcattatggaggtattaacaacaatgacggaagaaaacatcaacaccactgcccctgaaaccagcgaatcctttgaagaactgcttgaaaaatctttcaagactctaaatacaggagataaggtgaccggtatcgtgaccgccatcggcacgaccgagatccaggtcgacgtcggctgcaagcaggcaggctatatccctgtttctgagctgagcagcgaccccgacgtcaagcccgaggacgtcgtcaaggtcggcgacgagatcgaggcttacgttgtccgcgtcaacgacgtggaaggctacgccaccctctccaagaagcgtctcgatgctgtcaagctttgggaagacattgagaccgccgttgaggacaagaccgttctcgaaggcaccgtgaccgaagtgaacaagggcggcatcgtcgtttctgtcaagggcgtgcgcgtgttcgtgcccgcttctcagagcggcatgcccaaggactccgaccttggccagatggtcaagcagaaggtcaagctccgcgtgaccgaggtcaaccgtgcccgccgccgcgtcgtcggctccatcaagtccgtgctgaacgaggagcgtcaggctgctcaggccgccatctgggaaggcatcgaggtcggcaagcactatgacggcgttgtcaagtccatgacctcttacggcgtgttcgtcgacatcggcggcgtggacggcatggttcacatctccgagctgagctggagccgcatcaagaaccccgccgagatctgcaaggttggcgacaccatggatgtgtacgtcatctccttcgaccccgagaagcgcaagatttccctcggcgtcaaggatcgcacccagaacccctgggatgtgttcatgaacacctacaaggtcggcgacgttgccaacgtccgcatcgtcaagctgatgaccttcggcgctttcgctgaggtctttcccggcgtggacggcctgatccatatctcccagatcgctgaccgcagcatcgacacgccctccgacgtcctgtccgaaggccagatggtcgacgcgaagatcaccgccatcgacgaggagaagaagaagatctccctcagcatccgcgcgctgctcagcggcgaggaagaggctcctgtcgaggagtaa

SEQ ID NO: 903 - DNA, 2073 bp, Unknown
  Unknown gut bacteria
atgagtgcaaaagacatccgcaatatcgtgctgcttggccacagcggcagcggcaagaccaccctcgctgagagcatgctgtatctcaccggcggcacggaccgtctgggcagaattgccgacggcaataccgtttgcgactacgatcccgaagagatccgccgccagatctccatttctctggccgtggctcccgtggaatacgacagctgcaagatcaacgtgctcgacgtgcccggcggcttcgacttcgccggtgaggtcgcggaggccgttcaggctgccgacgctgccgtcatcgccgtctcggccaagggcggcatgagcgtcggcgcggaaaaggcgtggaaatattgcgagaagaactctctcccccgtctgctctacatctccaagaccgacgaggagaactccgactacaacgccgcgttcaacacgctgcgcgagcgcttcggcaagaacatcgcccccgtcgtcgcccccatctgggacgagagcaagaaggtcatcggcatcatcgacgtgctgcataagcgcgcattcgagttcggcccgggcggcggccgcgtcgagatcgaagtgcctgagaacaaaaagcccgtgctcgatgagctctacgacgcgctcaaggagtccgtcgccgagacgagcgaggaatttatggaaaagttcttcgccggtgaagacttcacctatgccgagatgatccatggcctgcgccagggcgtcaaggacctgtccctcttccctgtcgtgtgcggctccgccattcagggcatgggcacacgcatcctgatggataccatcgtcgagcttcttccccagccgcaggacgcccgcgccctgatggccgagaatgaggacggcgagtcctccgaattcgtcgtcgcgcccggcgcactgccgaccgcgttcgtcttcaagaccatttccgaccagtacggcaagtattcctacgtcgaggtgctctccggctccatcaagcccgatatgcccatggtcaacgcccgcaccggcgagaccgagaagctcggccgcctgtacatccccaagggcaagaagtataccgaggtcaaggagctcacctgcggcgacatcggcgccatcgccaagatggacaaggtcaagaccggcgacacgctctgcgagccgcgcaaggtcgtcaagatcgagcccatcccgttcgatgagccctgctacagcgtcgccatcgcgcccaagacccgcggccaggaggacaagatggcccagggcctcaaccgcttgaacgaggaagatccgtccttccgcgtcgtcaacaacgccgaaacgcaccagatggtcgtctccggcgtgggcgacatccagatcgacgtgctcgtcaacaagctcaagagccgcttcggcgtcgaggtcgtgctcgacacgccgcgcgtgccctaccgtgaaaagatccgcaagacggtctccaagcagggccgtcataagaagcagaccggcggcagcggccagttcggtgacgtttggatccgcttcgagcccaacgaggagagcgaagagatggttttcgccgaggaagtcttcggcggcagcgtccccaagaacttcttccccgcggtcgaaaagggtctgcgcgaggcctgcgtccacggcccgctcgcgggttatcccgtcgtgaacctcaaggccgtcctttacgatggctcctatcacccggtcgactcgtccgagatcgcgttcaagaccgcggcgaacctcgcctacaaggcagccatgcccgaggcgtccccggtcctgctcgagccggtgtgcgagctcaaggtcacggtgcccgaccagtacatgggcgatatcctcggcgatctcaacaagcgccgcggccgcgtcatgggcatgaccccgaccggcaacggcgagcaggtcatcgaggccgagtgccccgaggcagagctgatgagctacgccattgacctgcgctccatgacccagtcccgcggctcgttcgtgatgcacttcgtgcgctacgagcagtgttccgccgacgcacaggcgaaggctgtcgctgccgcgaaggcgatgcaggaagcggaataa

SEQ ID NO: 904 - DNA, 1359 bp, Unknown
  Unknown gut bacteria
atggcaacgatcaaagctcacaccttatccggctttatggagctgcttcccgcgccgcagacccagatggagcgccttatggaggtgctgcgctcgtcctacggcgtctatggcttcaccccgctcgacacgcccatcatcgaagcgagcgatgtgctgctcgccaagggcggcggcgagactgaaaagcagatctaccgtttctccaagggcgacagcgacctctcccttcgcttcgacctgacggtgcctctggcgaaatacgttgccttgcattatgccgacctcgctttcccgttccgccgtttccagatcggaaaggtctatcgcggcgagcgcgcccagcgcggccgcttccgcgagttctatcaggccgatatcgacgtcatcggcgacggcgagctcgacatcacgaacgacgccgagatccctgccatcatctataccgtcttctcccgcctcggcctgtcccgtttccagatccgcatcaacaaccgccgcatcttaaacggcttctacgcgatgctgggcctttccgacaagtccggcgatatcatgcgcaccgtcgacaagatcgaaaagatcggccctgacctcgtgcgcgcgatcttggtcgacgactacgccatcgagggcgaaaaggcggatgagatcctcgccttcatcggcatcaagggcacgaacgaagaggtgctcgcttctcttgaaaagtaccgcggccgcaacgagatgttcgaccagggcctcgacgagctgacgaccgtcgccaagtacctcggcgcgttcggcgtgccgcaggagaacttcgcggtcgacctgaccatcgcgcgcggcctcgactactacaccggcacggtgtacgagacgacgctgctcgaccaccccgagatcggctcggtctgctccggcggccgctacgataaccttgcagagtactatactgaccgcaagctccccggcgtcggcatttcgatcggcgtgacgcgcctgttctatgtcctcggtgagcagggccttctgaatagcgacatctgcaccgcgccggcggacgtgcttatcctgccgatgaccgaggacctgagcgaggccatctcgctcgcgaccgatcttcgcgccgcgggtgtcagcacgcagatctatacggaaaagaaaaagttcaaggccaagatgaactacgccgacaagctcaaggtgccctacgtctacttcctcggcgaagacgagatcaacgcgggcgtcgtgtcctgcaaggacatgcgcaccggcgagcaggtcaagcttccccgcgcggaagcggtggaaaaggccaaggcctttgtggagtctgaccgccaaaagccggtcatttgtgaaaagtaa

SEQ ID NO: 905 - DNA, 969 bp, Unknown
  Unknown gut bacteria
cccgccgtgcagaaacaaaagcaatattctatctttggctgggagttgatcgaattgaaacataagcacagcaacgctgcggtcaacagctcgatgatccgccgcccgatccgccgctggttcccgctctttatggggccgatggtctgcgcgttcatcatcggctttgtctatccgttctgcaagggcatctatctctccttctgcaaattcaaggtcacgagcgacgcgcattttgtcggccttgaaaactaccgccgcgcgttccaggatgcgagctttgtgcattcgttctggttcacggcgctgtttgccgtcatatcgctcgtgctcatcaacgtgctggcctttgcggtggcctacgcgctcacgcagggcatcaagggcagcaacctgtaccgcacggtgttcttcatgccgaacctcatcggcggcatcgtgctcggctacatctggtcgatgatcttcgacggcatcctctcgcgctacggcacgtcgatcctgctcaacacgaagctcggcttctggggtctcatcatcctgatgtgctggcagcagatcggctacatgatgatcatttacatcgcgggcctgcaagccgtgcccgaggacatgctcgaggccgcgaagatcgacggggcgagccgctggcagacgctttggaaagtcacgatcccgaatgtgatgccctccatcaccatctgcacgttcctctctcttacgaatggcttcaagctcttcgaccagaacctcgccctcacgggcggccagccctataccatcctgtccgacggcagctcgatcaaagagaccgaaatgctcgcgctgaacattctcaacacgttctacgggcagaatgccaactcgcgcggcaccgcgcaggccaaggccgtgctgttcttcattttggtcgcgaccatcggtcttctccagctcagtgccaaccgcaaaaaggaggtgcagcagtaa

SEQ ID NO: 906 - DNA, 3981 bp, Unknown
  Unknown gut bacteria
atggcacaaaagattcctttttttgaattattcaccgacttttcgccggattttgacctgcgcgtcccgctcaacgccgcgatggtcacgaacatggtgctcgagccggaaaagcgcacgatgacgctcgacatgaccgtgcgcgcggagatgaacgactcgacgcgcgaaacggtcgagcagcttcttgcgcgcaattacgacttaaagcgcgtggacatccacgtcaaatcaacggcggaggcctttcccgacatgttgaagaacgctggccgcaaggtgagcggcagcggcagtgtcatcatgggccgcgagattgcaaaggggagagtgctccccatcagcgagctgacgccaaaggccggtcacgtcgtcgttgagggcaaggtcttcaagttcgactgccacgagacgcgccgcgccggcgtctggacgatgttgctcgaaatgacggactacgaaggctcgctcttcatccgccgcagcatgcccgagcgcgaggcgacggagcttcttggcaagatcagcgtcggcatgtggctgcgcgtcagcggccgcatggagctttcttacgacggtaaggacatgcagctcaacccgcaggacatcatgcagatcgaccacgccgagcgcacggacacggcggaggaaaagcgcgtcgagctgcatttacatacccgtatgtccaacatggacgcgctgaccgataccgccgcggtcgtcaagcgcgcgatcaagtgggggatgcccgccatcgccatcacggatcacggcgtagcgcagagcttcccggacgcctggcacaccggcgagggtaaaataaaactcctttacggctgtgagggctattttctcaacaacatcgacgaccgtatctgtgtgcacggcccgcaggacggcgatttttcgactgagatctgctgtttcgacattgaaacaacgggtctgaaggtcgcgcacgatgccatcaccgagatcggtgcggtcattctgaaagacggcgagatcgtcgacacgttccaaacctttgtcgaccccgagcgccggctttcgcctgagatcatccgcctgaccggcatcacagacgacatgctgcgcggcgcgccgaagctggaggacgcgctgcacgcgtttttggcctttgcgggcggccgcccgctcgctgcgcacaatgcggagtttgatatcagcttcatccgcgcaggctgcaaaaagtgcggcatcccgttcgagccgacgtatctcgactcgctgattttcgcgcagaatctcctgcccgagctcggcaagtacaagctcgacatcgtggccgaccacttgcagctcccgcagttcaaccaccaccgcgcgtccgacgatgcggtcccggtcgcgcagatgctggccaagttcttcgtcatgctcgaagagcgcggcgtcacgcgcctccagcagatcaacgacgagatgacgaagctccgcccgctcggcgtcaagcgcaaccgtttcccaaagcacatcattctgatcgccaagaacaaggtgggcctcaagaacctctaccagctcatctcggcgtcgaacctcaaatactttaagcgcgtgccgatcatcccgaaaagcgagcttgtcgcgcatcgcgagggcttgatcatcggctctgcctgtgaggcgggcgagctgttccgcgccatcgtcgaccacaaggactggaatgagctcaagcgcatcgccttgttctacgactatcttgaaattcagccgctcggcaataaccgcttcatggtgcgcgacggcacggtgcgcgacgacgaagacctcaaggacttcaaccgcactgttgtcaagcttggcgaagagctcggcaagcccgtctgcgcaacgggcgacgtccacttcctcgacccagaagacgaggtttatcgccatatcctgctcgcgtcaaagaaattcgccgacgcgaacgagcccgtcccgctctacttccgcacgacggacgaaatgctcaaggaatttgactacctcggcaaggagaaagcctacgaggtcgtcgtgacgaacacccgcgccatcgccgagcaggtggaggatatcgagcttttgcccaagggcaagctgttcccgccgcggcttgaaaattcggaagaagaccttaaccgcatggtgtgggggaaagcgcacgagctttacggcgacgatctgccgcagctgatcgtcgaccggctgaacgtcgagctcggcagcattctgggcaagtacgacgtcgtctacatgtcggcgcagaagctcgtgcagcgctcgctcgagtgcggctaccgcgtcggctcgcgagggtcggtcggctcgtcgctcgtgtcgtacatggccggcatcaccgaggtcaacgccctgccgccgcactaccgctgcccgaagtgccgcaacgtcgagttccacgcgggcgagtatggctgtggcgcggacatgcccgataaaatgtgtcccgtctgcggcacgaagtatgtcaaagacggcttcgacatcccgtttgaaactttcctcggctacggcggcggcaaggtgccggatatcgacctcaacttcgcaggcgaatatcaggcgcgcgcccacgcgcacgcggtcgagatgttcggcaagacgcaggtgttccgcgcgggtacgatcggtacgctcgcggagaagacggcctacggcttcgtcaaaaaataccttgaggaaaacggcatcgctgcgggcaacgccgagatcgaccgcctgacggcgggctgcgtcggtgtgcggcgcacggcgggccagcatcccggcggactcgtcggcgtgcctgacgacatggatatcgaggatttctgccccgtgcagcaccctgcggacgaccccgacagcgacacgatcaccacgcatttcgaatatcattgcatggaggacaaccttttaaagctcgatatgctcggccacgatgacccgacgatgatccgcatgctcgaaaatctgacgggcgtgaacgcccgcgctatcccgctcgacgaccccgacacgatgtcgatcttcatctcgtccaaggtgctcggctatgagaacgacgaagtgctcggccccacgggcgccgtcgcgatccccgagtttaacacgcgcttcacgcgccagatgctcgtcgacacgcagcccaaggacttcaacacgctgctgcgcctttcaggcttctcccacggcacggacgtgtggctcggcaacgcgaaggatctgatcatcagcggcacggcgagcgttctggagaccgtcggctgccgtgacgatatcatgctctacctcatttctatggggcttgacccgaagatgagctttaagatcatggaggccgtccgaaagggcaaggtcaagggcggcaaggcgggggactggccgatgtgggtcgaagagatgcgcaagcacgacgtgccggagtggtacatcgagtcgcttgcaaaaatcggctacctcttcccgaaagcgcacgcggtcgcgtatgttatgatggcgttccgtatcgcgtggttcaaggtgcacgagccgctcgcgttctacgcgacgttcttctccatccgcgccaaggcgttcgacgccgccgagtgctgcaaggacgccgacgcgctgcgccgccgcatccgcgagatcgaaaacaacaaggacgcgaccgccgtggaacaggacttgatgacgacgcttgaagtctgctacgaattctgcctgcgcggcttccactttgagcccatcgatatctaccgcagcgatgcgacgaagttcgtcgtcacggaaaacggcctgctgccgccgttcacgtccgtccgcggactcggcgagaccgcagcgctcgacaccgtcgagaagcgcaaggggaaggactttacatcggtggaggagttttccctctgctgcaacaaactgtcgcagacgcatatcgaccagctgcgcgcgctgggcgcgtttgcgggattgcctgaaacgagccagttaacattgttttaa

SEQ ID NO: 907 - DNA, 693 bp, Unknown
  Unknown gut bacteria
gggaagagcatgatacgcctaagcgatgtagtaaaggaatacgagagcggcacgacggccttaaagggcatttcgcttcgcatcgaggatggggaattcgtctttttggtcggcccgagcggcagcggcaagtcgacgatcatcaagctgctcaccggcgagatcgtgccgacgtccggtcagatcgccgtcaacggcttcagcctgacgaacattgccgagcggcagatcccgctgctgcgccgctccgtcggcgtcatcttccaggacttccgcctgatcgagaagaaaacggtctacgagaacctgggcttcgccatgcgcgccgtcggttcttcgccgcgcgagatcaaaaagcgcatcccctatgtgcttgagctcgtcggacttgaggaaaagaccgaccgttatcccaacgagctctccggcggcgaacagcagcgcgtggccattgcgcgtgcgctcatcaacaaccccagcaccatcatcgccgacgagccgacgggcaacctggaccccgcgcgctcgctggagatcatgcgcctgctcgagcgcatcaaccagctcggcacgacgatggtcgtcgtcacgcacgagaaagatcttgtcaatcagttcaaaaaacgcgtcgtcacgctcgaacagggcgccatcacgagcgatggcgacggcgtcggctataatgcgaggtaa

SEQ ID NO: 908 - DNA, 1347 bp, Unknown
  Unknown gut bacteria
atgggaaaactgtttggcaccgacggcattcgcggcgttgtgggagaaaatctcacggctgatctcgcgttccgtacgggcaaggccatcgcggccgttttgaaggaagaaaagggcagaaagccggtcatcaccatcggcaaggacacgcgcatttcgtccgatatgctcgaaagtgcgctgatcgcgggcatctgctccgtcggcggcgacgtgatgccgtttggtgtgctgccgactccggcggtcgcgtacctgaccgtgctcaaaggcgcggatgcgggcatcgtgatctccgcctcgcacaacccctacgagcacaacggcattaaggtcttcaacgaaaagggctacaagctgcccgacgcgatcgaagagcaggtcgaagaaaaaattctcaccgacatctatcccgccgcgacgcacggcgagatcggcgtcctgcgccacggtctgcggcagtcgcgcgaggcgtatatcgaccatttagctggcacgatcgaaggagacctgtccggcctgcgcgtgctggtcgattgctcgaacggcgcgtcgtccgcgacggcaccggagctctttggccgcttccgctgcttctgtgacttcatccaccgcgagccggacggcgtgaacatcaacgaccactgcggttcgacgcatctcgacgaccttgcacaaaaggtcgtcgcgggcggctatgacatcggcgtcgcgttcgatggcgacgcggaccgctgcctgctcgtcgacgagcagggcggcgttatcgacggcgacaaggtgcttgccgtctgcggctcggacatgaagcgccgcgggaagctctcgggcggcacgatcgttgcgacggtgatgtcgaacctcggccttcacgagttctgccgcgaaaacggcgtcggcctcgtctgcacgagcgtgggcgaccgcaacgtgctcgaaaagatgaatgagtgcggctacaagcttggcggcgagcagtcgggccacacgatcttcaccgactacgccacgaccggcgacggtcagctgacggcgcttcagttcctcgacgtgctcgcgcgcagcgggaagaaggcctctgagcttgcgtccgtctgcccgcagtatccgcaggtgttgctcaacgtcgccgtttcgcatgagcgcggcgtcaaggatgccatcatggcgtccgatgcactctccgcggccatcgcggaggaggagggaaagctctccggcgagggacgcgtgctcgtccgcccgagcggcacggaagcgctcatccgcgtcatggttgaggcaaaaacagaacaaatcgcccttcttgcggccgagaatttggtcaatgtgataaaaatgctgtaa

SEQ ID NO: 909 - DNA, 1065 bp, Unknown
  Unknown gut bacteria
atggagagagcggacaaagacctcgcctttttgctgcgctacgagaatgtcgcgtggtttgaagacggcgaggtgcgcatcttggaccggcgcatttaccccgcaaaggtcgaatttgtcacctgccgcacacatcaggaagtcgcgcgggccatcaccgacatggtgacgcagagcgcgggcccctacacggcggcgccgatgggcatggcgctcgcggcgtgggaatgccgcggcaaatcggcggacgagcagatggaatacctcaagaaagcggcttacaccatttcccacgcgcgccccacgacgcaaaagcgcatgacgcttctgtgcgacatctgcctgaaagaggccgagcgcgcgctttcagcgggggagaatgtggccgaggccatcaagaataagaccatcgagctcaacaacgtgcgctataacagaatggcaaagatcggctcgtacttagtcgatatgttccccgacaacggaacggtgatgacgcactgcttcgccgagaccatcgtcggcacgatgcttcgtgagtgccgcagccgcggcaaaaacatccggctgttctgccccgaaacgcgcccgtattttcagggcgcgcgcctgacggcgtccgtctgccacgacatgggctttgacgtgacggtcatctccgacaatatgccggcgttcgtcatgcagaacgaaaaggtcgacgttttcaccaccgcggcggacgccatctgctgtgacggccatgtcgtcaataaagtgggcacgttccagaacgccatcgtcgccaagtacatgggcatcccgtactttgtcaccggcgcgcccgatcagggacacgagacggtggacagcattcacatcgaaatgcgcgacccgaacttcacgctccaagccatgggcgtgcgcacggcgatggagggtgtgaagggctactatcccgccttcgatatcacgccgccgcatctcgtctcgggcgtcgtgaccgaccttggtatttattctccctacgatctgcaccgctattttacggacggcagcatcggcagggacaatctggtgatctga

SEQ ID NO: 910 - DNA, 1530 bp, Unknown
  Unknown gut bacteria
atgcagttcgctttgttttacaacaaagccgggtgtgtcgaactgaatagagccgccgcaatacattccttcaagcggacagggcttgaagaaaagaaaggcgtgaagagcaaaatggccaaagacaagatgtatggcaaaacccttcgcaagaatttcgcccgacacgaggagatcgtggagatgccgaacctgctggcgcttcagaagaagtcctaccagtggttcctcgatacgggtctgcgcgaagtcttttccgacgtcgcctcgatctcgaactacgcgggcaacctggagctgagcttcatcgactacaagatggacgaagcgcccaagtacgacgtgctcgagtgcaaggcgcgcgacgcgacgtatgccgcccccctgaaggtgagtgtgcgcctctacaacaaggagaccggcgagatcaaggagcaggagatcttcatgggcgacttcccgctcatgaccgagtccggcacgttcgtcatcaacggcgccgagcgagtggtggtttcccagctcgtccgttcccccggcatttactacggcaaggagatcgacctcaagaccgacctcccgctgctgacgtccaccgtcatcccgtaccgcggcgcatggctcgaatacgagaccgacgccaatgagatgttctgggtgcgcatcgacaaaaaccgcaagatccccatcaccgagctggtgcgcgccatcggcttcaagaccgacgccgagatcctcgagctgttcggcgatgacgaccgcgtggccgtcacgctcgaaaaagacgcctgcaagacctatgaagaggcgatgctcgagatctaccgcaagctgcgcccgggcgagccgcccacggtcgaggcctgcgagaccctcatcaacaacctcttcttcgacccgcgccgctatgacctgtccatggtcggccgctacaagtacaacaagaagctctccctgtgggcgcgtatccgcgggcagaagctcgtctatcccgtcgccgacccgcgcacgggcgagatcatgtttgacgccggccacatcgtcaccgacgaggaagcgcgcgagatggatgccatcggcgtcaacgatgtgactatcgaggtcgatggccgtacgatgcgcgtgttctccaaccacatggtcgatcttgaccgctttgtcgactttgaccccgtggccgagtgcggcatcaaagagcgcgtgcgcgagagcgtgctcaaggagctgctcgagcagtacagcggcgaggagctcaaggaagctatccgcgacaacgccgaccgcctcgtccccaagcacattctggtcgacgatatcctcgcctccatcaactacatgaacgcgctggcgcacggcatcgtctataaggacgatatcgaccacctcggcaaccgccgtctgcgctgcgtgggtgagctgctgcagaatcagttccgcatcggtttttcccgtatggagcgcgtcattcgcgagcgcatgacgatccaggatctcgacatcgtcaccccgcagagcctcatcaacatccgc

SEQ ID NO: 911 - DNA, 1287 bp, Unknown
  Unknown gut bacteria
atgaaagttgcgatctgcaccctcgggtgcaaggtgaaccaatatgaaacgcaggcactcgagcaggagcttttgcaccgcggacatacactggtggattttgaggagacggcggacgcctacgtcgtcaacacctgctcggtcacggcggtgagcgacaaaaagtcgcgccagatgctccgtcaggcgcagcgccgcaacccgagcgcggtcatcgccgcctgcggctgctacgcccagacgcatcccgaggacgtcaaaaagctcgggctcgacgtcatcgccggcacgaatgaccgcgcgaagttcatcgaccttctggagcgcgcggcacaggacaaaacgcctattgtcgatgtcgacgacgtctgggagcggcgcgattttgaggtgctgcccgcgggcggtatggtgaatcgcacacgcgcgatgctcaaggtcgaggacggctgcgtgaacttctgcacctactgcctcattccttacgcgcgcgggcgcgtgcgctcgctgccgatggacgaagctgcaaagcaggtgaaagcgctgcgtgaggagggctaccgtgagatcgtggtcacgggcatcgaaatttcgtcctacggctcggacttcaaggacgggacctcgctcatcgaccttttagagctcatcgcgcgcgagggcggcgagatgcgcatccgcctcggctcgctcgaaccgcggaccatcacggaggaattctgcaagcgggcgtcgaagcttccttacctctgcccacatttccacctctcgatgcagtcgggctgcgacacgaccttaaagcgtatgaaccgcaagtacgacacggcacgctatatggaatcctgcgacctgctgcgtcagtattttgacgaccctgccatcacgacggacctcatcacgggctttcccgaggagacggaggaggaattcgcgcagacgcttgacttcatcgcgcgcgtcggctttgccgacatgcacgtcttcccttattccatccgcccgggcacgaaggctgcggagatgcgccagatcgacatgcccgtgcgcgaagagcgcgctgcgcgcgcctcggctgtcgccaagacgatgcacgaagcgtatcttgcgtgctgcgtgggcaagatcttccccgtgctcttcgagcgcgaccgcaagggcggcagcgcgggccacgcgccgaactatatggaggtatccgtcgcgcaggaaggcctgcacaatcaggtgaaaaacgtgaagatcacggcggtcgacggcggcagtcttcgcggcgagttggaggaataa

SEQ ID NO: 912 - DNA, 1047 bp, Unknown
  Unknown gut bacteria
ttgatcgaactcaagaacatttccaaggacttcggctcgggcgaaaaggccgtgcacgccgtgcgcgacgtgtcgctctccatcggctcgggcgagatcttcgggatcatcggcttctcgggcgcgggcaagtccacgctcgtgcgatgcatcaaccttttggagcggccaagctccggcagcgtcttcgtcgcgggacaggacttgacggcgctctctgccaaggacctgcgcgcggcgcgcaagaagatcggcatgatcttccagcacttcaacctgatgccgtcgcgcacggtggccggaaacgtcgcctacccgctcaagggcagcggcctgagcaaggaggatatccagaagaaggtcgcaacgctcttggaactcgtcggcatcggcgacaaggcggacgcctaccccagccagctctccggcggacagaagcagcgcgtcgccatcgcccgcgcccttgccaacgacccacaggtgcttctgtgcgacgaggcgacctccgcgctcgacccgcagacaacgaaggcgatcctgcaccttctcaagcacctcaacgaaacgctcggcatcacgatcgtgctcatcacgcacgagatggctgtcgtcaaggagatctgtgaccgcgtcgccgtcatggaatacggccgcgtcgtcgagcagggcgaggtcttcacggtcttcgctgagcccaagcaggacatcacgaagagcttcatccacacgacctctaacctccagaaggtcgaagcgctcatcgccgaggattcccccgtcacgcgtctccagcccggcgagctcatcgtccgcctgtcctatgttcagcgcaacgtcaacgagccgatcatctccgccgtgtcgcagatgttcaacgtctcgctcaacatcattttcgccgatatcaccatcgtgcaggattcccccatcggcggaacggtcgccatcatcagcggcgagagaaagcagatcacgaaagcgatcgaatacctgatcgaaaaaaatgtcggagtggaggtcatcaaagatgcaagagctgatcgttaa

SEQ ID NO: 913 - DNA, 975 bp, Unknown
  Unknown gut bacteria
atggaaatggagggtaactgcatgattgaaattgaaaagcccaagatcgagtgcgtggaagaccccgcgaacggcacctacggcaagttcaccgtagagcctcttgagcgcggctacggtatcacgctcggcaatgcgctgcgccgcattatgctctcgtccctgcccggcaccgcggcgacctctatcaagatcgccggcgtgcagcacgagttctccaccatccccggtgtcaaggaggatgtgaccgagatcgtgctgaacgtcaagagcctcattacccgtctgcacaataccgacggcatcaagaccgtctatattgaggctgtgggcccgtgcgaggtcaaggccggcgacatcaagggcgacagcgaggtcgaggtcctcaaccccgacctgcacatcgcaacgctggacgccggtgcgacgctcaacatggagctgacgctttctcacggccgcggctatgtgtccgccgaccgcaacaagacagcgcagacggctatcggcgttattcccgttgactcgatctacacgcccgtgtacaaggtcaactacaccgtggaaaacacccgcgtgggcaacatgaccgacttcgacaagctgacgcttgaggtctggaccgatggcaccatcagtccgcgtgacgccgtctctctcggcgctaagatcctctgcgatcacttctcgctcttcaccgacctttccgacgcgatgggcagcaagtccaccgtcgtggagaaggccgaggcgcagcgcgataaggtgctcgagctgacgatcgaggagctcgatctcagcgtgcgcagcttcaactgcctcaagcgtgccaatatcaacacggtcgaggatctgatttccaagaccgaggacgatatgatgaaggtgagaaacctcggccgcaagagtctcgaagaggtcatcaacaagctggccatgatgggcctgtccctggccagcgaagacaacaactaa

SEQ ID NO: 914 - DNA, 2454 bp, Unknown
  Unknown gut bacteria
atgagcgattttatcgcccgctatgccgctgcgagaaaagcggccattgcgcgggattttgcaaaactcaaccctgaacagcgccgcggcgtgctgacgaccgagggcgcgctgctgctgctcgcgggcgcgggcagcggcaagacgacggttctcatcaaccgcgtcgcaaatcttttgacctacgggcgggggagcgacagcgcggatgtgccggcgtgggcgacggaggacgaccttgcatttttggagagctatcccgagcatccgacgagcgacgagcgcagccgcatggtgcacctctgcacgcttgaacccgccgcgccgtggtcggtgctggcggtgacattcacgaacaaggcggcaaacgagctgagagagagactctccgccttcggtatccagggcgcggagagtgtttgggcgatgacgttccactccgcctgcgtgcgcatcctgcgccgcgatatcgaccgcctcggcttttcgcgcgactttacgatctacgacacggatgactccaagcgcgtcatcaaggacattttgaaagagctgaacatcgacgagaagaagctcgcgccgcgcgaggtgctttcggccatctcgaacgcaaaggacgcgatggagtcgcatcaggactactcccgccgctggaaggacagcggcgactggcgcaaagaggcaatcgccaagatctatacgcgctacgtgcaccgtctggccgaggcgaacgcgctcgactttgacgacatcatcctccacgcggtcacgctgctgcagcaggagggcgaggtgcgcgactactaccgccgcaagttccgctatgtgctcatcgacgagtatcaggatacgaaccgtctgcaataccttttgatgaagcagctcgtgggggagaagggaaacatctgcgtcgtcggcgacgatgaccagagcatctacaagttccgcggtgcggatatcacaaacatcctgaattttgaaaaggagtacaagggctgccgcacgatccgcttggagcagaactaccgctcgacgcagaacatcctcgacgcggcgaatgcggtcattaagaataacacgggccgcaagggcaagaccctctggaccgatgcgggtgcgggcgatagggtgctcatcaagaccgttttcaacgagcaggacgaggcgaactttgtcgtcagcagcattatgatggactacaaccgcgggcggaactggaaggaaaacgccattttgtaccgcatgaacgcacagtcgaacgcgctcgaatatgcgttcaagcgcaacggcgtgccgtatcaggtcgtcggcgggacgaagttcttcgagcgcgcggaggtcaaggacatgcttgcgtacctcgcggtcatcaacaacccgagcgatgacttgaggcttcgccgcattatcaacaatccgccgcgcggcatcggcaatacgacgatcgagcgcgtgcaggatctcgcgagcaagcagggcgtgccgatgatggccgttttgcagcacgcaggggagtacgccgtgctcaagagctcggcgggcaagctcgagcgcttcgcccagctcatcgccgcgctgcgcgagatggcggacacgatggagctcggggagttttatgacgcggtctgcgagcagacgagctatgtacgcacgctgcaggaaaagggcgatatggagagccgtgggcggcttgaaaacgtgcaggagctcaagtcgaacatcgtttcgttccttgaaaacgatccggaggatgcgacgctctcgggctttttgaacgagatcgcactctacaccgacctcgacagcgcgacgagcgacaactgcgtgacgatgatgacgatgcacagcgcaaagggtcttgagttcccgtgtgtgtatgtcgtcggcgtggaggagggcatcttccccggcgagcgcgtgcgctacaacgatgaagaggtcgaagaggagcggagactgtgctatgccgcgatgacgcgtgcaaaggagcgcctgacgatgacctgcacgcgccagcgcatgctgtttggccgcacgagcgtcagtgaaccctcgcgttttttggaggaggtcccgtcggagaatgccgactgggtcggccgtcaggcgcagggcgcgtccggctttggcgacacgagctttgacgagggaagctcgtattctacgcgcggctacggcagctacggtcagggcgcggcgcgctacgacagcgtcatgcagcgcagaccaaaatcgcaggcgtcgcaaaaactcgcggcgcagaagcccgccgcctccgcgccgctgcttcagctttcctccggcgaccagatccaccacaagacgttcggtgacggactggtcatctccgtcacccctatgggcggcgatgcgctgcttgaggtggcgtttgataccgttggcaccaaaaagttgatgctgaaaacggcgggggtacatattactaagttgtga

SEQ ID NO: 915 - DNA, 2262 bp, Unknown
  Unknown gut bacteria
atgaaaagaacacttgcactgatcctttctctggtcatgtgtcttggtcttctggccggctgcggcgacaagaagacggacgacggccagaccgacggcaagacgcttgttgtcggcacgcagaacttcgacggtaagttctcccccttcttctataccaatgactatgaaaatcaggtcatgggtatggtcttcgacggtctgtttctcgtcgaccgcgagggctctgtcgtcctcaagggcatcgagggcgacgtccgtccctacaacggcaccgactatacttacaagggcattgccgactgcgacatcgttgaaaacagcgacggcacggtcgactacaacatcacgctgaaagagggcgtcaagttctccgacggtgaggaaatgaccatcgacgatgtcatcttctcttactatgtcctgcttgaccccgcttatgacggcgtttccacgctgtactccctgcccatcaagggtctggaagcctatcgcagcggtatggacactgtgcagaacctgatcctcgccgccggtcctgacgcctacgccgccaacgacttctacaccgaagagcagtacaacgcttactggaccgccttcaacgccgccggcgtgaagttcgcccaggagatccttgactacgtggtcgcctccggttccgccaccgctgacgactccgttgccgcgcaggctggcaactggggcttcgatctcgccgatgacgcgaccgtcgaagacttctgggctgccatcgttgctaagtacggctacgacatctccgatgacggcatcaacgccgagaccgccgacaccagcatctcctccttcctcgaggccgagctgggcgacgcctacaccgactataccgtcgccgtccagaccggcgagtccgctcccaacgttgccggtatcgtcaagaccggtgactactccatgaccgtcaccctcaccgaggtcaacgccaccgccatctatcagctccccgtcaccgtgtgccccatgcactactatggcgagactgacaagtatgactacgacaacaacatgttcggctttgtcaagggcgatctgtcccacgtcaagtccgtgacctccacgcctatcggctccggcccgtacaccttcgagggctggtccaacggcgctgtcaccctgcagaagaacccgacctactggaagggcgagcccaagatcgacactgtcatctggcgcgagatgcaggacgaagataagatccccggcgttgtctccggcacgatcgacgtaactgacccctcctactccaaggaagctgccgagcagatcaaggaagccaactctaacggcgagatctccggcgataccatccagaccgacctcgtcgccaacctcggctacggctatgtcggcttcaacgccaaccgcgtgaagatcggcgacggcaacggcggtgatgaggcctccaaggatctgcgtaaggccatcgccacggttatcgccgtttaccgcgatgtcgctgtcgactcctactacggtgagttcgccaacgtcatcaactaccccatctccgacacctcctgggccgctccgcgcgttaccgatgagggctacaaggtcgccttctccgttgacgtcaacggcaacgacatctacaccgaaggcatgagcgccgacgacaagtacgccgccgccaagcaggccgctctcggctacttcgaggctgccggctacaccgtcgctgacggcaagatcaccgctgctcccgccggcggccgcatggacgctgaagtcatggtcggcggcagcggcaagggcgaccacccctccttcatggctctgaccctcgcgtccgacgctctcaaggagatcggcttcaacctgatcgtctccgatatgtccaacttcgccgagatgaccaacgcgatcaacgccggtactgccgacatgttcgccatggcatggcaggccacgcccgacccggatatgttccagatctatcacagccagggcggctccaacgagaagtcctactggatcaaggatgccgacctcgacgagctcatcatgatggcgcgtcagtccaccgaccagacctaccgcaagaccctgtataagcagtgccttgacatcgtggccgactgggcggtcgagatccccatctatcagcgccagaactgcgtgatcttctccgccaagcgtgtcaacctcgacaccgtgacgcctgatatcacgacctactggacctggtacaacgacattgagctgctcgacctgcagtaa

SEQ ID NO: 916 - DNA, 1230 bp, Unknown
  Unknown gut bacteria
atggattattaccttttgaccgatctggccgcgcgcgtcggctatcatctggcgctcagcggggcggagacgttccgcgtcgaagagacgatacgccgcatcatcggcgcctacggcattgaatgcgaggccttttccatccccaactgcgtgatggtcagcctcgaggcggccaacggcaagcctttgatggtgatgaagcgcgtcgactttcacggcaatgacctcgagtcggtggaaaagctcaacgcgctctcgcgccgcatctgcgccgaaacgcctgacccgagcgtcgccgcgcagtggctcgacgaaacgctcaaggggcggcggcactactcggtgcccgtttattacctgggcaatttctgcgccgcggcgggcttttgcccggtgtttggcggcacgctgcgcgacagcctgttcgcgggccttctgggcctcatcatcggctttgtctcgcgccagatggacaggcgcgagacgaacccgtttttcagcaccatcgtcgaggcgttcgccatggcggtgccggcgtatctcgccgcgggcttccatctggtcgactatatcgactttgtcatcatcggcaccttaatgatcttggtccccggccttctcatcacgacctccatgcgcgacatcatttacggcgatacgaactccggcatcaaccgcatcgtgcaggtgcttctctcggcgttcgccatcgcgctcggcacggcggcggcatggcgcgtcacgtctggcgtatacgggatgacggtcgcgtccggctcagcgagctatcccgcctgggcacaggccgtgatgatcttcgtcgcctgtacgggctttttcatcctcttcaatgtgcacgactggggcagcattctctgcgcgctcggcggcgtgttcacatggatgacgtacctgctctgccatgatctgggcatgagcatttacagcatgaatttcttcgccgccgtcgtttcggcgctttactctgaaatcttggcgcgctcgcgcaaatgccccgtcacgtcgtacctcgtcatctcgctcctgccgctggtgccgggcgcgggcatttactacacgatgagcctcggcctgggcggcgatgtgcaggccgcggtgcacaaaggacttgagaccgcgggcgtcgcgggcagcatcgccgtggcgatcctgctggtgtccacgatcttccgcctcgtcaccgcgcagaacgggaaaagcagaaagtag

SEQ ID NO: 917 - DNA, 2415 bp, Unknown
  Unknown gut bacteria
atgcctacgcaaaaaagcaccgcacggctgtcgaaaaagccgccgctgtcgcccgaggagctcaaacagatcgacgcttactggcgcgcagcaaactatctgaccgcctgccagctctatcttctcgataatcctctgctcgagcgcccgctgtgcgagagcgacttaaagcagaccatcgtcggccattggggcacctgcccgggccagaacttcatctatacgcatttggaccgggtcatcaagcgggatgatctggatatgatttacctttccggccccggtcacggcggcaacgccatggtcgcgcaggactggctggacggcagctatacggaggtctaccccaacatcacgcgcgataaggagggcatgcagaagctcttcaagcgcttctccttccccggcggcatcccgagccatgtcgcacccgaaacgccgggctctatccacgagggcggcgagctgggctattccctctcccacgccttcggcgcggtggcggataaccccgacctgatcgcggcctgcgtcgtcggcgacggcgaggccgagaccggcccgctcgcaacgtcctggcacggcaacaagttcatgaacccgatcaccgacggcgcagtcctgccgatcctgcacttaaacggcttcaagatcgcaaatccgaccatcttctcccgcatgagccacgaggaggtcgagtgcttcttccgcggctgcggctgggagccgcgctttgtcgagggtgacgagcccgagacgatgcaccagcagatggccgccgcggtcgactgggccatccgcgagatcaagcgcatccagcgcaccgcgcgagagagtggcaaggcgagccgcccccgctggccgatgctcgtgctgcgcaccccgaagggctggaccggtccgaaggaggtcgacggcaacgcgatcgaaggcagctggcgcgcccatcaggtgcccatctccatgggcgcggatgaaagcaagcacctgccgctgctcgaacaatggctgcgctcctacaagcccgaagagctcttcaacgaggacggtacgccggtcgagctgatcgcgtccttcccgcccaagggcgagcaccgcatgggcgcaaacccgcacgccaacggtggtcttctcctgcgcgacctgcgcacgcccgacttccgcgactacgcggtcgatatccccgcccccggcgaggtcgaggcgcaggacatgtacgtccttggcacctatgtccgcgatgtgatgaagctcaacatggagtcgcgcaacttccgcatcttcgcacccgacgagacggcgtccaaccgtttgcaggccgtgtttgacgtcacgggccgccgcttcctcgacaagcagatcgagggcatcgacgatcaccttgaccccgacggccgcgtgatggactccatgctctccgagcacttctgcgagggcttcctcgaaggttacctgctgacgggccgccacggcttctttgacagctacgaggccttcatccgcattgtcgactcgatgttttcccagcacgccaagtggctcaagatgtgcaatgagctcccctggcgccacgatatcgcctccctcaactatatcctcgcctccaacgtctggcagcaggaccacaacggcttcacgcatcaggatcccggcttcctcgaccacgtcgccaacaagaaggccgacgtcgtgcgcatgtatctgccgcccgatgccaactgcctgctctcctgctttgaccactgcatcaagagccgtaactatgtgaacgtcatcgtcgcgagcaaacacccgcgccagcaatggctgacgatggagcaggccgtcaagcactgcacgcagggcatcggcatctgggagtgggcctcgaacgatcagggccaggagcccgacgtcgtcatggcctgctgcggcgacacgccgacgcttgagactctcgccgctgtgacgatcctgcgccgcgagctgccggagctcaagatccgcgtcgtgaacgtcgtcgacctgatgaagctccagccgcacaccgagcatccccacggcctgaccgacgcagagtacgacacgctctttaccaaggacaagcccatcatctttgcctaccacggctatcccacgctgatccacgagctgacctaccgccgccacaaccgcaacctgcacgtgcgcggctataaggaggaaggcacgatcacgaccccgttcgacatgcgcgtgctcaacgatatcgaccgcttcgatctcgtcatcgacacggtgcagcgcctgccgcagctcggcaaccgcggtgcttacctcatccagaagatgaacgacaagctcgttgagcaccgccagtatatcaaggacaacggcgtggatctgcccgaggtccgcgcgtggaagtggaacgacggcaagggcgttgaggtgtaa

SEQ ID NO: 918 - DNA, 2097 bp, Unknown
  Unknown gut bacteria
atgagtgaagcgactcgcattcccgagctttttggctctctggtgttcaatgaacgcacaatggagcagtatgtgccgcagagcgccatggacgtttggcgcggctgcttaaagagcgggcagcctcttcccctttccgcggcaaatgagatcgccgacgcgatgaagacctgggcgctggagcatggcgcaacgcatttcacgcactggttccagcccttgagcggcgtgacggcggaaaagcacgacagctttatcaacaacgccggcggcggccgcgtgatgatggacttttccggcaaggagctggtgcgtggccagcccgacgcgtcctccttccccaacggcggcctgcgcgccacgtttgaagcccgcggctacagcgcttgggaccccacggcgtttgccttcatcaaagatggcagcctttgcatcccgacggtgttctgctcctacagcggcgacgcgctcgacaagaagacgccgctgctgcgctccatggccgcggtcgaccgcgcggcggtgcgcgtgctcaagttatttggcgacgacgcggaaaaggtcacgccgcagatcggcgcggagcaggagtatttcctcatcgaccgcgagctgtacttaaagcgcatggacctgcgcctgtgcggccgcgccctgttcggcgcaaagcccccgaaaggtcaggagttggacgaccactacttcggcgcgttccgtccccgcgtggccgcctacatgaaagagctcgatgaagagctgtggaagctcggcgtgctctccaagaccaagcacaacgaggtcgcccccggccagcacgagatggcccccatctacaccgacgccaacaccgcgagcgaccagaaccagctcgtcatggagacgatgaaaaaggtcgccgagcgccacaaccttgtgtgcctgctgcacgaaaagcccttcgcaggcgtcaacggctcgggcaagcacgttaactggtcgctctcgaccgacactggcaaaaacctcttctcccccggcaagacgccgagccagaacgccgtgttcctgctggtgctcgccgcgttcatcaagggcgtggatgagtatcaggagcttctgcgctgctccgttgccttcgcgggcaacgatcaccgtctcggcgcgcaggaagcgcccccggctgtcatctccgtcttcctcggcaccgagcttgagggcatcatcgatgccatcgtcgacgaaaacgactacaccgcgcccgagcacaagtccctgcgcatcggcgtggacgtgctccccgccatcccgcaggatacgaccgaccgcaaccgaacctcgcccgtcgccttcaccggcaataagtttgagttccgcatgcccggctcctcgcagtccatcgcgggcccggtcacgatcctcaacaccatcatggccgaagagctcgacgaattctacgcgcagctcaaggacgcgccggacttcaccgccgcgctccacaagctgatccgcgacacgttctccgcccaccgccgcatcatcttcaacggcaacggctatgaagaggcctggatcaaggaggctgaaaagcgcggccttgccaacctgcacaacaccgccgaggcgctgccgacctacatcctgcccaagaacattgagctgctgacgcgccagggcgtttacagcaaggaagaaattttctcccgccacgaagttcatatcgagaagtactgcaaggtcatccgcatcgaggccgcgacgcttgttgacatggtccagcacggcattctcaacgccgcttccgaatacgaagccgcgctgtgcaacaccatcgccgccaagcgcgccgccgcgccggagctgacctgccacgtcgaatcctcgctcgccaacgccatcggctcgctcaacgagcagctgctcgaagagaccatcggcctcaagacggcgctcgagaccgtctccgacgacgcagagcccgaaacgctcctgcactactaccacgacgaggccgaaaagcgcacgaacgacgtgcgcaagaccgtcgacaagctggaagtgctgaccgcgtccaagtattggccgtatccgacgttctgcgaattactcttctccgtgtaa

SEQ ID NO: 919 - DNA, 2037 bp, Unknown
  Unknown gut bacteria
atggacaaaaatatccggatcgacgagatcgtaacacggctgaatgccgcctccgacgcttactacggcgggcaggaggagcagatgacgaactacgagtgggacgctctgtttgacgagctgaccgctctggaaaaagagaccggctatgtccggcccgacagtcccacgcaggtgacgagccattccggaaacgaaatggacggcgagggggagaaggaagcgcacgagtaccccgcgctctcgctcgccaagacgaaaaaggtcgaggaattgcaggactgggcgggcgagcgcgacatttggctctcgtggaagctcgacggctcgacgcttgtggcgacgtatgacggcggcgcgctcacgcgcgttttgacgcgcggcaacggcaccgtcggcacgaacatcacctatatggcctccgccatccgcggtattcccgcgaaaatcagcgacaagggccacctcgtcgtgcgcggcgaggcgaccatctcctacgcagatttcgaggccatcaacgacacgctcgaggacgcggacgaccgctacgcaaacccccgcaacctcgccgccggaacgctggcgctcgacaagacgaatctcgacaaggtgaaagagcgcaacgtgacgttcaccgcctttacgctcgtccacacggatgaagtgatccgctcctggggcgcgcgcatggactatctggaaaagctcggcttcatcacagtcgagcgcgagcgcacgagcgccaagaacctgcccgacgccatcgcgcgctggacgaaaaaggtcgattccggcgagatgggcattcccgtggacggccttgtcatcacctacgacgacacggactacgcagcgaccggcagcgtgacgggtcatcacgccacgcgcgcgggtcttgcctacaagtgggcggacgtttccgccgacacggtgctcgatcacatcgaatggtcgtgcgcggcctcgaccatcacgccggtcgcggtctttgaccctgtgcagctcgagggcacgacagtcacgcgcgcaagcctctgcaacgtcagcgagctcgagcgcctcggcatcggcaaggaccgcaagaccgagcttcgcatcatcaaggccaacaagatcatcccgaagtgcatcgcggtcgtcagggccgagggcagctatgaagtcccgacggcctgtcccgtctgcggcgcggcgaccgaggtgcgtatcagtcccatcagcggcgtgaagacgctgcgctgcaccgatccgaactgtcccgccaagcacttgaagcgctttgtccgctttgcgagcaagggcgggcttgatatcgacggcctctccgtgcaaacgctgcacgagttcgtcaaccgcggctatctgcgcgattttgccgacctctatcatctggacgcgcacgcggacgagatcgtaaagctcgaaggctttggcgaaaagtcctgcgcgaacctgttggcggccatcgaaaagagccgcaaagtcgaccccatccacctgatcttcgccctctgcatcccaaacatcggcgcggacgcgggcaagaagctcatcgcagcgctcggcacgaagggctttttatcacgcatcgagagcggcgagggcttcgaggacgtggacggcatcggtgtcgagcgttcaaacgcgctcctgaactggtttgctgacgatgaaaacaaaaacctcttcgaccgcctgatggcagagctcacactggaggacgtcgcccccaagcaggaggccgacggaacctgcaaaggtctgagcttcgtcatcacgggcgatgtgcacctcttcaaaaaccgcagcgcgttcaaagcctacgtcgaacagcaaggcggcgccgtgaccggcagcgtctcggggaagacaacgtacctcgtcagcaacgacggggaatcgaattcgtcgaagacgaaaaaggcaaaggaactgggggttcctattctttccgaggaagaatttgtctctcggttcggaggtcccgaatctgctgactctgcggaagtgcaaatcggcattgatacactgctgtga

SEQ ID NO: 920 - DNA, 819 bp, Unknown
  Unknown gut bacteria
atgacttacccgtatatcgcgtggatcatcgcgatcatcgtggtgccgatgcttctgatcgtgctctatgccttcacgacctccggcaactcggtgctgacattccagttcacctttgagaactttgcccgcttcgtcacggacaaggtctttatggatgtgttgctgcgctcgctctatatcgcgctcatcacaacgctcatctgcgttgcgctcggctaccccatcgcctacgtcatcgcgcagcgcggcggccgcagcaacacgatcttaattctgctcatcaccatgccgacctgggtcaacatgctggtgcgcacctatgcttggatgggcattttgcaggacgagggcatcttcaacacgatcctttcgtggttcggcatcggccccgtgtcgatgatccacacgagctttgccgtcatcctcggcatggtctataacttcattccctttatgatcctgcagattcacacgtcccttgccaagatggacaagagccttttggaagccgccaacgacctcggtgcaacgccggtgcaggcattcctgcgcgtgacgctgccgctctcgcttcccggcgtgatctccggcatcacgctcgtgttcctgcccgcggtgtcgagcttcttcattccgaagcttctcggcggcggacagtacgtcctcgtcggcaacatcattgaaacgcagttcctcaccactggcgactggaacttcggctcggccatctcgctcatcatggcggtcatcatcatgatctcgatgtggctgacgcgcaaggcggacgttcaggtcgcctcgcagggaaaggagtga

SEQ ID NO: 921 - DNA, 1806 bp, Unknown
  Unknown gut bacteria
atgacgattttcaacttgatcaccctctttggcggtctggcgctgttcctgtacggcatgcgcctgatgggcgacggactgaaaaaaggttcgtccgatgccttcaagcgcgcgatggaaaaggtgacgaacaatccgctcgtcggctttctgctgggccttgtggtcacggcggtcatccagagctctacggcgacgatcgtgctgacgtcgggccttgtcggcgcgggcgtgatgtcgctgcaccagtcgatcggcgtcattctgggcgcgaatgtcggtacgacgatcacgggccagatcattcgccttctcgacgtgaacgcatcggagacatcgctgctcaatttcttcaagccatcgacgctcgcgccccttgcggcgattatcggcatcctctttctaatggcggtcaagacccgccagtccgataccatcggctcgatcgcgatgggcttcggcatcctcttcaccggccttctcagcatgaccgcggcggtgagcccgctgtcggaatctgagacgtttgccaacatgttctaccagctctcgggaaagccggtgctcggattcctgctcggcgcgggcgttgcgttcctgctgcagagttcgtcggcgaccatcggtattttgcaggccattgccacgaccggcgcgctgacgttctcgtccgtttacgccatcatcatcggcgtcaacattggcgactgtgtgacgacggccatcgtctgctccatcggctcgaaggccgatgccaagcgcacgggcgtgatccatatcctcttcaacatcgccggttcgatcctcgtgatcgtggggctgatgctgctgcactcgttcggtgtgctcaatgccctgtgggacgaggcgctttcctccggcggcatcgcgaatgtgcacacggtgttccgtcttgtttcggccatcgtgctgctgccggtgtgcggccagtttgaaaagctctcgcgcaagctcgtcaaggacgatgtgcgccttggtgaaaatgtcgaccacgagctttcgctgctcgatgaaaagttcttcacctctcccgccatcgcgctctcgggcgcgggtgaggccatcaccaccatggcgcgtctcgcccgctcgggtgtgatgaacgcgatgaacgtgctcgagcagtacgacgcccacacgatcgaggtcatcaacgagaacgaggagcacatcgacaagctcgccgaccatgtggacaactacctcatccgcctgtcgccgcacatgccgagcggacacggaagcgacatgctcaactactatatccagtgcttcggcgagtttgagcgtatcggcgaccacgccgtgaacctgacggaaaatgcgcaggagttccttgaccgcagcgcgagcctgtcgcccacggcacatcaggagctcatggtgctgcgcgaggtgctcggcgagattttagattacacctacaaggcctttgccgccacggactacgaggccgcgcgccacatcgagccggtcgaggaggtcgtggacgaccttgtcgccacgctgcgcgccaatcacatccgccgcgtgcgcgacgggcagtgcacggtgtacgcgggcctcacgtttctcgatattctcgtcaatgtggagcgcatcgccgaccagtgctcgaatgtcggcgttttcacgctctcgatgttcgacgagcacatcatgaacaaccaccacgactacattcaagcgctgcatcagggcaaggacccggtcttcaaccgcgcctatcaggaggcgcacgacaagtatttcggcgagctcaagcgcatcgagcgcagtaagtga

SEQ ID NO: 922 - DNA, 1821 bp, Unknown
  Unknown gut bacteria
ttggaacgcattttgccccgcgtgcagaagcccgcacgctatgtcggcggggaattcaacgcgatcatgaaggacaagagcgaggtcgacacgcgcgtcgccttctgctttcccgacacgtatgagatcggcatgtcgaacctcggcatgcgcattctgtacggtgtgatgaacaatattgagggcgtgtggtgcgagcgctgcttcgccccctggggcgacatggagcaggagatgcgaaatgcgaacatcccgctctacgcgctcgaatcgtttgacccgatcaaggattttgacatcatcgccttttccattggctatgagatggcgttccccgcgatggtcgacatgctggacttagcaggcgtgccgctgcacgcgagcgaacgcacggcgctcacaccgctcgttgtcgcgggcggcacggcgatgtacaactgcgaacccatcgcggattttatcgatcttgctcttgtcggcgagggcgaggagatggatgtcgagctcatcgagctgcaccgtcaggcgcggcgagagggctggagcaagcacgagtttctcgtgtgcgccgcgcagatcccgggcgtctatgtgccgagcctttacgacgttgcctacaacgacgacggcacggtcaagtccatcacggcaaacgagggtgcgcccaaggtcgtcctaaagcgcatcatgcgggacatggacaaggcctactatccgaccaagaccatcgttccctcgaccgagatcgtgcaggaccgtgtgtcgctcgaactgtttcgcggctgcatccgcggctgccgcttctgtcaggcggggtatgtctaccgtcccgtgcgcaaccgctcggaggagctgctgcgcggctacgccgttgaagccgtcgaggactcgggctatcaggatatgacgctctcgtcgctctcgacgtccgactatccgcaccttgtcgagctgtgcgacgacttagaggacttctgtgcccagcggcatgtgacgctcgcgctgccgtcgctgcgtgcggataacttctccatggcgctgatggagcggctgcaaaagggcagaaagaccggcctcacgtttgcacccgaagcgggcacgcagagactgcgcgacgccatcaacaagaatctgacggaggaagatctgctcgaatcctgccgccgcgcgtttgcgggcggatacagcgcggtcaagctctactttatgctcggccttccgaccgagacggacgaggacgtgctcggcattgccgacatcgcggcccatgtcatgcacgcctggcgcgaaagcgcactcaacaagacgcgcggcgtgcgcatcacggtgtcgacctcgtggtttgtgccaaagccgcacacggcgttccagtgggagccgcagatccccattgaagagtacgagcgccgcgtcaagctcctgcgcgaggcgatgaacaccaagtccgtcacgtacaactggcacccctcgcccacgagctttatggaggcggtcatctcctgcggcgaccgccggctcggcaaggtcatcgagaccgcgtggcgcaagggcgaaacgctcagcgcgtgggaggactattttgatctgaaccgctggatggaggcctttgaggagtgcggccttgacccgcacttttacgccaaccgccgccgcagcgaggatgaaattctgccgtggagcatgatctcctgcggcgttgcaccggggtatttgaagcgtgagcacgcgctgagctatgagggcgtgacgacgccggattgccgcacgcactgcaacgcctgcggcgcaaactgcctggtgggagggaaatgcgatgtctaa

SEQ ID NO: 923 - DNA, 927 bp, Unknown
  Unknown gut bacteria
atgcgcgtgatcgacattgaaaacattgtgaccaacatgaaggacgacacccgcttcgtcctgcgctgcgaggaggtctttcacgacaagatcagctccgccgcggcgagcattttaatgaacaaggggcaaaagcccatcgtctgcctgacgggcccgagcggctcgggcaagacgacgacggcgatgcgcctgcgcgaatacctcgaaaacctcggcgtcaaggtctgcatgctcagcatggataactttttcctgccgcttgatcagcgtccgcccgaggcgagcgactgggagtcgccccactgcgcgaaccgcgatttactcatcgaggatatccaccgcctgatggacggcgagctcgtggagctgccggtctacgacttcaaggccggcggcgtcggcggttacaagcccatgcagggcgacaaggacgccgtcatcatcgccgagggcatccacatgctcaacccgctgattttcgaccagctcagaagcgaagctacgggcgtttacgttgccccacgtacgcgtatcatcacgcacaaggaccgcatcgttcgtcccgagcagctgcgcgtggcgcgccgcatgatccgcgactatcagggccgcggccattcgctgcgtcagaccgtcgagcgcgccgagagtgtcgaccgcggcgagctcaactacatcatgccgaacaagccgaacgcgagcatccacatcgacacgttccacgactacgagccgtgcatcctcgcgcggtatttgaaggagatccccgagttttacagccagctcgacgatcagtttatcgccgagcacgggctgagcgacctgatggacgttgtcaactccgtgccgtcgctgcgcacggactatgtcccgcgcgactccatcgtgcgagagttcgtcggcggcagctgctttgagtattaa

SEQ ID NO: 924 - DNA, 1068 bp, Unknown
  Unknown gut bacteria
atggagcattgtctttctttttcctgcgactatcttgagggcgcgcatcccgccatcctgcagcgcctgtgcgaaacgaattttgcgcagaccgccggttacggcacggatgaatactgcgaatccgcgcgcgagaagatccgcgccgcttgcggcgcgccgaacgcggagattcacttccttgtcggcggcacacagacgaacgcgaccgtcatcgacgcgctgctgcgctcttacgagggtgtgatcgccgcggacacggggcacatcagcgtgcacgaggccggcgccatcgagttcggcgggcacaaggtgctcacgctgccgcaggagaacggcaagatcaccgcatcccaaatccgcgcactgcttgatcagtacgaggacgacgcaaaccgcgaccacacggtcatgcccgggatggtctacctctcccagccgacggagtacggcacgctctattccaaaaaggagctcgcggccatcagcgcgctctgccgcgaaaagcgcctgccgctctatatcgacggcgcgcgccttgcctacgcgctcgcctgtcctgaaaacgacgtgacactgcgcgaccttgccgcgctgtgcgacattttctacatcggcggcacgaaatgcggcgcgctgctcggcgaggcggtcgtcattccccagccggggctcattccacactttttcaccatcatcaagcagcacggcgcgctgctcgccaagggacggctgctcggcatccagttcgacacgctctttaccgatgggctctacgagcgcatcggcgcagacgccgttcgctacgccgacgctatccggcgcgcgatggcggaaaacggctatttgccctgtttcccctccccgacgaaccagagcttctgcatcgtcagtgagcagcagcgcaaagagctcgccgagcgcgtggacttctccgtctgggagcaatatgacgagacgcacagcatcatccgctttgccacaagctgggcgacgcgggaagaggatgtgaacgcgctctgtcgcatcctgcgcgagtgcaccgcgcaggaaaaggcagcgtcctaa

SEQ ID NO: 925 - DNA, 1158 bp, Unknown
  Unknown gut bacteria
gtgctgttacttttttatagagaaaaggagaacgatatgaacatcaagccctttgctgtggaagaatggatgaacgagtacgaggtgggtgcgctatacaacatcgccgagacctgcgtcgactccgtttcgctcgacgagcttttcgagctcacgggcgagaacaaggaggactttttgaaggacttctgtgcccagcgcttgacctatggcaatatctggggcagtgaggcgctgcgcagcggcatttccaagctctaccacacgatcaaagccgacgaggtcgtgctcacgcacggcgcggcgggcgcgaaccatcatgtgttctgctcgctcatttccgcgggcgaccgcgtggtcagcatcatgccgacctatcagcagctctactccatccccgaggccatcggcgcggacgtcgccatcatgcacctaaagcaggaaaacgactatctccccgacctgaatgagctcaagagcctcgtcacgcccgagacgaaaatgatctgcatcaacaaccccaacaaccccaccggcgcgctgatgagtaaagagctgctggggagcatcgtggagatcgcccgcggcgtgggcgcgtacatcctctgtgacgaggtctaccgccacctgacgcaggaggacgagtggtgcgagtccgtcgtcgacctgtacgaaaagggcatctcggtcagcagcatgtccaaggtcttctcgctcgcgggccttcgcatgggctggatcgccacgcacgatgaagcggcgcgcaaggcgttcctgtcgcaccgcgactacaatttaattagctgcggcatgttcgacgatgcgatcgcgtccatcgccctgcgccacagcgacgtgatgctcaagcgcaatcagcgcatcgtgcgcgagaacctcgccatcctcgatgactggatcaaggaaaatccgcactttttctacaccaagcccaaagccggtacgaccgcgctcatttactacgatttcgatatcccctcctacgagttttgcaagcgcatgtaccacgagaccggtgcgttcgtcacgccgggcgactgcttcgagcagccccacagcatgcgcgtcggctacgcctgcgacgttaacacgctcagagacggccttgccgcggtgacgaagtttgccgcgacgctgtga

SEQ ID NO: 926 - DNA, 1392 bp, Unknown
  Unknown gut bacteria
atgactgtcaaaaatgttgaaaagctggaaaagagcagagtcgcggtgaccgtcgaggtcggcgcggaggaatttgaagccgccgttgccaaggcctacgccaaggcccgcggcaagctcagcattcccggcttccgccccggcaaggccccccgcaagatgatcgaaaagctctacggcgcgggcgttttctacagcgatgccgttgacatcgccctgcccgaggcatatacgcaggccatcggccagagtggcctcgatgttgtcggctatcccgagatcgagatcgtggacgacaagatcgacgagaacggcttcaccttcaaggcgaccgttgccgtgtatcccgaggtcaagctcggtgagtacaagggcctgacggctgagaaggaagagatcaaggtcagcgccgacgatgtcaaggagcgcctcaatgagatggccgagcgcaacgcccgcctcgtctccgtcgaccgcaaggccaagaagggcgacatcgccgtcatcgacttcgagggcttcgacaacggcgaagcgttcgagggcggtaagggcgagaattacgagctcgagctcggctccggcagcttcgtccccggctttgaggatcaggtcatcggcatgaaggccggcgaagagaaggatctcgacatcaccttccccgaggattatcacaaggacctcgccggcaagaaggtcgtcttccacgtcaaggccaaggagatcaagtgcaaggagcttcccaagcttgatgacgactttgccaaggacgtgtccgagtacgacacgctcaaggagctcaaggacagcatcaagcgcgagatcaccgagcagcgcgagcagtccgccaagtatgccgtcgagaacgagctgatggagaaggtcgccgcgaacatcgagtgcgacatccccgatgcgctcatcgatgagcagtgcgcccgcttcctcgaggagttcaagcagcgcttacagtctcagggcatcccctatgaccagtactgcaagatgaccaacatggatgaagccaagttcctggaggagggcaaggagcccgcgacccgtcaggtgcgcatggacctcgccgtgaatgccatcatcaaggaagagaagctcgaggccaccgacgaggaggtcgaaaagcagtacaacgaccttgctgagaagtacagcatggacgtcaacgagctcaagaagtatcttgacgccatgtccgtccgcacgcagatcatccgcgacaaggccatcagcgtcgtcgtggacagcgcgaagatcgaaaagaagaaggctcccaagaaggaagccgagggcgaagccgctgaaggcgaggaaaagcccgccaagaagaccgctgccaaaaagtccgccaagaaggaagaagaaaaggctgaataa

SEQ ID NO: 927 - DNA, 1386 bp, Unknown
  Unknown gut bacteria
atggaggttccttccatgcattacaacgtcatcatcattggcggcggccccggcggcatcttctccgcctacgagctgacaaaggatcgcagcgacctgcgcgtcgccgtgttcgaggccggtcacagccttgaaaagcgccactgccccatcgacggcgacaaggtcaaatcctgcatccgctgcaagagctgctcgatcatgagcggtttcggcggcgcgggcgcattttccgacggcaaatacaacatcaccaacgacttcggcggcacgctgcacgagtacatcggcaaaaagcaggcgctcgacctcatgcactatgtcgacgagatcaacatggcctacggcggcgagggcacgaagctctactccaccgccggcacgaagttcaaaaagctctgcatccagaataagctcaacctgctcgacgcctccgtccgccatctcggcacggacgtgaacctcgtcgtgctctcgaacctctatgatctgctcaaggacaaggtcgacttctacttcgattctcccgtcaccaccatcgcccgcgagggcgacggctaccgcgtcaccgtcggcgagacggactatacctgcgacaagtgcatcgtctccgtcggccgcgtcggcagcaagtggatggagggcgtgtgccaggagctcaagatccccacgaagtcgaaccgcgtcgatatcggtgtgcgcgtcgagatccccgccgtcgtcttctcccacctgactgacgagctctacgagagcaagatcgtctatcgcacggaaaagttcgaggacaacgtccgcacgttctgcatgaaccccaacggcatcgtcgtcaacgagaacacgaacggcatcgtcacggtcaacggccacagctatgaggataagtccctccagaccgagaacacgaacttcgcgcttctcgtcgccaagcacttctccgagccgttcaaggattccaacggctacggcgagtccatcgcgcgcctgtccaacatgctcggcggcggcgtcatcgtccagcgcttcggcgatctcgtccgcggccgccgcagcacggtcaagcgcatcgaagaaggcctcgtcacgccgacgctcgcggcgacccccggcgatctgagcctcgtgctccccaagcgcattctggacggcatcatcgagatgatctacgcgctcgacaagatcgcgccgggcaccgcaaacgacgatacgctcctctacggcgtggaggtcaagttctacaacatggaggtcgcgctcgacgagcaccttgaaacgccgtacaaggggctctatgtcatcggcgacggcagcggtattacgcattcgctgtcgcacgcatcggcgagcggtgtttatgttgccagagagattctggaaacggtttaa

SEQ ID NO: 928 - DNA, 1326 bp, Unknown
  Unknown gut bacteria
atgaaaaagtatcttgcaatgatccttgctcttgtcatggcgctttctctcgtcgcctgcggcgataagaaggatgactccactgacaacagcgacggcgatactgcctccggccgcgtctactggctgaacttcaagcccgaagccgacgagaccctgcagaaggtcgccgccatgtacaccgaaaagaccggtgtgcccgtcaccatccagaccgccgcgtccggcacctacaacgagaccctgaccgccgagatggacaagtccgctcccccgacgctgttcgtcgtgggcaatcaggccgctgtcgacacctggggcgactactgctatgacctgagcggcaccgccgttgccaacgagctcaacaccgacgcctacaacctctatgacgccgacggcaagctctgctccatcggctactgctatgagtgctacggcatcatcgtcaacgaagatctgctcgaaaaggccggctacacgcttggcgacatcacgaactttgagactctcaaggctgtcgctgaggacatccacgctcgtgcttccgagctcggcttcgacgccttcacctcctcttccatgagcgacgattccagctggcgcttcaccggccacctcgcgaacctcgagtattactacgagtccgtggacgatcccgaagcatggaaggaatgcccgtcctccatcaagggcccctacatgcagaactacaagaacctgtgggatctgtacatcaacaacagcgccgtgaatcctgctgatctcgctgccggcggctttgacgcggcggacgagttcggcaaggagcaggccgtgttctatcagaacggctcctgggagtgggccaagctcaccggtaccggcgacggtcagtatggtcttgacaacctgtccatgatcccgttctactgcggtgttgcgggcgaagagaacgcgggtctcaactgcggcaccgagaactgctgggctgtcaacgccaaggcttccgaggaagacattcaggccacgctcgaattcatgaactggatggtcaccgatcctgaggtctcccgtatgctggtcgatgaattcgccgccatgccctataagcaggctgccgaatccaccaacggcttcctcgccgacgccaacgactacaccaccaacggcaactacatcatgccctgggtcaccaacttccagccgaacgttgatgcttaccgcgctgcgctcgtctccgcgatgaaccagtacgacgccgaccagagcgatgccaactgggagctcgtcaagaccgcgtttgtcgacggctgggccacgcagtacgctgccgccaacggctaa

SEQ ID NO: 929 - DNA, 2004 bp, Unknown
  Unknown gut bacteria
atggcagaagcaaaaaaaacgaattacggcaacgagagcatctcgtccctcaagggcgcggaccgtgtgcgcaagcgcccgggcgtcatcttcggctcggacgggctggacggctgcgagcacgccgtgttcgagatcctttcgaactccatcgacgaagcgcgcgagggccacggcaagctcatcaccgtcacccgctacttagaccacagcatcgaagtagaggacatgggccgcggctgccctgtggactataaccccaaggaaaagcgcttcaactgggagctcgtgtactgtgagctctacgccggcggcaagtacaacaacttggacggcgacaactacgaatactccctcggcctcaacggcctcggcgcgtgcgcgacgcagtattcctcgcgctatatggacgtgaccgtctggcgcgacgggaacaaatactccctgcactttgaacgcggcgagcccgtgggcaaaaagggcgatgagctcaggatcgagccgaccgaccgcggccgcaaaaccggcacgcgcacgcgctggctgcccgacctcgacgtgtttaccgatatcgacattcccgccgactactatgtcgaaacgctgcgccgtcaggccgtcgtcaacgcgggcatcacgttccgcttcaaaaacgaagtcctccccggccactttgagacgcaggacttcgtctacgaaaacggcatcatcgactatgtcagcgagatcgcgggcgaagacgccctgaccacccccgtcttctgggagacggagcgccgcggccgcgaccgcgaggacaagcccgaatacaaggtcaagctctcctgcgcgtgctgcttctcgaataaggtgcagcgcatcgagcactatcacaactcctcgtggctcgagcacggcggcagccccgaaaaggcgtcgaagaccgcctttgtctacgccatcgacaagtatttgaaggacaacaacaaataccagaagggcgaagcccgcatcgcctggcaggacattgaggactgcatcattctcgtctcgaacaacttctccacgcagacgagctacgagaaccagacgaaaaaggccatcacgaacaagttcgtgcaggaggcgatgacggactttctgaagtcccgcctcgaaacctatttcatcgaaaaccgcgtcgacgcgctcaagatcgccgagcaagtgctcatcaacaaaagaagccgcgagagcgcggaaaagcagcgcctgaacatcaagaaaaagctctccggcagcatcgacatctcaaaccgcgtcgaaaagtttgtcgactgccgcacgcgcgacgtctcgcgccgcgagatctacatcgtcgagggcgacagcgccctcggccgcgtcaatctctcgcgcgacggcgagtttcagggcatcatgcccgtgcgcggcaagatcttaaactgtctcaaggccgactatccgcgcattttcaagagtgagatcatcaccgaccttttgaaggtcctcggctgcggcgtcgaggtgccgggcaagtttgtcaaggacctgaacgcctttgatatcaacaatcttcgctggaacaaggtcatcctctgcaccgatgccgatgtcgacggcttccagatccggacgctcatcctgacgatgatctaccgcctctgcccgacgctgatccgcgagggctatgtctacatcgccgagaccccgctttttgagatcacctgcggcgaaaagacgtggttcgcctacacggacaaggagaaaaacgacatcgtcaaaacccttgagggcaagcgctacaaggtcgaccgctcgaaaggtctcggcgagaacgaccccgaaatgatgtggctcacgaccatgaaccccgagacacgccgtctcatcaaggtcatgcccgaggacgcggaggcgacggcacactcgtttgatctgctgctcggcgacaatttgcagggccgcaaggaccacattgccgaaaacggctacaaatacctcgaaatgatcgacgtatcgtaa

SEQ ID NO: 930 - DNA, 945 bp, Unknown
  Unknown gut bacteria
atgagttttctttcgtcgctgatgaacgccctgcccggcgctgccgcacagggtctcgcctggggcattatggccatcggcgtttacatcaccttccgcattctggacgtggcggatctgaccgtcgacggctcgctggcaaccggcggcgctgtctgcgtcatgctgatccgcggcggcttcaatccctggatcgccctgctgtgcgcgatgctcgccggtatgctggcaggcctcgtcaccggtcttttccacacgcgctgcggtattccggccattctcgccggtatcctgacgcagcttgcgctgtattcgatcaatctgcgcatcatggacagcaaggcaaaccaggccctcagcgttgataaatatccgctgctgctttcgcagcgctatgtgcgcgagctctcgatgaacaatcccctgccgctgctgcttctcttcacagccgcggtcatcgccatcctgtactggttcttcggcacggagtatggctgtgcactgcgcgcaacgggcgcaaacgtcaacatggcgcgcgcacagggcatcaacacgaactcgaatatcgtgcttggcctgatggtctcgaacggtcttgtcgccctctccggcgcgctgctggcgcagtatcagggctcgagcgacatcaacatgggccgcggcgccatcgtcatcggccttgccgccgtcatcatcggcgaggtcatcttcggcaagatcttcacgaacttcggcctcacgctgctggccgtttccatcggcgcgatcatctactacatcgtgctccagatcgtgctgcagctcggtctgaacaccaacgacttaaagctcatcacggcgctgatcgtggcggtcttcctcgccatcccctactggaagagcaagatgttccgccgcaaggtgcagccccagagcgcacagaacggaggcaccggccatgcttga

SEQ ID NO: 931 - DNA, 972 bp, Unknown
  Unknown gut bacteria
atggcagaagaagcaaaaaacaaggcttccgcgtccaagttccgcacgagcatcggcggacaggcgttgatcgagggagttttgatgcgcggtccgggcaagcaggccattgtcgtccgctcgccggacgggttggtcgaaaaggtcgaggagctgacgctcgtgcgcgacaagtaccccgttttgggcttacccatcatccgcggcgcggtgacgttcgtcgattcgatggtcaagggcgtcaaggcgctgatgttttcggcggactatttccccgacgaggacgtcgccgagccgagcaaattcgaccagtggcttgaaaaaaagctcggcaacgaaaaaatgcagaaattcatcacggcgctggcggtttttctgtcgctggggctgacgatcctgctctttttcctgctgccgacgtttctggccggctttatcgacccgtatatcaagagcgcggcggtgcacaatctggtcgaatccgtcatcaagctcgtgatcttcttcgcttacatgatcctgtgctccaagcagaaggacatctaccgcgtgttccagtaccacggcgcggagcataagacgatcttttgctacgaggcggggctgccgctgacggtcgaaaactgccgcatccagccgcgccaccatccgcgctgcggcacgagctttctctttgtggtcgtggtcgtgtcgattttagtctcgagccttgtcttcagctttgtcaactggcgcaacatgtgggtgcgcatggcgctgcacctgctgctgctcattccaatcgtgggcgtgacgtatgagttcaaccgctacgtcggcgggcacgacaacaaggtgacgcgctttctggcgcgtccgggcctgtggctgcaaaactttacgaccaacgagccggacgacagcatgctcgaggtcgccatccgcgcgctcgagctggtcattcccgaagaaaaaggcaaggatgcgtggtaa

SEQ ID NO: 932 - DNA, 690 bp, Unknown
  Unknown gut bacteria
atgaaaaaagtgctggtgctggaggatgaagccagtatccgtagttttattgtcatcaatttgcagcgtgcgggctacgaggtcgtggaggctgagtgcggcgaggaggcgcttcaaaaattgcaggaaaatcccgacacgaagctgtgcctgcttgacatcatgctgccggacatcgacgggttcgaagtctgccgccgcatccgcatgtcgaacgcgcaggtcggcatcatcatgctgacggcgcgcacgcaggagatggacaaggtgacgggtctgatgaccggcgcggacgactatgtgacaaagccgttttcgcccgccgagctcaccgcgcgcgtggacgcgctgctgcgccgcatgggcgaaaacacgccggccacgcataccggagagttgtatcagccgccgtttctgctgaaactgacgaaccggacgcttgaaaaaaacggcgagcgcgtcaagctgacgcagatcgagtacgcgatcgtcaagctctttatggaaaacagcggcaaggcgctcgcgcgcgaggaaattctcgacgccgtgtggggcaagggctactttggcgagctcaagatcgtggacgtgaatgcccgccgcctgcgcctcaagatggaagatgacgcgcaggagccgaagtacatctgcactgtgtggggctttggttataaatggacggtgtga

SEQ ID NO: 933 - DNA, 1326 bp, Unknown
  Unknown gut bacteria
atgctcaaagttttgaaattcggggtttcgtcgctcgccgacgcccgccagttcgccaaggtcaagtccatcgtggaagccgaccccgcccgccgcgtggtcatcgtctccgcgccgggcaagcgcttctccggcgaccataagatcaccgatcttctctatctctgcgccgcgcacatcaaatacggcgtttcgtgcgaggacatcttcgccatgatccgcgaccgctacaacgagatcatcgccgaatgcggcctgcacatcagcctcgacaaagagttcgacgcgctgtgggacaagatgaaaaatggcatcagccaggatgagctcgcctcgcgcggcgaatacttctccgcacggctgatggccgaatacctcggctatgagttcgtcgacgcggcccgctggatcaagttcaagttcgacggcaccgtcgatcaggacgcatcctacgcggcgctgcgctccctcgccgaggaccgcaaggtcgtcatccccggtttctatggcgtgatgcccgacgggcacatccgcacgttctcccgcggcggcagcgacatcaccggcgcgctcgcggcagcggcgcgcggcgcggacgtgtatgagaactggacggacgtctccggcatcctgatggccgacccgcgcatcgtcgacgatcccgagcccatccgccgcgtgacctacagcgagctgcgcgagctgagctacatcggcgcgcaggtcctgcacgagggcacgatcttccccgtgcgcgagaaaaacatcccgctcaacatccgcaataccaacgcgcccgaccatcccggtacgatgatcttggagtccatcggcgacgagatggaagagggcggcttcatcaccggcatcgccggcaagaagggcttttccatcatcaccatcgccaagactggcatgtcgagcgaaccgggctctctcctgaaaattctcaacgtgctcgccaagcacgaggtcaacgtcgagtacctcccgtccggcatcgacaacgtctcgctcgtcgtctcgtccgacaaggtgtcccgctcgctctacgaaatgctgggcgagctgcaaaaagaggtgcagccgaataagataaccgtaacggagcatatcgccatcgtcgccgccgtcggccgcaagatggcgtaccgtcccggcgtttccggtaaaattttcgccaagctcggcgaaaacggcgtgaacatccgcatgatcacgcagggccccgaagagctcaacatcatcgtgggcgtggaagaaaaagatttcgaacaggccatccgtgtcctgtacaatagttttgtgaaggagaatgtagtgtaa

SEQ ID NO: 934 - DNA, 1422 bp, Unknown
  Unknown gut bacteria
atggaaaagctatttaagctgaaggccaacggtactacggtacgcaccgagatccttgccggtcttaccacgtttatgaccatggcctacatcatcgcgctcaacccgaacctgctgaccaactttgcagtgggtacgccgctgtggaacggtgtgttccttgccacctgcatcgcctcggcgatcggcacgatttgcatggcgtttttcgccaacaagccgttcgtcatggcgcccggcatgggactcaacagcttcttcgcggtggtcgtcgccaacatcgcggtcatcaacgagtgcgagtacgagtccgcgttccaggcggcgctcgtcatcatccttgtcgagggtatcgtgttcctcatcctcacgctcttaaaggtgcgtgagaagatcgtggaggccattcctctcggcgtgcgctacggcatcgctcccgccatcggcctgatgctgatgaacgtgggccttggctccaacgtcggtatctactctgaaaacggcggcccgttctacatgatgcgtgacttcttcggcgcgctgacgcccagcatcatcaagggcaacatgggctcgggctacgatgcgatggtcctgaccgtcgtgaccgcgttcctcggcgttttcgtcatggtcgtcctcgccaagaagggcgtgaaggcggcagtgctgctcggcatgctgttctcgtccgtcatctactgggcgggcagcgccatcttcctgcatgtcaatccgtttgcgagcctcgcgactgcgagctttgtcccgcctttcgccgacatggtctccaccacgcttttcaagtttgactttgcgggctttgtgaacatcggctggttcaccgccatcacgctcgtcatcaccttctgcatgatcgatatgttcgataccatcggcacgctcgtcggtacggcctcccgcgccggcatggtcgatcaggacggcaacatgccccagatgaaggaagccctgctgtccgatgccatcggtacggtcgcgggcgcctgcaccggcacctccaccgtcaccacgttcatcgagtccgcctccggcgtggaagcgggtggccgcacgggcctgaccgcgctcaccgcgggcatcctgttcctcgcctgcatgttcctcgcccccatcgccgccgtcatccccggcgctgcgacctccgccgcgctgatctatgtcggcgttctgatgctccagggcctcaagaatgtggacttcagcgacatggaccaaatgctgccggtgtccatcatgctcatcggtatgccgatctccggctccatcggccacgccatcggcctgggcctcatctcctacacctttgtcaaggtgttctccggcaaggctaaggacgtcagcgttctgacctacgtgatctccgcgctgttccttgtcaagttcttcgccgtcgtgtaa

SEQ ID NO: 935 - DNA, 885 bp, Unknown
  Unknown gut bacteria
aaagtaacagaggacgatcttatgacgaagaatatcttacataatatcgaaaagaacatgagcagcttttccaaggggcaaaagctcatcgcccgcttcattctggaaaactacgataaggccgcgtttatgacggccagcaagctcggcaagaccgtgcaggtcagcgagtcgaccgtcgtgcgctttgccacccagctcggctacgaggggtatccgagcatgcagcgtgcattgcaggagatgattcgcggcaagctcacgagcatccagcgcattcaggcgtcggacggcgagctcgcagggtccgatctgatgacgaacgtcctgcagcgcgacatggagaagattcgcgtggcaatcgaccagtccgacggcgcggaatttgagcgcgtggtcggcacgaacatcggcgcgcgccgcatctacatcgtgggcttccgttcgtcctcgtttctggcagggtacttaaacttctacttccgcctgatcttcgacaacgtcactctggtcaacggcggcgcggccggctcgttcgaccaactcttccgcgtctccaaagacgatgtggtcatcggtatctgcttcccgcgctacagtgagcttgcgctcaagaccatccagtttgcgcgcgaccgcggcgcgacgatcgtcggcgtgacggacagcgaaatgtcgcccatcaaccagatgtccagcaattcgctgctcgtgcgcagcgagatgatctcgttcgtcgactcgctggcggcgcccatgagcatgctcaacgcactcattctggccgtggccaacaagaagggcgcagacatctccgcgacgttctccgaactcgagcacatctgggagcgcttcgacattttcggcaagatcgaagatgaataa

SEQ ID NO: 936 - DNA, 1221 bp, Unknown
  Unknown gut bacteria
atgaaaagtaagcgccgcaagatcttctacgttgcattgtccatcctcatcgcggcaacgatctggttctacgtgaacaacaaggaatccgtgaccgtgtacgtccatgacgtgccgatcgaatttctcaacgaggacacgtcgcttgccgacaagggcctcatgcgcatcagtggggacgaggatatcaccgtcgatttaaagctccagatgccgcgcaacgtcgtctacgactttgacacgagcgagctgcggctcgtgagcgacctttcgaccatcacctacgcgggcaagcagtccgtcagctacacgatcctgtacccttcgaaggtctcgtcgaacagcgtgaaggtcgaatcgccgaccatccgcaccgttcaggtcgagatcggcgagctcaacaagaaggacatcgagatccgctgcaaggtcgtcggcaatgtggccgagggctacatcgccggcacggtcgagatgctgcccgaaacgctcgaggtgcgcggccagcaggctgacatcatgcagatcagctacgcgcaggtcacgctcgacatcgaaaatgcatcctccacggtcgtgaagctgctcgactatgagctctatgacttcaacgaccagctcattgagagcaagaacatccatcccatgagtgaaaacgtacaggtgacaatgccggtgctcaaggtgaaggacgttccgctgaccgtcaactttatcgaatccgcgggctcgcggctcgagaattacacctatacgctcagccacagcagcatcaccctttccggtgatgcgacgcagatggcaggcatcagcgagatctcgctcggcacgctcgcgcttgaggacgtgcagggctcggagacgctgacctatgacattctcattcccgacggggtgaacaacttaagcgggatcacaagcgctacgctcacgatcagcagcggcgacatcagcacgaaagaggtcgaggcgacgcacttcagctacgagaatttctcaggcgatcacaccgtcaccgtcgtgacctcgtcactgcccgtcacactgcgaggctccgcaagcgaccttgaggccatctacggcagcgaggtccacgtcattgcagacctatccgacatcgccgccgacagcggcagctacaccgttcccgcccgcatcgaggtgagcggctacgacgtgggcgcggtcggcacttacgaggtcaccgttcacatcagctaa

SEQ ID NO: 937 - DNA, 1401 bp, Unknown
  Unknown gut bacteria
atgagagagatcatgggaactacagtcaaaaagcatgagatcgacatgctgcacggctccatctggaataagctgccgctctttgccctgccggtcgcagccacggcgatcttggagcggctcttccacgcctcggacgtcgccatcgtcggcaacttcacgggcgatgcgcgcacagtcgccgtcgcggcggtgggcgcaaacggcccgatcatcggcctcatcgtcaaccttttcatcggcatcgcgctcggcgcgaacgtcgtcatcgcgaacgccatcggctgccgcgacgacaatgccgtcaagcgcgcggtgcacacggccatcgtgtttgctgtgtgcggcggcgcggcggtcgcgctgcttggtcagttcatcgcctcgccgcttttgagtattctcaatgtgccggaggacgtgttcccctatgcgcttttgtatctgcgcatttatcttctcggcatgccggtgatattgctctacaactttgaggccgcgatcttccgcagcatcggcgacacaaaggtgccgctcgcggcgcttgcggtctccggtgtgctgaacgtgctgcggaacctctttttcgtcattgtgctgcatatgacggtcaacggcgttgccatcgccacggtggcggccaacgccgtgagcgcggcactgctctacgtccgcctgacgcgcacggataaatgcgtgcgcgtggagcgcaaagcgctgcgcatcgacggcgcgagcttgaagcgcattttgagcatcggccttcccgcgggcgtgcagagcgcggtgttctcgttcgccaacatcgtcatccagtcggccatcaacaccctcggcacggtggcgatcgcggcgtcgagcgcggcgttcaatgtggaaattctcgcctacgacgtgctcaactcgttttcgcaggcctgcacgacctttgtcggccagaactacggcgcagggcagatcaagcgctgcaagaagacgatgcagctcagctttttggagggggccatcgcgacatttgtctcggtcgttgtcctgctgctgagcgcaaggtcgctgctcgccattttcaacagcgatcccgaggtcattgccatcggctatattcgccttgcgacgatcctgccggcgtatgttttctgcctgatctacgaaatactctccgggtatctgcgcggcttcggcatttcgctcgcgcccgcacttttgacgatgctcggcgtgtgcggtatccgcatcgcgtgggtcaagttcgtcttcccgacgagcatgacattccagaccgtcatgtgggtctatcccatcagccttggcgcgacggcggtgctgatcctctgcgccgtgctgatctaccgcccgtccagacgctttgcgggccttgaaacgaaagaagaggacaagtga

SEQ ID NO: 938 - DNA, 1971 bp, Unknown
  Unknown gut bacteria
atggaatttaagctgcatgcgcccttcaagcccacgggcgaccagcctgaggccatcgaaaagctggcgcagggcgtgaagatgggcctcgacgagcaggtcttgctcggcgtcacgggctcgggcaagacgttcacgatggcgagcgtcatcgaaaaggtccagcggccgacgctcgtgctggcgcacaacaagaccctcgccgcgcagctgtgcgcggagttcaaagagttttttcccgaaaacgcggtggaatacttcgtttcgtactacgactattaccagccagaggcctatatcccccacaccgacacctatatcgccaaggacgcctcgacgaacgaggagatcgaccgcctgcggctttcggccacctgcgcgctgctcgagcggcgcgacgtgatcgtcgtctcgtccgtctcgtgcatttacggcctcggcgagccggaggactttgaaaagctgatgatctcgctccgcccgggcatgacgatggagcgcgacttcctcttaaagcggctcatcgaaattcgctacgagcgcaacgacgtcgcctttgagcgcaaccgcttccgcgtgcgcggcgacacggtggagctctaccctgcgtactaccgcgacaaggccgtgcgcgtcgaattcttcggcgacgagattgaccggatcagcgaattcaaccccgtcaacggtcaggtgacgcgcacgctccagcacatcgccatctatcccgcgtcgcactatgtcacgacgaaggacaagctcgagcgcgccattgtcgagatcgacaaggagctcgacgagcgcgaggcacagtttttggctgagggcaaggccgtcgaggcccagcgcatccgccagcgcacgcgctacgatatcgagatgctgcgcgagctgggctactgcacgggcatcgagaactattcccgcgtcatcagcgggcggcccgtcggctcgccgccgctgacgctcatcgactacttccccaaggatttcctactttttgtggatgaatcgcacgtcacgctgccgcaggtgcgcgcgatgtacaacggcgaccgcgcgcgcaaagagagccttgtcgagtacggcttccgcttgccctgcgcgtttgacaaccgcccgctcaaattcgacgaatttgagcagcgcgtccaccagcgtatctacgtttcggccacgcccggcgactatgaaaaggaccgcgcgggccagatcgtcgagcaggtcatccgcccgacgggcttactcgacccgaaggtcgaggtgcgccctgtcgaaaaccagatcgatgatctcgtcggcgagatcaacgcaagatcggcgcgcaatgagcgcgtgctcgtcaccacgctgacgaaaaagatggcagaggacctgacgcagtatctgaccggcgtcggcatccgcgtgcgctacatgcacgcggacgtcgaaaccatcgagcgcatggagctcatccgcggcctgcgcctcggcgagttcgacgtgctcgtcggcatcaacctcctgcgcgagggccttgacatccccgaggtctcgatggtcgcgattctggacgcggataaggaaggctttctccgcagcgaaacgagcctcattcagaccatcggccgcgccgcgcgaaacgccgacggccttgtcgtgctctacgccgacaccgtcaccccctcgatgcgccgcgccatggacgagactgagcgccgccgccaaattcaggacgactacaacaaggcgcacggtatcattccgcagaccatccgaaaggacgtgcgcgagatcatcgaaatttccaagaaggacgaggaatccgcccgccgccgcggcaagcgcaagctctccgagcgcgagcgggacgaagagatcagaaagctcgaaaagcagatgcaggaggcgagccgtatgctcgaattcgagtacgccgccatcctgcgcgaccgtatcatcgagctgcgcaaggaaaacacgaaataa

SEQ ID NO: 939 - DNA, 1509 bp, Unknown
  Unknown gut bacteria
atggagaatgtcacgaagcggttcggcaaagtggtggcgaacaacgccatcaaccttgagctgcacgagggcgagatcctgtcgctgctcggcgaaaacggcagcggcaagacgacgctgatgaacatgctctccggcatctatttccccgacgaggggcaaatctacattcacggcgaacccgtcacgatcgcctcccccaaggatgcgttcgaacacggcatcggtatgatccaccagcacttcaagctcgttgatcttttcaccgcaacggagaatatcatcctcggccttgaaggcaagctcgacattgccgaagccagcaaaaaggtcaaagagatctgcgacaaatacgggttcgacatcgaccccaatcagaagatctacgacatgtccgtttcgcagaagcagaccgtcgagatcgtcaaggtgctctaccgcggggcggacatcctcattctggacgagccgaccgcagtgctcaccccgcaggagacggacaagctcttcgccatcatgcgcaacatgaaggccgacggcaagtccctcattatcatcacgcataagctgcacgaggtgctcgacgtgtccgaccgcgtggccgtgctgcgcaagggcgaatacgtcggtgacgtcgccaccaaggacgccaaccagcaatcgctgaccgacatgatggtcggccacacggtgagcctgaacatcaaccgccccgagccgaaggacgttgaaaagcgcctcgtcatcgaaggcctgacggcttacgacgagcttggcgtcaagcgtctggacgatgtcagcttcaccatcaacgcgggcgaggtgctcggcatcgcgggcgtcgcaggcagcggccagcgcgagctgctcgagtccattgcgggccgctaccccggtgcctccggccatgtcacgttctatccgcccgacggcggcaaagaaaaggaactcgtcggtctcgacccgatgaagatccgcaagagcggcatttcgatgtcgtttgtccccgaagaccgactcggcatgggcctggtcggctcgatgggcatgacgggcaacatgatgctgcgctcctggcgcaagggtaagggtctgttcctcaaccgcaaggatcccgaagcgctcgccaaccgcatctgggaagagctcggcgtcgtcacgcccagcacgtccttccccgtgcgccgcatgtccggcggcaacgtgcagaaggtgcttgtcggacgcgagatcgcccagtcccccgccgtgctgatgaccgcttacgccgtgcgcggcctggacatcaacacctcctataccatttacaacctgctgacagagcagaagatgcacggcgtcgccgtcgtctatgtcggcgaagacctcgacgtgctgcttgagctgtgcgaccgcatcgtcgttctctgcggcggtcaggtctccggcgtggtcgacgccagacagaccgacaagcgcgaggtcggcgcactgatgacgctcgtgaggggaggcaacaaggatgaataa

SEQ ID NO: 940 - DNA, 762 bp, Unknown
  Unknown gut bacteria
atgaacgtggaaaccatcacgagccggcagaatccgctgatgacgcacctgcgcaagctcgcttcctcccggtcttaccgcaaaaagagcggcgaatatctctgcgacgggacaaagctcttggacgaagcgctcaagtggggcgcgccggtccaaacggcggtgttctctgacggcgtggacattccagcgcttcccgataccgtgcgcgccgtgtgcgtgagcgaagacctgatgcgctcggtgagcccgatggagacgccgcagggcgcactgtttacggtcgcgcttcccgagacgaagctgcccgaaacgcttgcgggtaagcactatctcgtgctggacggcgtgcaggaccccgggaacgtggggaccatcctgcgcacggcggacgcgtttgagtgcgacggcgtgttcttagtcaacgcctgcgccgacctcttcaatcccaagacggcgcgcgccacgatgggcgcgatcttccgccgcgaggcgtacagcgtcacgccggaggagcttttcgcgctgctcagtaaaagcggcgtcccgctctacggcacggcgctgcgcgaggacaccgtgccgctgtctgacgcgaacctgtccaaagccgctgtcgccatcggcagcgaggggcgcggactgtcgcagcaaatgctggatgagtgcgccaaaacgctcaaaattcccatgagcccgcgctgcgagtcgctcaacgcggccatcgcggcgacggtcgttctgtgggagatgtatcgctga

SEQ ID NO: 941 - DNA, 1440 bp, Unknown
  Unknown gut bacteria
atgcgcatgaagcccaccttttacccccgccttgcgtggatgggtatcaaaaagaacgcaaggctctatgtgccctatcttctctcctgcgcgttcatggcagcgatgctgtatatcattgcgtacctcgccgtcacccccgcgctctatacggtcaatggcaaggtgaacggctccggcacctctgcggtcgcgatgacgatgagcctcggctcgttcgtcgtatcggtgttcatcgcgctgtttctcttctacacgaacagctttctcctgcgtcgccgcaagaaggaattcggcctttacagcgtgctcggcatggaccgcggcgcactcagcgccattctcttctgggagacacttctggccgcggcgttcacgctgatcgcagggcttggcctcggcctgctgctctcctatatctcgcagtccgcactgctgcggcttttatctctccccgccgcggctttcaccgtgagccttgccgccatcaagcagtgcgccatcacgttcatcgccatcttcgcgctgctctacgtgcgcggtgtgctgtcgctgcgccacgcacagggcacggcgcttttgaagagcgaaaacgtcggcgaaaagccgccgaagtcgcaatggctgctcgtcatccccggccttgcgctgctgctcggcgcgtactacatcgccgcgaccatcaacgaccccatacaggcgatgctgctcttcttcctcgcggtcatcatggtcattctatcgacgtatcttctcttcatctccggcagcgtgacgctctgcaaaacactccagaaggatgaaaaattctactacaaaaagcgcaactttgtttccctctcgtcgctcacctaccgcatgaagcgaaacggcgcgggcctcgcctccatttgcattctctcgacgatggtgctggtgatgcttgcctcgacggcgagcctctattttggcgcggaggacgcgatcaacacgcttgccgtccagaatcactggcatcccacggaaatggcggacgtccgtgcggagttcttctcgctctacggcagtctctttttcctcggcattcttttaagcgtgctgttcctgttcgcaacgctcctgatgctctactacaaacaggtcgtggaggggtatgaggatgcctcgcgctttgccatcatgcagcgcgtgggcatgactaagcgcgacatccgtgagagcgtgaacgcgcaaatgctgctcattttcctgctgccgcttgccgcggcggcgctgcacctcgccttcgcccagccgatggtctggcagatcatgcagctgttcggcatccagaacctcacgctgtttctcggcgtgaccggcgcggcgctgcttcttttcgcgctgctctactgcgcgatgtaccgcctgacgtcgaatgcgtatttccgcatcgtcagcactggcggcaccgcggcgtga

SEQ ID NO: 942 - DNA, 678 bp, Unknown
  Unknown gut bacteria
atgcagcttgatcgaccgcacgggcagatgtccgattcgttcctgatgtccgcgtttatcattttatccggcggattgcaggacgcctatacctattgctgccgcgacaaggtgtttgccaacgcgcagacgggcaacatcgtgctgatgagcacacacctttttgcaggcgactgggcaggtgttttccgctattttgtgccggtgatctcgtttatggcgggcatttttgtggcggaatgcgtccaccgccgctataagtgcatggaaaaggtgcactggcgccagctcatcattctggtcgagatcgtgctgctgttttttgtcggcttcctgccgcgggaggtcaacacctttgcaaacgcgctcgtctcgttcgtctgcgcgatgcaggtgcagaccttccgcaaggtgcgcggccacgcctacgcgagcaccatgtgcatcggcaacatgcgcagcggcaccgaggcgctgtgcgtctacttccacacgcacgaccgcgaggtgctgaaaaaggcactgacgtattttggcgtcatcggtatttttgccgtcggcgcggggcttggcagcgtcctgacggcgcgctttgccgaaaagggcatctgggtgtcctgcctgctgctcgcagtcagctttttgatgatgtttgtgcgcgaggaagagaagaaataa

SEQ ID NO: 943 - DNA, 948 bp, Unknown
  Unknown gut bacteria
ttcaacctcatcaccggcaactccccgggcaacgacatgcgcttctacgtcgaaaagtgcgaggcgatgcgcaacttctgcaacaagatctggaacgcgagtcgcttcgtgatgatgaacctgacgatcgaccacgtcgagctgcccaaaaagctcgagctcgaggacaagtggattctctcgaagctcaatacgctcatccgcgaggtcacggacaatatggacgccttcgagctcggcgtcgcgtccgcgaagatctacgacttcatctgggacaactactgcgactggttcatcgagctgacgaagaaccgcctcaacagcgacgatcagaccacgcgcgagaacgcacagaacgtcctctgctatgtcctcatcgagacgctcaagctcctgcacccgttcatgccgttcatcacggaggagatctggcaggcgcttccgcacgagggcgagttcctgatgctctccaagtggccggagtacaacgaaaagttcagcttccccgccgaggaggaggcgatgcagactgtcatcgaggccatcaccgccatccgtgcccgccgcaacgagatgaacgtcgcgccgtcgaagaaggtgcactataccgtcgccaccgcgcacgccgatacgttcagcgccggtatcccgttcttcacgcgtctggcctctgccagcgatgtgacgatcgtgcccgccgatgccgccatcgacgccgacggcaaggtcgagggcgacacccacgccgcgcgtatcttcatgccgctcgccgaactcgtcgactttgaaaaggagctcgcacgcattgccaaggagaaggcaaacgccgaaaagcagctcgccggtatcgagaacaagctgaaaaacgagggcttccttgccaaagcgccggaggcggtcgtcaacggtgcccgtgctgatgcggaaaagctcagagcgcttattgaa

SEQ ID NO: 944 - DNA, 1752 bp, Unknown
  Unknown gut bacteria
atgaatatgatccatcgcttcatgggctgcatccgcgagtataaaaagcccacgatcctgacgctcttgtgcgtggtcggcgaggtcgcgattgaagtgctgatcccgtttttcaccgccaatctcgtcaatgagatcaagggcggcgcggagctcagcggcgttgtgcgcgtgggccttgggctcatcctgatgtcgctcgtgtcgctcggctgcggcgcgctcggcgggctttacggctcgcgcgcgagcgccggctttgccaaaaacgtccgccacgatgttttcacccgcgtgcagagcttcgcgtttgaaaatatcgacaaattctcctccgcctcgctcgtcacgcgcatgacgaccgatatcaacaatgtgcagatgtcctttatgatgtgcatccgcatcgcggtacgcgcaccgctgatgttcctcttcgccgtcatcatggcctatatcatgggcggcgcgctggcgacgacattcctcattatcattcccgtgctcgtgatcggacttcttctgatcgcacgtaaggcaatgcccgcattccgcgcggtgttccgcaagtacgataagctcaatgaatcggtcgaggaaaatgtgcgcgcgatgcgcgtggtcaagggctttgcccgcgaagggtatgaaaagcagaagttcgccgcggcctcacacgatatcgccaaggacttcaccttcgccgagcgcgtcgtcgcgctcaacgcgccgctgatgcagttctgcgtatacttcaacatgatcttcgtgctatttgtcggctcgcggatcatcatcacgaacggcggcacgaccatcgacgttggccagctctcggccatgctgacctacggcatgcagatcttaatgtcgctgatgatgatctcgatgatctacgtgatgatgacgatgtcgtatgagtccttcgtccgtatctgcgaggtactcgaggaagagcccgcgctcaccgatcccgcatctcccgcgatggacgtgaaggacggctccatcgactttgaaaacgtcagcttcaagtactccgcacaggcgaagaaattcgcgctgcaggacatcaacctgcacatcgactcgggcatgaccgtcggcatcctcggcggtacgggctcgagcaagtcgaccctcgtgcagctcatcccgcgcctttacgatgtgagcgagggctgcgtcagagtcggcgggcgcgatgtgcgcgaatacgaccttgaggcgctgcgcggcgcggtcagcgtcgtgctgcaaaagaatgtgctgttttccggcacggtcaaggataacctgcgctggggcaacgaaaacgccaccgacgacgagatggtcgaggcgtgcaggctcgcgcaggcggacgaattcgtccgctccttccccgacgggtatgacacctatatcgagcagggcggctcgaacgtctccggcggacagaagcagcgtctctgcatcgcccgggcgcttctcaaaaagccgaagattctgatcctcgacgactcgacctccgcggtcgacacgcgcaccgacgcgctgatccgcgagggcttccgcacctatatccccgagacgacgaagatcatcattgcccagcgcgtcgcgtccgtgcaggatgccgacctcattctcgtgatggacaacggccatattgcggacatgggcacgcacgaggagctcctcgcttcgagtgaaatttaccgcgaggtctacgaatcccagacgaacggaggtgagcaggatgaagcgtga

SEQ ID NO: 945 - DNA, 693 bp, Unknown
  Unknown gut bacteria
atggcaatgaaaattctggtggttgacgacgagcagcttctcgtcaagggcatgaaattcaatctggaaaacgagggctacacggtcgagaccgcctacgacggcgcgaccgccatcgacatggcgaaaagcggcgggtttgacctcatcatcctcgatctgatgatgccgcaggtggacgggctgacggcctgcatgcgcatccgcgaattttccaatgtgcccatcatcatgctgaccgcccgcagcgaggacgccgacaagatcatcggccttgagtccggcgcggacgactatatcacaaagccgttcaacatcttagagctcaaagcgcgcatccgcgcgctgctgcgccgcgcgaacgccgcaccgcagcaaaagcagcctgaaacgctcctgttgaccgcgggcggcatcacgctcgaccccgagcagcgcgtcgccgtcaaaaacggcgagatcgtcgagctcacggccaaggaatacgacctcgtcgagcttcttgtcaagaatccgcgccgcgtttactcgcgcgaaaatctgatggacctcgtctggggctacacctacgcgggcgactaccgcacagtggatgtgcacatccggcggcttcgcgaaaagctcgaggaaaaccccgccgcgccgcagcacatcctgaccaaatggggcgtggggtactacttgaaggactga

SEQ ID NO: 946 - DNA, 1278 bp, Unknown
  Unknown gut bacteria
atggaggaacatattatgcagactgtcatcacgatcaacgccgtcatcatggcgctatttttcgtatgctattcctatcaattcttctatgtggcggtggcgctgctgaagcggaaaaaattcacctgccgcaatgaaaaccaccgcattgccgtcctcatcgccgcgcgcaacgaggaaaacgtcatcggccagctgctcgacagcatccacgcgcagaagaactatccgatggaccatgtggacatctacgtcggcgcggacaactgcacggatgacacggcccgcgtggcgcgcgagcgcggcgcgatcgtctttgagcgccacgatacggtgcatgtcggcaagggctatgtgctcaatgaaatgctcaagcgcatcaagcgcacgggccgcaagcactacgatgcctatctcgtgctggacgccgacaatatcctcgacccgaacttcatctccgagatcgagaaggtctactccagcggctatgagatcgtgacgtgctaccgcaactccaaaaactacggcgacaactggatctccgcgggctatgcgctgtggttcctgcgcgaggcgcagtatctcaataacgcgcgcatgcgccttggaagcagctgcgccgtgtccggcacaggctttctgttttccgacggtgtgctggaagcgtgcggcggctggaacttcttcctgctgaccgaggacatcgagtttaccattgacaacgttgtgcgcggggaaaaggtcggctacgcggcgggcgcggtgctctatgacgagcagcccacgagctttgcccagtcctggcgccagcgcatgcgctggtcgaagggctatctgcaggtgttccgcaagtacgcctccgagctcttctccggcattgcgcgcggcagcttttcctgctatgacatgacgatgaacatcatgcccgcggcggtgctcacgggtttgagcgtggtcgtgaacatcggcgcggcgatcgcgaacgcgacgtcaggcggttcgatggcggtgctggcggtctccgtgctgcaaacgctgatgagcctgtacttaacgctctttgtgctcggcgcgatcacgaccgtgacggagtggaagaatatccgctgcgcggcgtggaaaaaggtgctctacgccttcacgttcccgctcttcatgctcacctacgtgccgatctgcattgcgtcgctctttacgaaggtcgagtggaagccaatctgccacaccagagtgatgacgctggagcagatcgaagagcccggcctgcgcgcatcgtaa

SEQ ID NO: 947 - DNA, 1725 bp, Unknown
  Unknown gut bacteria
atgaattaccgtcaggaatatgaaaagtggctcgcctcccccgcgctgagcgaggacgagagaaacgagctcaaggccatcgcaaacgacgaaaaggagattgaaaaccgcttctacggcccgctcgaattcggcacggccggcctgcgcggcacgatgtacgttggccttcacaacatgaaccgccacgtcatccgctgggcgacgcagggctttgccaacgtcatccgcgctgagggcgaagaggccatgaaaaagggcgtcgccatctgcatggactgccgcaaccactcgatggagtttgcgcgcgccgcggcctgcgtcatggcgggcaacggcatcaccgtcaagctctttgagtccctgcgcccgacgcctgagctctcgttcgccgtgcgcgaatacggctgcgaggcgggcatcaacgtcaccgcgtcgcacaatcccaaggagtacaacggctacaaggtctactggtccgacggcgcacagctgccgccccagcacgccgccgcgatcgccaaggagctcgagcacatcgacatcttcaccggcgtcacgtcgatggactttgacgaagccgtcaacaagggcctcatcacgatgctcggtgaggactgcgacgagcgcttcatggctaacgtcatgagcatggtcaacgactatgataccgtcaaaaaagtctcgggcgactttaagctcgtctacacgcccttccatggctgcggccacaagctcgtgcccgaggcgctgacgcgtcttggcatcaagcaccttttatgcgtgcccgagcagatgatcatcgacggcaatttccccacggtcgtttccccgaacccggagaatcccgagggcttcgccctcgccattgacctcgccaagaagaacgacgtcgacttcattctcggcaccgaccccgacagcgaccgcgtcggtatcatggtgcgcaacaagcagggcgagttcgagcccgtcaccggcaaccagacgggcgtgctgctgctcgactatctgatcggtgcgatgaagcgtgcgggcaagctgcccgcgaatgccgccgcgctcaagactatcgtcacgaccgagatggcgcgcgccgtggcggaggcgaacggcctcgactgctacgacacgttcacgggctttaagttcatggccgagaagatgaacgagcttgagggcgcgggcaaaaacaccgtcatcttctcctacgaggagagctatggctacatgatcggccactatgtgcgcgacaaggacgcagtcacggcctcgctgctgctcaccgaaatggccgcgtggtactactcccagggcatgacgctcttcgacgcgctcaacgcgctctttgaaaagtacggctggtacggtgaaaagacgcacaacctcgtcatgccgggcttagatggtgcggagaagatggccgctcttatgaagtccctgcgcgagacgccgccgagcgagattgcgggagttccggttgctgtgtacaaggattacgcagacggcaccgcgcgcgacgccgcaagcggtgaggtcacgaagatcgcgctctctggctcgaacgtgctgcgctttgaactcgccgacggcacgcacatcgtcgtgcgcccgagcggcaccgagccgaagatcaaggtctacatcctcaccaagggcgcagacgcgcaggagcgcgacgcgaaccttgccaaatactccgcctgggtcaacaccctcgcctga

SEQ ID NO: 948 - DNA, 1410 bp, Unknown
  Unknown gut bacteria
atggaagaaaaacagctgaccagcagagagctggaggaacaggccaacgcgctgctcgccgaggcggattttgaggagatcaagctgccgaagaaagcgaaaaaggccgcagtggccaagaaagcgaacgaggataccgcgcaggcggaaaagcccgcggagaagtatcccccgctggatgaaaagctggtcgcctccctgcccgcggcggcgctgctgcagggcagcgaaaagctcatggagatctttgccaagggcaaggccaagggcaagctcagctccagcgacctgatggagaccatcgacgagatgaaccttgagagcgagcagctcgaccagatctacgactcgctcgaaacgctcggcatcgacatcggcaccgccgaggccatcgacagcaacatcgacgatgtggagccgccgatggaggagatcgccgagatcgaagaggaagagctcgtcgacccgaacgagctggtcgacagcttctcgactgacgaccccgtgcgcatgtacctcaaggagatcggtaaggtgtcgctgctgtcggcggacgaggaaatttcgctcgcgaccgcgatgtccgcgggcgtggaggccaagcagaagctcgaagaggccgaaaagaacggcacggagctgagcgaagaggaaatgaaggcactcaaatctgccgtcaagaagggcgagcgctccaagcagcgcttggccgaggcgaacctgcgtctcgtcgtgtccatcgctaagcgctacgtgggccgcggcatgctgttcctcgacctcattcaggagggcaacctcggcctcatcaaggccgtcgaaaagttcgactacaccaagggctacaagttctcgacctacgcgacgtggtggatccgtcaggccatcactcgcgccattgctgaccaggcgcgcaccatccgtatccccgttcatatggtcgagaccatcaacaaggtcatccgcgtgtcccgtcagctcttgcaggagctcggccacgacccctctcccgaagagatcgccgccgagatggacatgcccgtcgacaaggtgcgcgagatcctgaagatcgcgcaggagcccgtctccctcgaaacgccgatcggcgaagaggaagacagccaccttggcgacttcatccccgacgagggtgcaagcgagccgagcgaggccgcgtcgttcacgctgctgcaggagcagctcgtcgacgtgctctccaccctcaccccgcgtgaggagaaagtcttgaagctgcgcttcggcattgaggacggccgtccccgcacgctcgaagaggtcggcaaggagttcaacgtcacgcgcgagcgcatccgccagattgaagctaaggcgctgcgcaagctccgtcaccccagccgcagcaagaagctcaaggacttcctgaactga

SEQ ID NO: 949 - DNA, 924 bp, Unknown
  Unknown gut bacteria
cccgagaccgcgcagggcatcttcgtcaacttcaataacgtccagcgcaccacgcgcaaaaagctcccgttcggcatcggccagatcggcaagtccttccgcaacgagatcacgccgggcaacttcatcttccgcgtgcgcgagttcgagcagatggagctcgagttcttctgcaagccgggcaccgaccttgagtggttcaactactggcgcacgttctgccacaactggctgctctccatcggcctgaaggacgagaacctccgcctgcgcgaccacgatcccgaggagctgtgcttctactccaaggcaacgacggacttcgagttccttttcccgttcggctggggcgagctctggggcgttgccgaccgcacggactacgacctcacgcagcatcagaacaccagcggcgtgaagatggtctatcgcgagggcgagggcaaggacatggtcgaatacgtcccctacgtcatcgagccgtcgctcggcgtggagcgcagcgtgctcgcggtcctgtgcgacgcctacgatgaagaggtcgtcggccaggacaagaagggcaacgacgacgtgcgcgtcgtgctgcacttccaccccgcactcgcccccttcaaggccgcgatcctgccgctttccaagaaggacgtgctcgccggtcccgcgatggagctctacaacgagctttccaaggaattcatggtcgactacgacgagaccggcgcgatcggccagcgctaccgccgcgcggacgagatcggcacgccgtactgcatcacgttcgacttcgacaccgtcggcgacgaggccaacggcatcgcggccgaccactgcgtcaccatccgcgagcgcgacagcatggagcaggtccgtatccccatcgatcaggtcaaggacttcctgcgcgaaaagtgcgcgttctga

SEQ ID NO: 950 - DNA, 2409 bp, Unknown
  Unknown gut bacteria
atgaccattgactctgtgaagaaaatgaaagacgcgctgtgcgaaaagctgaaggtcagcttcggcagcaccgtggaggaggcgaacgatgcgcagatgatgcgcgcgagcgcccttgtcctgcgcgacgtgatggccgagcgcagcgtggacaccatgcgcgagacccgcgaggaacaccgccgtcaggtgcactacctgtcgatggaatttctgatgggccgcagcctgatgaaaaacgcgttcaatttaggcgtcggcgaaattctgaccgaagcgctcgacgagctgggcttccgcgcagcggacatctttgaaagcgagcccgacgcgggtctcggcaacggcggcctcggccgcttggccgcgtgctatctcgactcgatgacgacgctcgacatccccgccgcgggctattccatctgctatgagctcggcattttccgtcagcgcatcgtcgacggccagcaggtagagctgccggacaactggaaggacctcggcggcgcgtggctgctgcccaagccgcaggagaccgagaccgtccgcttcggcggcacggtccgccagttctgggacgacgggcggctgcatgtcgtgcccgagggtgagaccgaggtgctggctatcccctgcgacatggagatcgcgggctacggcacgaagcatgtcaacacgctgcgcctctgggacgcgaagtcccccgtgccgctcgacatgtcgctcttttcgcagggcgagtatctgcgcgcacaggagcagcacgcgatggccgaaaccatcgcgaaggtgctctatcccgaggacaaccatcccgaggggaagagcctgcgcttaaagcagcagtatttcttcgtctccgcgaccgtgcagtccattgtgcgcaagcacatcgaggtctacggtacggcggcgaacttccacgaaaagaatgtcattcagatcaacgatacgcaccccgcgctcgtcatccccgagctcatgcgcatcctgatggatgatgcgggcctcgactgggacacggcgtggaacattacgacgcactccgtcgcttacacgaaccacacggtgctttccgaggcgctggagcgctggccgcaggagttgatgcagtcacttctgccgcgcgtgtggacgatcatcaccgagatcgcgcgccgctatcaggaaaaaatcgaaaactactaccacgacgaggccaaaacgcgtgaattggccatcatctgggacggtcaggtccgcatggcaaacctgtgcatcgcgggcggcatggccgtgaacggcgtgagcgctctgcactcggacatcctgcgaaacgacgtttttaaataccagtgcgcgatggagccggagaagttcaagaatgtcaccaacggcatcgaccaccgccgctggctcgcgcagatcaacccgcggctcgacgagctcgtgcgcgcgctcgcgggcggggatgaatacctcctgcaccccgaagcgcttaaaaagctcgaggcctatgcagacgacaccgcggtgctggaccgcctcggcgagatcaagcgcgcgaataagctcgattttgccgcctacgtcaaaaagacgcagggcatcgtgctcaacaccgacgcgatcttcgacgtgcaggtcaagcgcctgcacgagtataagcgtcagcttttgaacgcgatgcatatcatctacctctatcaacagctgcaaaacgacccgaaccgcgccatgcagccgcgcgtgttcctgttcggcgcgaaggccgcgccgggctacgcggtcgccaagcgcatcatccgcctcatcaactcccttgccgctgagatcaacgccgaccccatctgccgcgacaggctgcaggtggtgttccttgagaactaccgcgtgtcgctcgccgagcatctgatgcccgcgagcgaggtgagccagcagatctccaccgctggcaaggaggccagcggcacggtcaacatgaatttcatgatgaacggcgcgctgaccgtcggcaggctcgacggcgcaaacgtcgagatgcacgagaggctcggcgacgagaacatgttcctcttcggcctgcacgccgacgaggtcgtgcgcctcaagcgcgagggctacgccccgcagaagctctacgcgcgcgacgagaacctgcgcgcggtgatcgacaagctcaaggcgggcttctcagacggcgtttcctacgacgatctcgcctcgcggctgctgatgaacgatgaatacatgctcttgcaggacttcgcgtcctactgcgccgccgagcagcgcatggcagatacctacgcaagaagcgaggaatggaaccgcatgtcgctcatcaacatcgcccgcagcggcatcttcgccgccgaccgcgccgtcgcgcagtacgcggatacgatctggcatgtaccgcacaaataa

SEQ ID NO: 951 - DNA, 780 bp, Ruminococcus gnavus
atgattcaaatcatcatttcacctgcgaaaaaaatgaatatatgcgaagaatttcccggcactgccaccacacctgtttttgcagaacagacagaccttttatatcagacgctaaagcagatgtcatttgaagaattgcagaaactttggaaatgcagtgaaaaactggcacttcaaaatacaaaaagactgtgcgaatttacaccggctgacgctgtcactcccgctgttctcgcctatgaagggatccaataccaatacctcgcaccgggcatcttttctgatacacagtgggactacgtaaaccggcatctgaacattctttccggattttatggtgtcctgtgcccttcagatgctgtcattccctatcgtctggagatgcagaccaaactggaaactgagaatgccactgatttgtatcatttctggaacaatcagctatatcaggcattgtactgtaaatttgagaaagactctccgaaagagctcatcaatctcgcttccgcagaatacagcaaagcagtacttccttatctgacagaagacgtacactgcgtcacctgcgttttcggcgagttcgttcagggaaaagtaaaggtgaaagccacgctcgcgaaaatggcgcggggagaaatggtccgctggatggcagaacaccagattcagactgcagaagatctgaaacagttcaccggacttggatttgctttcgaagagtctctatcttccgggacagaatatgtgttcctaaaaaaggatatctgcccggaagattag

SEQ ID NO: 952 - DNA, 516 bp, Ruminococcus gnavus
aaggaggttttcaaaatggaacagaatttttcacttactccggtgcatactgacaaacagattcaggaaatttccaatcttgcttctgttatctggcatgagcacttcactcccattatcggcatacagcaggtagaatatatgctggaaaaattccagtcttttcatgccctgaaagaacagatggaaaccggatatgaatattttcagatttttgacaatacagagttttgcgggtactgcgggattcatcaagaagaaactacactgtttctaagcaaactctatttaaaaaaagaggcgcgaaaccgacacctctctacaaaaacgatccagtatttaaaaactctctgtcaaaaacgcggtctctcttccatctggcttacgtgcaacaaatacaatacgaatacccttgcggtctatcatcatcttggatttgagacggttcgttcacaggtagcggatattggaaacggatatgtcatggacgattatatcctggaatgcagagtctga

SEQ ID NO: 953 - DNA, 1281 bp, Ruminococcus gnavus
atgactttttttgcgatgccgatttttctgggcaatttatttcagcaattatataacactgtggattctctgatcgttggaaatttcctggggagcagtgcactggccgcagtcagctcctccggaagtctgatctttatgctgattggatttttgagtggaatctcagcgggagcgggggtgatcgttgcccggttttttggtgcaggagatgagaaaaatctgcagcgcgcggtacacaccacagttgcatttggtctggtggcaggagttttgatgaccggtgtgggagtggcactttctccgcagatcctgcggtggatggatacgcccgaaagtgtaatgagggaatcggtgacatatctacagatttattttgcgggatctttaggatttgtgatgtacaatgtcctagtgggaattctgcaggctgtgggagacagcagacatcctttgtattatctgatcgtatcgtctgtgatcaatctggtgttggatctgttgtttatcacaggatttcatacaggagtgggaggtgcggcggttgcaaccgtgatctctcagattgtgagtgcactcctttgtttctggcagctgctgcggacaaaggaaagctatggattgaagattcgaaaaatccgttttgacaaaggaatccttgtccagatcatcaagatcggactgccttccggagtgcagaactctatcattgcgtttgcaaacgtaatcgtgcagtccaatatcaatgcattcggagagatggcaatggcgggctatggggcctacacaaaggtggaaggattcggttttctgcccatcaacagctttactatggcactgacgacatttgtaggacagaatctgggtgcaaagcaggaggagcgcacgagaaaaggggcgcgatttggaattctcgcagcagttatattggcagaactgattggtgtcgtggtatttcttctggcaccacagctgatcgcggcatttgactcttctcctgagatcattcggtttggtgtggaaaaagccagaacagcagcgttattttactgtctgcttgcattttcacattccattgcagcaattctgcgcggtgcggggaagacgatggtgtccatgatcattatgatgatgtgctggtgcgtgatccgggtgtctttcctttccgtgatgattccgctcactcacagcattcaggtggtgtactgggtatatccgctgacatggagtttaagttctctggcatttttctggtattataagaaagcgaagtggatataa

SEQ ID NO: 954 - DNA, 1272 bp, Ruminococcus gnavus
atgcatgagaaaagaagggaaagaggacgaacatatcgggtcgggctgatcctgggcttttgtcttctgattgcagtaaatggtctgtttccggtttcgtgtgtatatgcggaggaagaacagacaaaaatcgcatacggggagaatactccaggacagttatacgcccggtcggcagttttgatggatgcagacagcgggcgtattttgtttgcaaaaaatgccgaaacagagcgtcctatggcgagtacaaccaagatcatgacctgcattcttgcattggaacgtgcagacccggatgagagtgtgtcagtcagtgccaatgcggcagcccagcccagagtccgactggggacagtggaaggacagaaatttaagcttaaggatcttttatattctctgatgctggaatcacataacgatacagcggtgatgctggcagaacatctggctggaagcgtggagcagtttgcggatgagatgaaccagaaagcaagagaactgggacttagccatacccattttgtcacacccaatggtctggacggggcagatgacggcgggagccatcggaccacggcagaagaactggcaaggattatgcgctattgtgtgatggagtctccaaagcggaaggaatttctggaaattacaggcgtgtcttcctatcagttttcggatctggagcagacgcagacgtattcctgcatcaatcacaacgcgtttcttacgatgatggaaggcgctatatccggaaaaaccggatttaccggggaggcaggatattgctatgtgggggcattaaaaagagaaaagcgaacctttatcgtagcacttctggcgtgcggctggccgaacaatcggagctataaatgggaggatacaaaaaaactgatggagtacggtctggaacactttgaatatcagagtgtaaaaggcgccgggcaaaaatttaaaatccgggtgacggatgggattccggattccaatcagaaagcggcgtatacatatgcagaagcactgtcagagcagtcaaatctttcgtttctgctggcagactgggaatctgttcaggtaagaaggaacattccgacagtattgccggctcctgtccgggaagggacagaagtgggaacgatagaatatcgggtcaacggagaaactcttgccagacttccggtagtaatccaaaggtctgtgggaaaaattgatttttcatggtgctggaagaaaatagcagcaaaatatttcttaaaagagaaaatatattaa

SEQ ID NO: 955 - DNA, 648 bp, Ruminococcus gnavus
aaaagaatgagcaagaatccttatgacgtgctgggagttcctcagaatgcatcagatgatgagataaaaaaagcataccgggagctgacaagaaagtatcatccggatgcaaatgtgaacaatccgcttgcagatctggcggaagaaaaattcaaagaagtgcaggaagcatatgatgagatcatgcgccagagagagcagggaggaggatattcctacggaaattcctcctatggcgggaattcttacaataacacatacaacggaccacaggacgcagagatgcaggcagtgttcaattatatcaacagcagaaactacagggaagcgctaaatcttcttgaccggatgccgaaccgcaatgcgatgtggtattatgccagcgggtttgccaatgcaggaatcggaaataacgtacttgcaagagagcatgcggcacaggcagtcaatatggaaccgaataatgtacagtatcgtcagttgttgaaccagctggactggaacagcagaagatatcagagcaatccatacggaggcggatatggagccggcggacagagctgtggaacggggaacatgtgctgtgatctctggtgtgcagatacgctgtgtgaatgtatgggaggagatctttgttcatgcatgtaa

SEQ ID NO: 956 - DNA, 987 bp, Ruminococcus gnavus
atggcatttatagaatttaaaaatcttcatacatggttctatacagacgctggaattgtcaaggcagtcaacggcgttgattttgagatccgcaaaggagagacagtctgcgtagtaggagaatccggatgtggaaagagtgttacttcactctctctgatgcatctggttcagtcacctccgggaaaaatcgtggatggtgagatcctgatggatggaagagatttactgaagctgagcaagagcgaaatggagcatgtcaacggaaaagatgttgcaatgatcttccaggagccgatgacttctctgaatccggtactcaaagtcggacatcagatcatggaaagtattcttttccatacagatgcaacaaaagaagaagcaagggcaaaagctctggaaatgataaaactggttggtattccgagagcggaagaaatcatggaatgctatcctcacgagctttccggtggtatgcgtcagcgtatcatgattgcaatggctctggtatgtaatccgaagctgttgatcgcagatgagccgacgactgcgctggatgtaacgattcaggcacagattctagatctgatgcgcaagctgaaagaggaaatggatatgtccatcatgctgatcacgcatgacctgggcgtcgttgcagagatggcagattacgtggttgttatgtatgccggaaatgttgtggaaaaaggaaaagtactggatattttccagaatccgatgcatccatatacaatcgggctgttaaaatcaaaaccgatcatcggtaagaccaatcacaatgagcgtctgtattcgatcccgggacaggttccgaacccgatcaatatgccggagaactgccatttcaatgagagatgtgagttctgtcaggaaggctgtaaagaaaaagaaccaaaactggtacacgttggaaacggtcattatgttgcatgctttgtcaacgcaccggaaaaggaggaagtataa

SEQ ID NO: 957 - DNA, 435 bp, Ruminococcus gnavus
atggctgagttcacagatctgatcaccatttcccagatgactcccggaccgatcgccatcaattccgccacctttgtcggaatcaagatcgcaggaatgcccggtgcacttgttgcgactctcggatgtatcctgccctcctgcatcattgtgaccattattgcatatctgtatatgagataccgaaatctggacaccctgcagggaattcttgggatgcttcgtcccgccgtcgttgcactgattgcctctgcaggaatttcgatcctgatcactgctttctttagagattcggggataaagctttcctcatgcaacccaaaggccgtggtaatctttgcaggctgtctgattcttctgagaaaacgagtcaatcctgttctggtcatggtacttgccgggattgtaaatgtgggactctccctttttagatga

SEQ ID NO: 958 - DNA, 399 bp, Ruminococcus gnavus
atggtaagaacagaacttcgagagcacatttttaagatgttgttccagattgaatttaatacattagaagagatgccaaagcatctggaattgtactttgaagagctgacaagcgcaaaagagaaggataaagagtacatacagaaaaagctggaagcagtgatcgaaaagctggaagagatcgatgcgattttgaatgaaaaagcaacaggatggaaaacctccagaatgaacaaggtcgatctggcgatcctcagacttgcggtttatgagatcaagtgggatgatgatgttcctgtaaaagttgcaatcaatgaggcagtggaacttgcgaagaaattcagcggggaagaaggtcctgcattcgtaaacggagtacttgccaagattgcagattaa

SEQ ID NO: 959 - DNA, 852 bp, Ruminococcus gnavus
atgacctggaaggaagcctggaaaagaggagcgcagagcttacaaaaagccggcgtggaagagtatgatctggacgcctggtatttattggaacatgtgaccggaattacaaaggcttcttattatatggagccggagcacccgatgcacgatcaggaggagcgagaatatctggagctgatcagaaagagaagtacacggattccgcttcagcatctgacaggtgttcaggagtttatgggactggaatttctggtcaatgaacatgtgctgattccgagacaggatacagaagtactggtggaaacagcgttagaggtgtgcagaaaggaacagatgggagaaatccgactcctggatatgtgcaccggttccggatgtattcttctgagtctcctgcatgaattaaagcccaggacagtgacaggtgttggtgtggatctttcaaaagaagcgctgtgtgtggcagagaaaaatgctgagaagctgaagatcgatgcagagtttctggagagtgacctgtttgaaaatgtaaagggaacttatgatgtgattgtatcaaatccgccgtatatcaggacctctgtgatagaaacactgcaggaggaagtaaaagaccatgatccgtatcttgcgctggacggaaaagaagatggactgtatttttaccggaggatcattgaacaggcacctgcatacctgaaaaagaagggatggcttttgtttgaaatcggttctgatcagggtgaggatgtcaaaaatctgatggaacaggcaggatatacgggcgtaagcgtgaaaaaggatttggcaggtcttgaccgggtggtctttggcgtgtatgataggtag

SEQ ID NO: 960 - DNA, 429 bp, Ruminococcus gnavus
atgaaaatgtctacaagagggcagtatgcactggaaattgcagtggatcttgcgctgcatctgatgccggatcgtctggaaagtctgaatgatatcgcaaagaggcgaaatctttcagaaaaatatctggagaggattatgaagcttttaaaagaggcgggtcttgtaaaaagtgtgcgcggtgcatatggaggatattgcctgacgaaggagccgggagaaatttctgtattggaagtgcttcgtgctgcggaaggtcagctggcaccggtatcctgtcttgttgaaaataccgagtgtggaatggaatgcgaaatctgctctacgaaaagtacctggggtgagatgtgggagcagatactggatacggctgcagaggttacagttgcagatattgcagagatcgtaaggaaaaaagagacctgttaa

SEQ ID NO: 961 - DNA, 1053 bp, Ruminococcus gnavus
atggttggattgaaaaaaagaggtgtgatcaccgcagttgccggtattttagcggcggttacgataacaggatgcagtgctgcccctgataatgatgctacagtagtaacggtcggaacagagaaggtttcgtatggtgttgctaatttttatgcgcgtatgcagcaggcgcagtatgagtcgttttatgcaggcctgatggggatgagtgcggacacaatgtggagccaggaagtggaagaaggcaagacatatgaggagaatatgaaagacagtattttagagtctctggaaaatatgtatcttgtaaaacagcatgcttctgaatataaagtggagttgacagacgaagaaaagaagaagatcgacaaagccgcagaggagtttgtggaagacaacacattggaggacaaagaagttgtgtccggatataaaaaatatgtcaaagaatatctggaacttgctacgattcagcagaagatggatgcaccaatgaaagagggcgtggatgaaaatgtttcagatgaggatgcagcacaaaagaagatcgagtatgtccagttctcttatacgaagaaggatgattccggacagtctgttcagatgactgacgatgaaaagaaggcagaaaaagaaaaggcacagacctttctggatacagtcagcgcagatccggacaaggacatgaatgcagcagctgcttcggcagaaaaagaagtgcagacggcgacatttgattctgagtccagcacactgaacgcagatcttttaaaggcggcagatgcgctggaaaatgtaggggacgtgacaagcctgattgagacagacgatggaatctatgtggcgaagctgacaagcaagctggatcgtgaggcaacagatcagaagaaaaaggaaatcgtagaagagcgcaagcagaaacagtatgaagatcaggtggaaacatggcgcaaagagactgacatcaaggtagacaaaaaagaatggaaaaaagtagactttgaagatcagggtgtgaatgtaaagcagacagcgactgattcagaaaaatag

SEQ ID NO: 962 - DNA, 681 bp, Ruminococcus gnavus
atggaattggagaaggcgaaagaattgaattacaaagagatattacaaaatgaggaagtaaaagcgtatttggagaagggcaacgaaaatctcggaattcttgggtataccgatcattccgaaaaacattgtgcaatagttgcaaaacgtgcagggatgattttgtcaaaatttggatatacagaacatgagattgaacttgcagagattgcaggggctatgcatgacattgggaatgtgatcaatcgaaagaatcatggagaatatggggcaattctggcatgttcaatcttggaaaggttgaaaatgccgctgagagacagaatccttgttatgtcagcgattggaaatcatgatgaatctacaggggaggccatcgatgcaatatcagctgcgttgattcttgcggataagacagatgtcaggagaaatcgtgtaagaaataaagaaaaagcaagttttgataagcacgatcgtgtgaattatgcagtgacaagtgcggctgtaaaagtgaatgcgcagaagcatctgatcgcattgaatttacagattgacgaggagatttgtacaatgtatgaatattttgaaatttttctcggcaggatgatgatgtgtaggaaagcggcagaagtactgggagccaggtttaaattaaccgcaaacggaagcaaagtattatag

SEQ ID NO: 963 - DNA, 414 bp, Ruminococcus gnavus
atggcaatcgtaaaagaattattacgcacagaagaagacggaagactgagttttggagactatacactggcgtctaaaacgaagctggataatttcgaatttgagggcgacttatataaagtaaagacattttcagagatcacaaaattagaaaaaaacggaatgtttgtatacgaatctgttccgggaagtgcggtagagaactttaaactcacagatacagaggtcgtttttcagatttctgcaccggaggatgtacagtttacactggaacttgagccggagagtgaatacgaagtgcttctggatggtgtttcagccggaaagatgaccacaaatctgagcggaaagctgagtgtcagtgttgagatcagcgaaggggaagctgtggacgtcaaagtagaaaaatgctga

SEQ ID NO: 964 - DNA, 759 bp, Ruminococcus gnavus
atgaatagagcagaattaaaatcaatttggaaaaaggaagagaagacggcatatatcaaaggttgggatttttcgcatatccatgggaggtatgaggaagagaatgatttgccgtgggattatgagaagatcgtgagacagtatttaacggatacggccaaagtgttggattatgatacgggcgggggtgaatttttattgtctctgaatcatccgtttgccagaacagcagcgacagaaggattcgagccgaatgtgcgattgtgtcaggagaagttgctgcctttaggaattgattttaaagagtgtaatacaccttcaaggattccgtatgataatgagacatttgatatgattataaacaggcatggaaattttgatgccagggaattgtatcgattattaaaaaagggtggaatctttgttacacaacaggttggcggcgataacgatagagatttagtggaaatggttctgcctgaagtggaaagtccgtttcctcatttaaatctggaagagcagagaaatgcgtttgtcgatgcaggatttcatattcttgctgcagaggaagcgtatcgaccaattaaattttatgatattggtgcgtttgtatggtttgcacatattattgaatgggagtttcctggtttttcagttgataaatgctttgagcagttgctgaaaatgcaaaggataattgagaatcaagggaaaattgaagggacgattcatcggtatttgattgcagcgaggaaatga

SEQ ID NO: 965 - DNA, 1230 bp, Ruminococcus gnavus
ttgtctcatataaataccccaggtgtgttggcagaaatcgtgcaaaggactggtgtggatatgaagagagaacaaagccgggcatggatgctgatggcagcgcttgtgcttctggcggcgctgatcggaggaaaagaattttggagggcatttagatatgaaagcaggcaggtgttacaggagtatacagaaaaaatgtacatgcccggggtggcctatcagagagcggatgagaccagaagttcgaaagactggtttcgggaaaaagcactttcctggctgcctttagtaaaatatgtttctgacagggagaatctggagcaggaagtggaggatgaggagacgctggcgaaaatactggagaagcaggccaacgatgaaagcgttgtggatgcagatgggaatctggtgggagagagcaagactgcggaagtgccggcaaatctgggggagagcaaatcttccatcgatatgtcgattgaaagactgcgggactttgactatcttttgagcaatttttatacggtagacagttctacgatgatcggaccggagcagttgaatgcagatgatcttcttggaaggagcatgaagatcgaccggaagcagaaggggccgaaaattttaatttttcacacccattcccaggaagaatttgcagattccattcccggtgacccctctaccagtattgtaggaatcggggattatctgacagaacttttgaatcagaaagggattgaaacgatccatgataaaggtgtctatgacatcatcaacggacagctggacagaagcaacgcgtatgagtatgcagaggcaggtgtgcgcccgattctggaagcaaatccgaccattgaggtagccattgatctgcacagagatggtgtggcagaggggacacatcttgtgaccgaggtgaatggaaagccgacagcgaagatcatgtattttaacggactgagcagaacacgggcaaacggagatatcacctatctgccaaatccgtacattcaggataatcttgccttttctcttcagatggaactggcatctgagaggatgtttcccggatttgccagacacatttatctgcgtgcgtaccgctataatctgcatctgcttccaaaatctcttctgatcgaggcaggggcccagaccaatacggtgcaggagatgaaaaatgccatggaagtactggcggagacgttgtgtcaggtgattggataa

SEQ ID NO: 966 - DNA, 969 bp, Ruminococcus gnavus
atgaaaatacattacagagtatctggagaggggatagagatcgttcggtgtttcgggacagacagtcaggttgtcattccggagcagattgaggggaaaccggtaataaaggcagcgccctatgcgttttctgcaagaaaagacaaggaagagattgatgtacagacatatgatacggatcagatcggacaaaggtcggcagaggaaaaactgcttgcaggcgatgcggtggaggaagtcgtttttcccaataccatgcgggagatcgggcgttatattttttatggatgcagaaacttaaaaaagctggaattctcggacaatctgatgcagatcggaagcggagcgtttacagtgtgcggaaatttacagaaactgattgttcacttgcaatttggaagtaaaagctgtgtaaaagagattctgggagagctttggcagagaatggatgtgactttcgtttacgaaaacggagcatttggcggtcagaaagcggagttggtatttccggggcattatgaagaagcagtggagaatacgccagcccggattttgtatacccagcatcatggttcgggaaacaattaccggcagtgttttctggcaaaggagttggattacgagaaatatgatgaattgttttctatggcagtggtgatggaaaagctgcctgtactcattgatctgtgtttcgggaggcttttgtttcccatccggctttcgacaaggggagaaacagcttatcagggatatatcaggtctcatttggaagaaatcgttccatatctgatcaagaatgaacagacagaaaggatacgtctgatttccggagaaaaactgtggacaccagaggggctggacatggcaatcgagtgcgcttccgacaagcagaagtcggagattttaagtctgcttatgaatgaacggcagcagatgcagccggtcagaaagaaaaaatttgtgttgtaa

SEQ ID NO: 967 - DNA, 1665 bp, Ruminococcus gnavus
gtgcttgcgatgaagaattttgaaaaatatgaaagaagctattttatgccgccggtgccgtgctatgactgggtgaagaaagaccatattgaaaaaccgcccgtctggtgcagcgtggatctgcgggatgggaatcaggcattgatcgagcctatgagtctggaggaaaaaatagaattcttccagatgcttctggatgtcggcttcaagcagatcgaagtgggatttccggcagcgtctgagacagaatatcaatttctgcgtacattgatcgagcagaatatgatccctgaggatgtaacgatccaggttctgacacaggcgagagagcatattatcaaacggacctttgaagcggtcaaaggagcgccgcatgcggtcattcatctgtataattcaacttctgtcgcacagagagaacaagtgtttaaaaagaataaagaagaaatcaaaaaaattgcggtagacggagccattcttctgaatgagctggcaaaggagacagaagggaatttcacgtttgagtacagcccggaaagtttccagggaaccgaggtggattatgcgctggaagtgtgcaatgcagttctcagagtgtgggagccgtccagggagcgaaaagtgatcatcaatcttccgacaaccgtggaaaacgcgatgccgcatgtgttcgcaagtcaggtggaatatatgagcaagcacttatataacagagaacatgtattgttatcgcttcatccgcataacgacagaggatccggtgtcagtgacgcagagcttggaattctggcaggagcggaccggatcgagggaacgctgtttggaaacggcgaacggaccggaaatgtggatattatcacggttgctatgaatatgtattcacagggagtggatccgggcttggatttttccaacatgagtgagatcagtgagacctatgagagacttaccagaatgcaggtttctccgagacagccatatgccggagaactggtatttaccgcgttttccggttctcaccaggatgcgatcgcaaaaggaatggcatggagagaagagaagcagtgccagacatggtcggttccttaccttcctctggatccaaaagatgtgggacgccgctacgagaccgatgtgatccgtatcaacagtcagtccggaaaaggcggagtcaactatattttaaaacagagctttggaatcagccttccgcagaaaatgagagaagaggtcggctatcttgtaaaggatgtgtcggataaagcgcataaagaactgacgccagactgggtataccatatatttgaagatcattatattcacgtaaaaacaatctttacagtagatgaatgtcactttaaacaggaagacggaatccttgcggaggcgacgatccatcatgcgggaagcgaccgtgtgatcaacggaatgggaaatggacgtctggatgcggtgagcaatgctattaagcactattttgacatcgattatgagctggcattttatgaagaacattccatgacaaaagggtcttcatccaaagcggtcgcttatgtgggcgtgatctgcaataaaaagcgctactggggagtcggtattgatgccgatatcatcaaagcttctgtagaagccctggtcgtggcagtcaataagattgaagaactc

SEQ ID NO: 968 - DNA, 906 bp, Ruminococcus gnavus
atgattatgcagtacgtaacagacttaagcaaatatcagacagaaaacaggacagctgtcacactcggaaagtttgacggtcttcaccgaggacatcaggaactgatcagccggattcaaagatttgcggatcaggaaaaagcggaaagtgttgtttttgcatttgatatggggaaagaagcattgatgacaggcgaggaaaagaaagcatatctggaaggatgtgtggatacgctgatcatctgtccgtttactgaggcaatccgtgagatggaagcagaggaatttattgaaaagatcctgattgaacaactgcatgccgcatacattgcagtgggaacagattttcattttggtcatcagaagcgaggagatatctgtatgctgaaacagtatgcaaagcgctatggatatgagctggagattgtagaaaaggcagtgtatcgaaaaagggaaatcagcagtacctatatcagagaggcgctgaaagtcggcaatgtggaacttgcagaaaagcttttgggataccgataccgtacagagggcgttgtagagcatggacaaaagctcgggagaacgctgggatttcccactttgaatgtcgcatggaagcccgaaaaagcagccccccggtttggcgtatatgcatgcagagtaaaaatggatggaacctggtattgcggaatcggcaatctggggatcaaaccgacggtaacggatgcaaaacggattttgacagaggtgtatgtatttgattataagggagatgcatacggaaaatatgtggagattgaattctgtgcgtttgagagaccggagagcagatttgcatctctggaggagttaaaaacacaggtggatcgagatattttatttggtatggagtattttcgggcgcagcagtga

SEQ ID NO: 969 - DNA, 513 bp, Ruminococcus gnavus
atgtctgaaacttatacactgtataaactgatcgtattgtacatgctggataaagtggattttccattgacaacttcacagatttccgaatttattctggaaaaagaatacacaacttattttaagcttcaggaaacactcgctgaaatggaacattccggactgctccgcgtggaaacgacacacaaccgtactctgtatcatctgacagacaacggtctggacaccatccaatactttaaaaacaagatttcccctgccattcagcgggatattgatgaatttctcaaagaaaagaagtatgatctgaaagaagaggtttctgtcaagtccgactactatctgaacaccaaccatgaatatgaggtctgctgtcagattgtagaaaacggcttcagcctgatcgatctgaaactcacggttcctaccgaatcagaagctgaagccattgccggaaactgggcttcccagagccaggatatctataccctactgcttgcgaagcttttgtaa

SEQ ID NO: 970 - DNA, 498 bp, Ruminococcus gnavus
atgccgggatttttattgggaattttatatgtcaatctggaagcggagcagtttgcagcgggggcagggattttcagcgaatattttttgaaacaataccgggcggcagatattctgacgggagagtatatctggtatttgctgcaggtccgtcttttgccgtttttagtgctgctgggatctgcttttacaaaattcagaaaagcggcagttattctgttcttgatttggacgggcttttctgccggacttctgttttctatggcagttctcgggatgggagtaaaagggagcatcctgtgcattgcaggaatgctcccccagtttttatgttatattccagcgtatctgatcgtggtgtggtatgcgtactgctacccgcgtatgcagtggaatatacagaaaagtctggtttccggaggtctgcttttagttggtatcgtgttagaactgtatgtaaatccggttttggtcggagcatttttgaaaaccctttaa

SEQ ID NO: 971 - DNA, 1026 bp, Ruminococcus gnavus
atgaaagaaatcagagatatcaatatattagcgatcgagagctcctgtgatgagacagcggcagcagtgatccacaacggaagagaagtgcgctccaatgttatttcttcccagattgaactgcacaaattgtacgggggcgttgtgcctgagattgcatccagaaagcatattgaaaaaatcaaccaggtgatagaggaagctttaaacgaggcaaacgtgacattggacgatatcgatgccatcggggttacttacggtcctggacttgttggggctcttctggtcggtgtggcagaggcaaaagcaattgcctatgccaaaaatcttccgttggtaggggtgcatcatatcgaggggcacatttctgccaattacattgaaaatccggatctggagccgccatttttatgtcttgtggtatccggtggacatacccatctggtctgtgtgaaagaatatggaaaatatgaaatactgggacgtacccgtgatgatgcggcgggagaagcctacgataaagtggcgagagcaatcggacttggttatccgggcgggcctaaaatcgaccggatcgcaaaagaaggaaatccggatgccattcagttcccaaaggcccatatggattcagaatatgattttagcttcagcggtctgaaatcttcagtattgaattatatcaatggatgcaagatgaaaggagagtcctataatccggcagatattgcggcatccttccagaaagcggttgtggaagttttggtagaaaactccatgcatgcagtagaaaaatatggaatgaacaagtttgcgattgcaggcggtgtggcatccaacagcgcccttcgccaggcaatgcaggaggcttgcgaaaaacgtggtgtgaaattttatcacccgtcaccgattttttgtacagataatgcagctatgatcggagtggctgcatattatgaatatctggcaggaacaaggcacgggctggatctaaacgcagttccgaatctgaaactcggagaaagataa

SEQ ID NO: 972 - DNA, 1203 bp, Ruminococcus gnavus
atgaatctaaacaaagaaaatttaaaaaagatacggggactgatcgtgtttacagtgattcttctgatcgcattgtggaattattcattaattctggatgtgcttggacagggagtgggaattgtatatccgtttcttttaggcggtgcaattgcatttgtgatcaatgttccgatgagtttttttgaagaaaagctgtttcaaaatcaaatgatgaaaaataaaaaagtggcacagaggctggcgcgtccggtcagtctgattattacgctgatcgtagtagtcagtgtgatcgggctagtggtattcggagtgcttccgaagctgggggacacttttatatcaatcgggaaagggatacagtcatttatgccgaaagcgcagagctgggcagaagagattttccataacaataaggagatcaaggaatggctggacagtctgacgctggattgggacaaaataataaatgaagtcgtgaagttttttacgagtggagcgagcagcgttcttggctctacgtttgtagtggcaagaaggattgccagtggaattacaacctttgtgattgcgtttgtttttgcgtgctacattttgttgcagaaagaaaaattaaatattcagatccggaaagtgatgtatgcatacatgaaagaagatctggtgaaaaaggttctggatgtttgttctctgagttaccgtacattttcgaatttcctgacaggacagtgtctggaggccgtgattctgggaacgatgtttgtgatctgtatgggaatcctgcagatgccatatgcgatgctcattggtgttctgatcgcgtttactgcgctgattccgattttcggggcatttattggctgcgtagtgggagcatttctgatcctgacggtggcgccgatgaaggctttggtttttgtgatcatgttcctgattcttcaacagatcgagggaaatctgatctatccgagagtggtgggcagttctgtgggacttccgtctatctgggtgctggcagcggtcagtatcggagccagtctgatgggaatcgtgggaatgctggttttcattccaatcgtttccgtgctgtatgcacttctccgtggggatgtctatgagcatctggaaaaaaagggaattgctgttgaccgggaatccggtgagatatatcggccgaaggaaccggatgtggatgaaagctga

SEQ ID NO: 973 - DNA, 759 bp, Ruminococcus gnavus
atgcagactctcatgcttacagttgaatatgacggcacccggtatgcaggctggaaggccgctcccaaaaaagaaaatcttgatacggtcttggggagaatccatactgctcttgccaggctgctcaaagaggacatacagttattctgtgccgcaaaaacagaccctggtgttcatgcaagagggcagattctcagctttcagaccacttcttccctgttgccttctgctctaaagagcagtctgaatcaggtgctgcctcaggatatcgccgttttagatgccagacaggtttccgaacgttttcatgcagaattactccccaaacactgtatctgggagctttgtatcaaaaccggtccgactcctgatgttttccgtcagaagtatactttatttctccccgacttgccggatcccctgcgaatgcaggaagcattttcttttttgaaaggcaggcatgatgtccgttgcttttctcctgtcaaaaagaaaaaagcaatcatgagagaactctattctctccggattgagcattccgatgacgaaatgcagcttttcctggaaggcagtgattttctgccattcatgcccgcaacactcatgcagctgctgcttgatatcggaacgggcacactggatgcctgctgtattccttcgatctttgcaggagaacattcttattccgggcatgctcctgcccatgcactgtatcttcatgatattgtttatatttcagatagaaaggatgatttttaa

SEQ ID NO: 974 - DNA, 828 bp, Ruminococcus gnavus
atggaaggagctggagcagttgatcggatagaaatttctggagaggaaggattaaaaatggagaaaaaaggaattcttgtggtaagcttcggaaccagtcatctggatacgatggcaaaaacaatacaggtaatggaagagcagatcaaagaatcatttcccgggtatacagtataccgggcatttacaagtcagatgatcttgaacaaactggaacggacagaacataaaaagtatgataatgtccgtcaggcactggagcgtatgaagcaggacgggatcacaagggtgatcgttcagccgacacatatcatcaacggcattgaaaatgaaaaaatgctggaggagattcaaaaacatgcgtcgtcttttgaaaaagtcctggtgggaaaaccacttttgtctgaaccggatgattataaaaagacagtgcatgcagtgatggaggatgtggatctggaagaaggcgaatgcctgatcttaatgggacatggaacagatcaccatgcaaacagtgcctatccggcgttggaatatacacttcaggcattgggatatgaccgcattcatgtggcgactgtagaaggatttccagaattaaaagacgtgatgcatcggatcgaacaaagacagtatcgtaaagtggcactgctgccgtttatgtttgtggcaggagatcatgcaaaaaatgatatggcaggagatgaggattcctggaaatgtgagctggaagaagccggatatgaagttcgtccgatcttaaggggacttggagaacttccgggaatccgtcagattttcatggagcatttagaggaggcacaatga

SEQ ID NO: 975 - DNA, 756 bp, Ruminococcus gnavus
atgcagatatactatatgaagaaagaaaagataccgattccagtatcgacggtagtattgatgattgtgacgattacatataagctggtcctggttgtgatcggaatcgggattctcatatttggtcagggatttctgcacagatatctggaaggcattctgccggtctattatctgggattgggattgaatgtgttttgtgtggtatttatgacagttcttgtatttcatccggtgctgacaaaggaaatcctgaaaaaaggcgtccatttgctggaaaagctgcgcctgatgaaacacaaagaagaacggctggaaaagctggatgcatctatggatacttaccggggaacggcagtatatttaaaagagcatatgggcgtgatcgtggttgtattcggaattacatttgttcagagaatggccttgtttgcagctacctggtttgtgtatcgggcgtttggactgtcaggaacttcattctttgatattctgtttcttcaggcagtgatagcagttgcggtagatatgctgccgcttcccggtggtatggggatcagtgaaacattatttttgaatatttttcgcccggtgttcggatctttgctgcttccgggtatggttttaagccggggactgggatattatgcagaattactgatcagtgctgcatttacagtggtggcgcagcttacgataggaaatgaaaaagtaagagaacaaaagaagtgtataaaggagcgtgttgagggatga

SEQ ID NO: 976 - DNA, 888 bp, Ruminococcus gnavus
atgataagtacatttgcactttttttatgccttgagaacaaaagagtgaaagatacaaaagagaggagaagaattttgcttacgattacagattatgtgaaagcaaagactttggaagaagcttacgaattgaaccaggcgagaaacagccgtgtaatgggcggaatgatgtggatgcgtcttggaaatgcgagagtaaagacagtaatcgatctgtcagagcttggtcttgatcagattgaagagacagaccatgtatttaaaatcggggcgatgtgtactttgagacagctggagttgcatcagggattacgtgaaatgtatggcaacggaattgcagagtgtgtccgccacattgttggagtgcagtttcgaaatcaggcgacagtcggcggaagtatctatggaagatttggattttcagatgtactgacggcattattggctttggatacatttgtggagttgtataatggaggaattatccgactttcggaatttgtaaatcgtaaaaaagataaggatcttcttctctctattataataagaaaaagcaagcgttccttccgttatgattcagtacggcaaaccaaaacagattttccggtgatcgcatgttctgttgtcactggaatggtcaacggagtagagtcctggtacttttcagtgggagcaagaccgatgaaagcagcactgttggaaaagcagtgggagattccggcagatatttcagaagaagaaatccgggaatatgcaaaaatagtagcttcagaatttgagtatggaaccaatatgagaggaagtgcaaagtatcgtcagcatctggcagaggtactgatcttcagagaaatgcgttcaatcatcacggagggaagagcatggaagtaa

SEQ ID NO: 977 - DNA, 630 bp, Ruminococcus gnavus
atgaaaaaagaagaaaagacaaaacagacttgtgaaaaaattgtacatgcagctacgatcgagtttggaagcagatcttacgatgcggtttcgctgaatgcgatatgcggtaagtatcagattgcaaaagggctgatctaccataattttaaaaataaagatgagctatatctgtactgtgtgaagaaaagcttcgaaaagttgatgagttatctggaggaagggaaagaagaggcaaagacagcaagggaagaaatccgtatttttttggagagacgggaagtgttttttgctgaaaatccgtatgacagaaatatattttttaatgtgatgttatatccggcagagcatttaaaagaagcactttttggtgtgatggaaagatatgatgcctatataagagagcaataccggcatttgctgtccaagattcgtttaagagagggaatcagtatggaaatggcagtagaatatctgagtctgtttcagaatatgtacaatggatattaccagaataaagcaagccgtacaggagatttttcccgatttatagaagaacataatctgaagatatcagagttattggatattattttatatggaatcagtacagaagagaagggcagttaa

SEQ ID NO: 978 - DNA, 471 bp, Ruminococcus gnavus
atgatagaggaactgtataagaaatattatgaggaattgatcaattggtgccatagtatgacaggaaacctgtataccgcggaggaactggtgcatgaagctttcttgcgcgcaatgcttcatgaggataccttatccacactgaaagaacagcaaagtcgctcatggttatatcgaactgttaaaaatttatatgtagatcggctcagacatggcaagaaggaaatcatctcggatgagttttcgcagctacaaatagattctgaagaactggttcgattagaatgggagaagctgctggaaactttaccggatctggaaggagtaattttttcgttacgttacctggaagggtataattccaaacaaattggagatatccttttgctttcaccaggaacggtccgatccaaactttcttctgcacgtcaacatttaaaaagaattttaggagggaacaaatatgtttga

SEQ ID NO: 979 - DNA, 1170 bp, Ruminococcus gnavus
atgacagaacaggcatttgtgtggaaagatcagaaaaaactgagaatgggatataccaccggaagctgtgctgcggctgcggcaaaagcagcagccagaatgctgtttttgggagaagagatctgtcaggtttctctgatgacaccaaaagggatccgactgtatctggatgtggaggacattttgcgtacgaaagacaaggtacgctgtgcgatccgaaaggatgcaggggacgatccggatgtgacggatcagattctggtctatgcagaggtttccaaaacagagggaaagcagatcacactggatggcggcgttggtgtcggacgtattaccagaaaaggactggagcaggatatcggcgatgccgcgatcaataaagttccaagagccatgatccgtgaagcagtggaaaaagagaaagagcgcggcgggtacacaggcggtctttctgtgatcatttcaattcctgacggagcagaactggcaaaaaaaacattcaacccgaggcttggtatcgaaggaggtctttctgtgcttggaaccacaggcattgtagagccaatgagtgagaaagctctgacagatacgattttcctggaaatgaagatgctcagagaaaatggaaacgagtactgttatctggtaccgggaaattatggaagtgattttctgaaagaagcacttggttatgatggaaatcttgcggtcaagtgcagcaattacatcggagaatccattgatcatgcggtgcggctcgggatgaaaggaattctgctgatcggacatgtgggcaaactgatcaaggtggcggcaggagtgatgaatacgcactccagacaggcggactgcaggatggaagtatttgcctcacatgcggcgatggcgggggctgattctgaaaccgtaaaaaaaattatggaaagtattacaacagcagaaatgacagaactgcttgaaaaagaacagctgttgggacaggttatggattctgtaatgaaacggatcgcattttatctgaagcacagaggaggggagtctcttcgtgtggaagcaatcgtgttttcgaatgaaaacgggatattaggagagacttccggtgcagaagaacttttggaaatcatacgtacagaatcagtgaaaaagaaacgaacaggagaaaaagaatga

SEQ ID NO: 980 - DNA, 783 bp, Ruminococcus gnavus
atgcagtgtaaagacattatggcaatgattgagggtacatatcccaagagtgctgctctgggatttgacaatgtagggctgcaggcgggaagaagtgaaaaagaagtccgccggatttatctggcgctggatgcaacagatgcggtcattgaggaggcgattgcgcaggaagcggacatgctcattacccatcatccgctgattttttcgccgcttaagcatattacggatgaagattttatcggccgcaggctgttaaagctgatccgcagtgatatttcctattatgcaatgcataccaattatgatgtgcttggcatggcagagctttccggacagattctgggactgacagataccgaagtgctggatgtgaccatgaatacacagacaaaagaagaggggatcggaagagtgggatcccttccaaaagagatgacactggaagaatgctgtgtttatgtgaagcataaattaaaactgggatcggtcaaggtgtttggagatatgaagcagccggtaaaaagacttgcggtttctccgggatccgggaaaagtgccattgctccggctgtctcgaaaggagcggatgttcttgtaaccggagatatcggacaccatgaaggtctggatgcggcggcacagggcgtttcggtgattgatgcgggacattatgggacagagtatatttttatggaagatatgaaacggtttctggaagagagacttcctgcagctaaaatcatcaccgcaccggtcgtgcatccgtttcaggtattgtaa

SEQ ID NO: 981 - DNA, 681 bp, Ruminococcus gnavus
atgaattcaactgaaaagagtttacccgagaagttatctgacgatatcattgcctatattttagaagagcagctccagcccaacgacaaacttcccaatgaatccgttctctctgaaaaaatgggagccggacgaagctccatccgggaagccatgaaactgctcgcatccagaaatattgtaacaatccgtcagggttccggaacatatgttgccgcctcccccggagtcgttgacgatccgcttggatttacctttattgatgacaagaaaaagctgacactggatcttctggatgttcgttttctgctggagcctgccattgccgaaatggcagccctgcatgccgaagagaccgatatccgcaagatctctacgctgtgtgatgaagtcgaagcactcctccttcgtggggaagatcacactggaaaggacattgagtttcacactgccattgccatgagcagtaaaaatctggtcgttccgcggctgattcccgtaatcaacagctcgatcccgctttttatccaactgacaaacaatcggcttttacatgaaacgattgaaacacaccgggagatcaccgatgcgatcgcagcacacgatacgctgcgcgccaaagatgccatgtatctgcaccttgtatataaccggcgatgtcttcttgatcagaaagcataa

SEQ ID NO: 982 - DNA, 651 bp, Ruminococcus gnavus
ttgctgaacctgcgaaaagtaggggataacagtcatgttccggccgtgtggtttgcggcagagccggaagataagcggagcaatatccgtttcgtgttttatcaggagggaattgatatggcagcaaaaaaaggagcatctaagacaacagcgaaaacaacagtacagacaccggtaaagacagcagaagaagtgacatcagcacagacagcaaagaaagttgttgcaaatgaaaaggcgacagagaaaaaagaagaagtaaaacctgcaaaagtagaggcgattgagacaaaagcaggaaaggcaaaggcaatcgagaccaagaaagacacaacaaaagcaattgaaacaagagcagctgtgttacaggaatctgagccggcagcagaagaaaaaaagacaagagcaagaaaaacttctgcaaagacaacgacagcagcaaaaacagcagtaaaatgtgaaatgtatctgcagtttgccggaaaagaatattcagaaaaagagctgatgaaaaaagtaaaagaagtctggacaaaagagctgaagcataaagtaggcgagctgaaagatgtaaaactttatctgaagccagaagaatccgcagcatattacgtaatcaataaagatacaacaggacggattgaattataa

SEQ ID NO: 983 - DNA, 1107 bp, Ruminococcus gnavus
atgcagacaaaaacaagcactaccatcggatttatcgggctgggactgatcggcggttctatcgccaaggcaatccgccagtattatccggactatcagatcctggcttttgataaaagcagagaaacacttgcactggccatgcaggacggaacgatcgacatctcctgtactgccattgacgaacagttctctcactgttcctatctttttctctgtgcgccgatttcttacaataatgcgtatttatctcagttaaaggatttgatccatccggattgcatcctgacagatgtcggcagtgtaaagactgcgatccatgaggagatcacccggcttggtctggatgcaaatttcatcggaggacatcctatggcaggctccgaaaaaagcggattttccaattccaaggctcatctgattgaaaatgcatactacatcctgacgccgtctgacaaagtctcttctgagaagctggaagattaccgctgctttgtacagtctctgaaggcgctaccgatcgtgcttgactaccggctgcatgatacggtcaccggaaccatcagtcatctgccgcacatcattgcctcctgcctggtcaacttcgtaaaaagtacggatacgaaagaggaactgatgaagcttctggctgcgggcggttttaaagatattacaaggattgcatcttcttctccgatcatgtggcagcagatctgcctgaaaaataaagataatatctcccggatcctggacgcttatatcgaagaactgaaccgcgcaaaaatttccattgatgccggcaatgaacgggaattattttcattcttcgagtcatccagagactaccggaattccatgccggatcactctgcaggaccgatcaaaaagatttttgccctgtactgtgacattatcgatgaagctggaggaatcgcgaccattgccacgattctggcgagcaatcacatcagcattaaaaatattggaatcattcataaccgggaatttgaagaaggggtactgcgcatcgaattttacgaagaggacgcctctgtaaaagccgccgcacttctgcagaaataccggtatattgtatatgaagtttaa

SEQ ID NO: 984 - DNA, 570 bp, Ruminococcus gnavus
aatcaatggaggccgcagatgggagtcattgttgttgtattaccaaagcttgagaatgcgaaaaaagtgaagaaaatactgcttgaacacggatttcagacggtgtttgcgtgttcttctgcttctgcggctcttcagatggttggtgaatattcgtatggtcttgtcatcagcgggtaccggatgccggatatgtattatctggatctggtagattgcctgccgcggaattttgaatccattctgttaggatccgaggagacggtggcacaagtcggtgcagggattttatccctgaccatgccgatcaaagcctatgatctggtcaataccgcagatatggtgcttcgtcagctggagcggcggatcaaaaagaaaacccggacacccaaaaaacggagtgagaaggaacagagttatatccgtaatgcaaaatttctgttgatggagagaaactatctgacagaggaggaagctcacaaatatctgcagaaatgcagtatggataatggaacgaatatggtggagacagcacagatgatcctgacactgctgtttgatgagacataa

SEQ ID NO: 985 - DNA, 846 bp, Ruminococcus gnavus
atgaaattaaaaaacacagtccgggaatttgcagtgatcacatttgccatgctgattgtatcggcagccgtttatttttttatggttcccagtaaaatcgtcatgggaagtatttccggtctggcgctggtattttcccagctcaccgggatttccatgtcgatccttacgttctttctaaatgccgttttgcttgtgatcggatttttgctgattgggaaggattttggggcgaagacaatttacacttcgatcctgcttccaatctttctctggatctttgaacgattgattccggtcacagaatccgttacaggcaatcaggtgtttgatcttgttacgtatactctgatcgtagcgcttggacaggccatgttgtttcatgtcaatgcctcttccggcggactggatattgcagcaaaaattctcaataaatttgcacacatggaacttggaaaagctgtcatgctgtccggatttgtaacagcaatgacatctatcctggtgtatgacgtaccgacactcattgtcagtctgcttggaacgtatgcaaacggtatggctgtggattattttattgatggatttaataagcgaaaacgggtgtgcatcatttctgatgattataaggaaatacagaattatatcatccatgatctgaaacgcggtgccaccctctatgtcgcccagggcgcctatgatgaaaaacaccgtacagaacttgtgacgattcttgcacagcaggagtaccggctgcttctcaactatctgcacaccacaaaaaaggacgtgtttgtaaccgtttcaactgtcaatgaagtgatcgggcagtggaatgcaaagtaa

SEQ ID NO: 986 - DNA, 243 bp, Ruminococcus gnavus
ctaaaacagcagagaggtttgagagaaagatgccgtattggaaagcctcctgcagctattttcattcaaggaggtatttatatgaaccagacaacacagatgcagcccgtaaacagactgtacaaatcgaggatttttgccatgctctacagtgacaggaaagatctgctcgatctgtacaatgcagtcagcggaaaacattatgaagatccggaattgctggaaatctttcagcgtttttga

SEQ ID NO: 987 - DNA, 1059 bp, Ruminococcus gnavus
atgaaaaaggttactatgaacagtaacgaaaaaaggacgcagaaaggagccccaatggctacattacaggatattgctgatcgtctgaatatctcaaaaggcactgtttccaaagccttaaacggtgcacctgatatcagcgaaactttacaaaaaaccgtactggaaacagctgttgaaatgggatatacaaaaatccgccgccagaaggctgcggagaaaaaactctgtattctgattgaaaacgtagattacaaagagtcacatcaatttggatatgaaatcctgctcggcttccgccagcttgcagaacctgccggttataccgtagatattgtagatactactgaaaaactgcagaaaagcaccccgtacgatgtttttatgctgcagaaccagtatctgggagcttttgtcgttggattttcgttgaatgatccgtggatgaaagattttcagaccagcagaacaccgaccgttctgtatgacaactatattattgcaaatccaaatatggcatatgtcggaatcgacaacaacgaaggcatggaactcgccgtctcccatttaaaaaaactgggacataaaaaaatcggatatttgagcagcgcccttggttctcatatcatgcagatccgccacaaagcatttttccacgctttgaaacaaaacggcctaaagtccgatccgacctatgcgggaagttcctactatatcactcaatgtatggaaaagcatctgccccgtctgttggatctgggaatcacctctattgtctgcaaccatgatctgatcgccaatgccgcgatgattcagtgtcagcagctcggatacaaagttccggacgagatcagcatcatcgggtttgatgatctcccgatctgcgcatatacttccccgccgctgactaccatccgccaggaacggatccagcttggcaaaagtgcttactatgctctggacagtctgatgaatcaagtatccatcggaacacttctgttacatgcaaaattaattgagaggggatcgaccggagaggtccctcagacaaataataat

SEQ ID NO: 988 - DNA, 915 bp, Ruminococcus gnavus
atgaagaaaaaaagaaatcctttactgatcctgctgcttgtgcttgcagtactgctcgtggtctatgcaggcgtggttgtgatcggaaagaatcaggaaaaaagcaagcagaaggaagaagaggcaaaaaaaatctatgtcacagatttaggaaagctttctgagattcagtttgacgtgggaaatggagaaatccagcttgtaaaagaagacggtacatggtacgacaaggatgacaaagattttccgttggctcagagttatcctgaacagatggagaaaacattaggaaagcttgaggcagaaagaaaactggaaaatggggattctctggaagcatatggattgaaagaaccagagtatacggtggtactcaccgatcaggacggcaatgagacaacattatatttcggaaatgtaacaggagactcttattatctgacattgaatgagaaaaaagagatctatacggtgagcaccggtgtcattgaagattttcagtacagtatggaagacatggcacagcttgatacattccctacgattggaagcggtaatctgaaaaaggttgtcatcagtcagggcacagagaaaacagagtacagttcagagaatgacgatgatgccaagagtatggcaacaatcgcgggagggcttggagtccttacattgaaggatgcagctgactattccgtggaagagaacgacttgagtaagtacggactggatgagcagagccggacaacggaaaccgtgacatatacaaataataagaaagaaaagaccgtgacattgtattttggaaaagaggacggaaacggaaaccggtatgtgatgctttccgattcaaagatcgtgtatcttgtggaaaatgagaagtgtaagaatatgctgaatcaggatacagaatcttaa

SEQ ID NO: 989 - DNA, 579 bp, Ruminococcus gnavus
atgtttatcattgtaggacttggaaatccgacaccagaatatgagggaacgagacacaatgtcggatttgaagtaatagatgcactggcacgaaaatataatattgatgtagatacgaaaaaacacagagcttatatcggaaaaggaatgattgaggggcagaaggtaatcctggcaaaacctcagacttatatgaatctgagcggggaaagcgtcagaagtcttctggactattataaagtggatgaagagcaggagcttcttgtcatttatgacgatatcagcctgggagtggggcagataaggattcgggcgaaaggaagtgccggagggcataacgggatcaaaaatatcattgcccatttgggtggacaggtatttccccgtattaaagtaggtgtgggagaaaaaccgccgaaatgggatctggctgattatgtgctgggacatttttcaaaagaagaacaggaacagatggaagagggatatgaacatgcagtttgtgcagtgaaggagattgtgacaggcaatatcgaggctgcaatgaacgagtataatcggaaaaagaaggaaaaataa

SEQ ID NO: 990 - DNA, 1695 bp, Ruminococcus gnavus
gtgtggcaaggaggaaatggtatgaaatttgcagagatgccttatcagagagtagatacagaggctgttgtagcagctttaaaagaactgacacaggagctgaaggcagcaaaaagtggagaggaacagtttgagatccatcagaagttttatgcgctgcgtgatgagtataatacgacgattcagatcgctatgatccgcagtgatgtagatactgcagatgagttctacagcgaagaaaagaattattacaatgaggttcttccgacgatcaacaatcaggagacagagtacagaaaagcattgtactattctccgtacagagaagtattggaagagaagataggaaaagtggcattcaagagtatggagcttgaatttaaagctatggatgagaagctgatcccgctgatgcaggaagaaaatgcgttgacaacacagtatgacaagttgattgcaagtgcaaagatcgactgggaaggggaagctttaaacctgtctttacttcgtccgtatatgacgcatgaagatcgcgagatcagaagaaaggcacatgaaaaatacagtgcgttttttcagagcaaggcagaagaactggatgagatctatgacaagttggtgaagaatcgtacagcgcaggcaagacttcttggatatgagaactatgtggaacttggatattaccggatgaaccgtaattcttatggaagagaagatgtggagaacttccgcagacaaatcaaagagtactttgtaccgcttgcagaaaagatgcatgacaaaagaagagaaagactgggacttgagaagctttcttatattgatgagaacatgtatttcgtggacggaaatccaaaaccacagggaactccggaagagatcatggcgaatggacagaagatgtatgaggagctttcaccggagacaaaagagttctttgattttatgatggagaatgaactctttgatgtgctcggcagaaagacaaaaaaggccggcggttatatgacatatcttccgaaatatcgcgcaccgtttatttttgccaatttcaatggaacaagcggagatgtggatgttgtgacacatgagtgcggtcatgcgttccagggatatgtttatggaagtgatccgatcgaagagcactgggatatcacgatggagacagcagagattcattctatgtctatggaattctttacagaaccatggatgaatttgttttttaaagaagaagctgacacatacagacagatgcatctggaagatgcgatcgcatttattccgtacggatgcatggtggacgaattccaacacattgtctacagtaacccggatctgacgccggatgagagacatgcggcatggaaaaaactggaagaagaatacaaaccacaccttgattacgagggagatccatttatggaaaaaggtggtttctggcagaaacagcttcacatttatgactatccgttttattatatagattatgtactggcacagacctgtgcaatgcagtacaagatctggatggatgaagattacaaagcagcatggcagagctatctgaagctgtgcagactgtctgcaagtgatttctatacagagatgttaaaagaagtaggtcttcagattccgtttgaagacggctgtgtgcgcacagtgacagaaaaactgggagcaatgatggaataa

SEQ ID NO: 991 - DNA, 828 bp, Ruminococcus gnavus
atgaaaaagataaaaatgataggactggatttggacgggactctgctcaattcaaaaaaagaggtaactgatcatacaaagagtgtactggaggaggccatcgcgcaggggatcattgtgctggtagcgaccgggcggccgcttaccggtattccaggacaggtaagagcgatacagggaatgcagtatgcgctgacgaccaatggggcgagaatctacgatttgatccatgaaaaaacgattctttcgcatccggttccttatgaaaaaggaaagaaagcgttggaaatcacagaaaagtatgatacattacaagaggcgtactttgaccgggaggtatatgcgcaggaaaatcagctacaggaaatttggcgttatcacaagaatccgcatatgtgggagtatgtaaggtctaccaggactgtagttccgtctattgtaaaatggtatggcgaagcaaagcgcgatgcagacaaactgcagcttatgtttgcggatatgcaggatatagagcgtgccagaaaagagctggaagagattccggggctggtattgacgggatcgcttggaaataatattgagattaatgctcagggaatcgataagggaattggaatgattgagcttgggcacagacttggaattgacagagatgagattatggcatgcggagacggggacaatgatcttgaaatgttaaaggccgtgggatttggagttgccatgggcaatgcagaggaaagtgtaaaagcggtagcagattatgtgacggatacgaatgaggaagaaggcgtggcaaaagcagtcgaaaagtttgctttgagatag

SEQ ID NO: 992 - DNA, 1215 bp, Ruminococcus gnavus
gtgttaaatttgacaggaagtgaaaaatatgggagcgaaaatatgaaacaggaacagatgaaaatctgggaaagatttttaaaagggctgctggtaatgacagggatcctttttatagcaactggaattggatatttattccggtatcttggattttcagaagaaaatatcattattgtatacattttaggggttctgatcattgcaatcattacggtcaacagaggatggagcgtatgctattcgctgctcagtgtgttgttgtttaattttttgtttacagatccaagatttacgtttttttcgtatgattacgggtatccagtgacatttgtgactgtgtttattgcagccgtgatcgtcagtaatttgaccatacaaatccgtaagcaggggtatcgggctgagcagatggctttacgtacccgcatcctgttggagacgaatcagatgctccagaaggcgaagaatgcggatgagatgattgaagagactgcaaggcatctgatgcgcatgatgggaaaaaatgtgatatattatcgggcagaggatggaatactttctgagcccaggttttgtatggcagaacctggtgcagccaagatgttatacttgcagcagcgggaacggcaggctgcgcagtgggcgttcgagaatcgaaaacgcgcaggaacaggaatggatcagtatccggatgcacattgcctgtatctggcaatccgaaacgaagacatggtctatggcgtgatcggaattgctctggaagggatgatgatggatgtctatgaacagaacctgattttatccattttaggggaatgtgcactggcattggaaaaagagggctataacagaaaacgggaagaagcgcttgcacaggcaaagaatgagcagttaagagcaaatctcctgcgttcgatttctcatgatcttcggacgcctctgacgagtatttcgggaaatgcagggattcttctgaacagtgcgtcagcgcttggtgaagagaagcaaaaacagctttataaaggaatttatgatgattccatgtggctgatcaatctggtggaaaatcttctgtctgtgacgcggctggaagacgggactatgaatctgaatctgcagatcgaattggtggatgaggtgattgagggggcgctgaaacacatcagccgggatcattcggactatgaattgaaatttattcattcggaagag

SEQ ID NO: 993 - DNA, 825 bp, Ruminococcus gnavus
atgaataaattatttcgtgcgggactctatcggcttcgcaaaaataagggcgcatatgcctgtgttatcattcctcccatctatagtgtctgcctgatgctttcgcaatatatgcagatgaaagaaagtggggcaaattatctactggatccgtttctatttcattttttgctggtgatgggagttttgctttcggtatttgtcagtttatatgttggaacagaatatcacgatggaacattgagaaataaactgatcatcggttcttcaagaaatgcagtatatggatcgaatctgtggatcagctttctggttgggacgtgcagcgtgttgttggcttatacggcagggtttgcggcaggtattcccatgttcggcgtgatagagatgccggctttgacaatgctgcagaattgtgtggcaggaattttgctggtgctttcttatgtttcgatctttcatatgatctccatgctaagctccagtaagacaacctctgcggtagtctgcattctggcggcggtttttatgatggtgtttgcggggattgttttttcgaaattgtctcagccggagatgatcacacaggcggtaatcgtaaatagagaaaccgttatggaaacagtaaaaaatcctgcttatctgacgggaataagccgtacggtttatcaaaatatcctggattttctgccggcagggcaggccgtacagatttttaatcagggagttctgaatctcggaagaatgatgggatattcgattttgatcattttcggaacgagcctggcaggattgtatctatttaatcggaaggatatcaaatag

SEQ ID NO: 994 - DNA, 1269 bp, Ruminococcus gnavus
atggaacaaaagttacatactcccgaaggagttcgagatatttacagtaatgaatgcagagcaaagctggcagtacaggataaacttcatcaggtgctgcatctttacggatatcaggatattcagactccgacttttgaatattttgatgtgttccgcaaagagatcgggacgatttcatccagagagctgtataagttttttgaccgggagggggatacactggcacttcggccggatatcactccttcgatcgcaagagcggcagcaactctgtttgagaccgaagactttccgatccgtctttgttatgtgggaagtacctttatcaatcacagcagttatcagggacgcttaaaagagagtacacagcttggtgctgagctgatcggaatcgattctgtggaagcagatgccgagatgatcgccatggtcgtagatggtctgaaaaaagtaggactcaaagaatttcaggtgaatatcgggcatgtggatttcctgcagagcctcatggaagctacaggactttcaaaagagcagcaggaagaaatctataatctgatcgcaaaccggaatttctttggagtcgaggaactcttagagcaggcggatgcctccccagaattaaaagagacgttccgtctgcttccggagttcgcaggagatgtggatgtgctgaaaaaggcggttgagcatgcgcctaccgatcaggcaaaacaatcggtgggacggcttttgaagatttataaactgcttgcattgtatggagctgatgattatgtgacctttgatctgagtatgagcggtcattatggatactataccgggattgtatttcgggcctatacttacggaaccggtgatgccattgtgacaggcggacgttatgaccatcttctggaaaagttcggaaagcagacgccgtcgatcggatttgccattatcattgatgagctgcaaaacgctctgtccagacagaagatcactgtggagaccggtcacaacaatctcatcgtgtataccgatgccaccgaaaaatgggccattgcactggcaaaagatttccgtgaaaaaggaaaatacatggagcttttgaaacggactgaggaagattcaaaagagacttttatcgcttacggaaaacggacacatgcggtcagcatgctgtatttgaacgagaatctgacgattgacatggtaaacctctctaccggagaagaaaagaaggtaaatgccagaaaaaaagcgaaagcgagggagaacagatga

SEQ ID NO: 995 - DNA, 741 bp, Ruminococcus gnavus
atgttagaacagaaagtggcggtcgtaacaggagcttcccgtggaataggaagagcaattgcagaaaaactggcagaagagggcgtttttgttgtcatcaattaccgtggcaatgaagaacaggcaaaacaggtgcagcaaacaattaaagaacaagggggaaatgcaggaatctatggatgtgatgtttctgatttttctgcctgtgaagcattttttaaagatgtgatagaaacttatggaagactggatattctggttaacaatgcagggatcacgcgagacggactgctcatgaaaatgacggaatccgattatgatgcggtacttcagacgaatttaaagggaacctttaacggaatccggtttgcatccaggcagatgcttcgtcagaagtcagggcggatcatcaatatttcttcggtatccggtattctgggaaatgcagggcaggcaaactacagtgcgtccaaagcaggtgtgattgggctgaccaaatctgcggcaagagaactcgcatccagaggaattacagtcaatgcagtggctccaggatttatcaaaacagaaatgacagaagttctttctgaacaggtgcagaatcatgcaaaaagtcagattccgctggggagttttggaaatccggaagatgtggcagaagcggtctggtttcttgcatcagacaaagcaggatatatcaccggacaggtattgaatgtggatggcggtatggcaatgtag

SEQ ID NO: 996 - DNA, 969 bp, Ruminococcus gnavus
atggaaaaagcaattcagtcgatcctgcccggaggagaagatgtggagattattgtagttaatgatggatcctcagacgggacaagcgaggttgcaaaaaaatacgaggaaaaatatccggggatcgtcaaagcggtagacaaggaaaacggcggtcacggggatgcggtcaatacaggtctggcgcatgccacaggtgtctattttaaagtagtggacagtgatgactgggtagatgaagaggctctgctgaagatattgagtgcagtgaagggatttgtggatgcagattctaaagtagacatgttgatttctaattatgtgtatgagaaagttgggatgacgcataaaaaagtcattcattaccgcaatgtacttccgcagaatcaggtgttccgctgggatgatatcggaagcttccatctggatcagtatattctcatgcattccgtgatctaccggactgagatgttgagactctgtcagctgaagctgccgaagcacacgttttatgtggataatatctatgtatattacccgcttcctcatgttcggacactatactatatggatgtggacttctatcgctattttatcggacgagaggatcagtctgtgaatgagaaagtgatgatcagccgcatcgatcagcagatttatgtaacaaaatctatgatctcgatgtatgaattacgtatggtagagagtaaaaagctcaggaaatatatgatcaattatcttgctattatgatgacagtatcttcgattttatgtattcgttcgaaggtcaatgaaaatctgatcaaaaagaaagaattgtggaaatatctgaagaagaaagattataaaacctatatgaagatccgatatggaattttgggacagactatgaaccttcctggaaaatcaggaagaaaagtgtcttctatggcatacagtgtggcgagaagactgattggattcaactaa

SEQ ID NO: 997 - DNA, 1071 bp, Ruminococcus gnavus
atgaagacattttttaaaaatctgacctttactttcctttgccttggtatctccacgatactggcatttttcttttttaacctaggacaaaaaaattctgtcaacactgccctgatttatattctggctctgatcctgatcgctcagaatacgaccagttactggtatggtgctgtcgcctccgttttttgtgtcatcgcagcaaactatttttttacatatccctatttcaaactaaacttcatactggacggatatccggtcacatttatcggcatgctggctatttctcttatcaccagcgcgaccgccagtatgctcaaaaaacaaaaagccattgcctccgaacgggaacgaaagcttgcagaagcagagcgcgagaaaattcatgccaatcttctgcgcgccgtatcacatgatctgcgtacccctctgacgagcataatcggctcttctgcctcttatctggacgatgcccagaatatgtccgagcaagaacgtatggagctgatttcgaatattaacgaggatgcacagtggctgctgaatatggtggaaaaccttctctctgtaacgaagattcaaaatgaatccagcaaagtcaaaaagtcgcaggaaattgtggaggaagtcgtctccgaatcaattgtccgacttcagaaacgccttcctaaaatccagatccgggtttctatgccggaagattttctgatgatcccaatggatgctactttgatcgaacaggtgctgatcaacttgatggaaaatgcctatgtccattcctcgagctctgatcccatcgaccttttgatcaccgatcagccggactgtgtcacatttgcagtccgggactatggaatcggactggatcccgaccagatcccttttatttttgacggacagtacagctctgataccgctgacggacacaaaggaatcggcatcggactgtctatctgccggacgatcattcatgctcacgacggcgtgatccacgctgccaatctggataaaggagccgaattctcctttacccttccaaaagaaaaggagaacgcaaactatgcctaa

SEQ ID NO: 998 - DNA, 873 bp, Ruminococcus gnavus
atgaaattggaaaacgcatgcctttgtgtggaaatcgcagaaaaaggcgcagaactgacaagagtttttaacaaaaagacaggagcagagatcttgtggaacggaaatcctgaattttggaaccggcattctccgatcctgttcccaaatgtagggaagacacacggaaatactgttctgatcaaaggaacacagtatccgacgtctcagcatggatttgcaagagacagccagtttcgttgtgtaaaatctgcagcagaggaagcgcagtttttattttgttcgaatgaagagacgagagaagtgtatccctatgactttgagctgtatatcacataccgtctggatggaaaaaatatttttgtagactggaaagtaaaaaatccatcagaagaaacgatttactttacgatcggagcacatccggcatttatgtttgaaggcgcaaaggagacgaaagacgactatcttctgtggttttcgaagatggaaacgctggaatgctgcgggctgaatctggaatgcggaacaggcctgccggaagaaagctattctctggaactggaggacggatatctgcagctttccgaaaaattgtttggggtggatacactgatctgtgatgattatcagttaaaagaagtatggctgtgcaaaaaggatggaagaaagccatatgtaggcgtaaagagtgaaggattttacagttacggaatctggtcaccgaagaatgcgccgttcgtatgtctggagccatgggcaggccgttgtgatgataccggatttgataaagatatttctgaaaagaagggaatcaatgcggtgcagccgggagagatatttgaaaaaggataccagattctggtgggatag

SEQ ID NO: 999 - DNA, 801 bp, Ruminococcus gnavus
atgttaaattatataaaaagtgaatgctacagagtgatgcacagccgctcgacttatgtgatgacaggaattatggcagtattgccggtgttgtttcatattattttgtatgtgacaggtgtgtccagtagtacaacgcaggattttccctatgatattacttctttttcattcagttttctggcaggaagtccgatgctttttacttatgcaggtctgattgttgcagcagttttgtatgaggatgaacataaaaacggaaatataaaaaatgcagtggcgtttgggatttccagagaaaagctgtttttagggaaatgtatgactgcagttttgacggcaacggttataatggcgttggtattgattgcctatataggaagtgcatggttcttgttagagcatacgggaccgacaagcctgaaaattattttaaccgagattccggcagtgtatggaacagcagttgcatctatgatcctggggatcgcacttctggcatatatcaaaaatgaggtgatggcagcaatgctgtgggcagtaatcatatatgtgataccgaaagtgttactgatggctggaatggttttactgggacaatggggcatagaatttttgtgggattttgcacagcttctgcctgcgaatctgtttcagtttggagccaaggtcaatatgtctcattgtgaagtgctgtggaagacttcccagggaatgacaaaatgtgtgattgtgggaatcgtgggaacagtgcttgcgatagtggcaggaattgtaatgctgcggaaaaaagaggtataa

SEQ ID NO: 1000 - DNA, 1041 bp, Ruminococcus gnavus
atgaagaaagatattcgcgcatatacatatgaacaattggccgcagagatggaacagatcggggaaaagaaatttcgtgcaaagcagatttatgaatggctgcatgtaaagcttgctgacagttttgaagagatgacgaatctctccaaagcgctccgggaaaaactggaggcggaatatgagatccttccggtaaaaatgctggagcgtcagatttcgaagattgacgcaacgaataagtttttatttcagctttctgacggaaatgtggtggaaagtgtgctgatgcgctacaagcacggaaattccgtctgcatttcttctcaggtgggctgccggatgggatgcagattctgtgcttctaccatcggtgggctggagagaaatctgtcgccgtctgagatgctggggcagatttatcaaatccagaagatcacaggagaaagagtctccaatgttgttgtgatgggaaccggagaacccatggataattatgagaatttcctgacatttgtccgtatgcttacagatgaacacggactgcatatcagccagagaaatctcacggtttccacctgtgggatcgtgccgaagatccgcgagcttgccatggagcatctgcagatcacactggcactttctctgcacggctctactcaggaaaagagaaagcaactcatgccggtggcaaataaatatgacttgcaggaagtgctcaaagcatgtgatttttattttcaggagacaggaagaagggtgacttttgaatacagccttgttcacggagtgaatgacacacaggaagatgcagaggaactgatcggaatcttaaaatcccgcaactgccatttgaatctgattccggtcaatccgatcaaagagcgtgattttcagcagccttcccgcaaaaatgcgttgaatttcaaaaataaacttgaaaaaagcggaataaatgttactataagaagagaaatgggcgcagatattgacggcgcctgtggtcagctcagaagacgctatgtaaaaacagagaatgagtaa

SEQ ID NO: 1001 - DNA, 6120 bp, Unknown
  Unknown gut bacteria
atgagaaaaagaagtaaaggggggataagggaattgattagaaagatatttgatagagactggcaggttaagaacaggtactgtcttacggcgctaattgttcttgcgacagtatttatgattacagcgtcttgcagcagtgcttttggaagtacaaatgccggtaatactgagactgtaaaaataacggagacaaagacgatttccgtatatgaaataataacttatgacatatggaagcatataaacggtgtgtggcagtttggaaaggcaccggggtctgatgtaaccagctcgtttacagtgctgatcggcagcaagctgccagagggtgcgaaagtgacagaggtgcagggtgcgtacaacagcgcctatgcgggtgcttacagcgcaaatattgtgccggcggccgcggtgacgataaaatcatttacggatacaaagcttacctattcgtttgcggcaaaactaaacggcgttccggttgatataaagaaaagtacgcaggcggaagaggtagaagggtacagatattatattccggtcgtttttgatataacatatacggttattacagaaaaagaagtgccgaaagaagagcctggcggtgataatgacgatgacaaaacaccgatagatcaaaatgcggaaataacaggtgaagcgcgtcttgcagtaccggaaaaatcttatgaaggacacagtgttacggcagaggacagatctgtttttaccgtagataaaaagacgtacggagcggcaaggatgtacggcgaaaaacttgcgtcaaacagttttaagtcgagcggcgcgggcagcagtacccaaaggcgcggagaaacttctgcggaagtgacgtttgcacaggcgggacaagcaaatgtgctgttgaccgttacaactaaaagcggactcaggctcactgataaaaaagagatagaagtactgagaacaccaaacatatcatcagcccttggaggaactcagaagcaaaacagaaaacagacaataattgctgaaatagcgacaaatccacagcatccgcttaaggagctttggatagaaatagaaaagaaaggcggcggcgaacgcgtacgcctcacatatgatacaaacggcgggaaaaatttacttaaaaattcatcactcatcaaaaccagggccattgctgataatggaagcaataagctttttacaagagtaaagcttgaatttctgacgaaaaacagcgaagaaacggcaatgacatatagaatatatgcaaaagacgacagagactgtacgaatacagttgaaaaaacttttacagtcgtacctgacaaagcaccgaaagttgttataggtgcggaaaaagagcaggtaagagaagaacagagcagtattgcgcatgtatatgctgaagatataacggcgtatgacggtgatgatgctgaacgcgtatggtatgtgagagagcagggaaaaacagaatggcagaaggccggaaacggtaagaacgcgataaaggaaaatgtagaagggaatgctgcaatttctgactgcggtatacgcgacgcgtcattcggtacttggaaagcgatgatatatgaaaaaacaggcgtaggaaaactcgatatacgtcttgaagttacggagaaatggacagaggaaacactgccggaatacataagtgaaagcgatagacattcgggcagcgcagaaactcaggttgatatcatcaatatagcccctgtagtaagcctgacatcatcacgcatgaaaacggcaaatttattgtttcttacagctgaaaataaaaagatggacgacggcggtctgaacaagacagatatgctcgctttacgcaatgctctctttgaaaaaggtataagcgctaaaattcaggctgaagatttaaagagtgcctcagaacttaacggcagtgatgcggcagacagtgtatttaagcttgtgcgtggatacggatatggtgctgaagagacctttctcgaaaagggctggtatatttgcggcaaaaatacgctttatacggtagacggcgtatggacaagagatacggggatgacaaaaacatacaattataatgtaggcgcgccttataaaataaatgcatatgatttacagaatagcagcgatgacagcagtactggcaatctgaaatggacagctactgtgacagaggaaaatctcgggcacgctaatatttccgatatcgagggtatggcgctcgacgacagatgcaaataccttttatttcggagttcagaaaggacaattatatatgatggagaaacaggcgcatacacggcgactttgccgcttgcgtttggggatgataattatgcagaaaacgggcgcatatatacagtcagagaggacggtatttattccgcagatttgtataccggcagcattaaaaaactctattcaggaaatatttgtgtaaaagcggcatactgcgataatgcaggagcttcgaggagaataaacaatgaagttcactttttttcggggaaaggaataaaactgatgcgagggattttaagccttgatagtgaaacgttgagatttgaagagattcagccatctcaggcaaaatatagcagcagctacaccgttataggcatcggcgcggacggcaaagcgtgcattggacaggacggcaagagtgctgtgtatatttttgaaaactctggcaatgaagaaatctgtctttccggctgggaaaccggagacgggcatgatattcttccggcgtataaaaatgatggcacattcgattatgtcgtgacaatgtataatactgatatacgtaccggcacagcaaaaagtggatataagaagtattacggcatttatatggacatatacagcacaaatacacaggaaagcggcaggcctgacacaatagccgcggacgcagataaagggataaaagcggataaagctgcttcttacagttatgtgcgaaaagtaagcgacagtgcaaaacctggaagcggcacagatgcggcaaaagctatgtatgcagtgcaaattggaaatgaagtaatagtaaataacggtgattgggcaacgagtatgtctgacggttcacctctcagcaattactattacacatcgttttcgcaggttgtctttgatattgcagcaggcacgtcgcagcgatatctaaacggcgcagtaaagtatgaagagcttggcataggaggctctgtatgcgaatacggaaaggtgacagacgattatataataagtgcatattcacttgatacagcgggagaagaatacaattcagacggcaacgtgcaggcgctcagggttgcgagacttccaaaaacggaggatgatgaattttcattatatgtaaataaattcgcgcctaagaaatctgcgtctaccctcgatatagcggcggtaattgcagatgctgccgtagatacggaaacgagcggcaatatatttgagggcttgaaagcggcattgtcagcagctgacaacactcttttgacaatagaaaaagggacagaaatcactgccgcggcagaaacgatcagcagtatagccggccgcagcaaatacgttaaagtgagtgcgaatgaagcaggtaaagacggtaaagatattgagaatacggaatgcggcggtttggcagagctaaaaaagacatataagcttgcacctgatacggaatattattatgagtttgaatatgcaggaaatgcggcagcaccgattgatgtgcgggcagaaacaaatacgcagctgccggaaaatgtcaagcttatgcaagacacatacataacagccgccatacaaagcgaagactttaacaaagccgaaggactgaacgactatttttcggggttggaatcgtcaagagtgcacgaaggcaaatattacggtgcagaaatgatgtttgccaaagacagcggcagcaacaaagcgattaccgatacctctgaactgacttttgaaattgaaaagggagaaatcgcgattttagaatttgattacagtatgacaggagagacaaactctccggatgaagtttatatagatgtgaacggcgaacgctggtacagaaacgttaatatttccgaagacagcggcacttatactcatccttacctactgccggagggtaaaaatacagtggcctttggcgcaagattttacggtaaaagaccgggaagtaccaatataaccattgacaatttaaaagtcatttatctggaaaaagaagaatcaatgataaattcagataaaaacgggattaagagcggaacggatacagcaaaagatagttttattgaggcagcggcagcaaatgcagatgctgaggacagcgatgctgttcctgaatttcgcaaaataagtggaagtataagaacaccgcagcaaatagtggcgtatgccggactgccgatgacatatataaggcagcaggtagatgagcctgcatgtgattttataaaaaatacgaaagagcaaaataaaaatgatcttgaagttacattgccggccggcaaaaaagctgtacataccgcaataacactgaaatcatcgcctgcagataaatatccggtaaaatgggatttcgatggtaaaaaatacagcgtaaactataagacgacattgaattatcatgctttgcaagtaccgagagaatttagagtaaatacaaacaaaagagaaggaacgatagcaatatcgccgggatctctttacaggcgcggagcaggatacggtgaaattgaaatgctgcttgtagataagatttatgaaccaatagcggaggggcgttactttgcagagccaccgagagatagcagcggaaattttatatcaggagatggaactttatatattcaagatgaaacttttaacggtgaggtaactgtgaggataatcggtacggatgtatggtatttaaaaaatttcagactttaccatatagaaaatgggcaccggatatacgaagaggatggaaactttaatgtatccgacaacgatggctggcaggtaataggaggcgaggtatcagaagaaaatgcagatagtgcacaaaattcggaaaatccgcagcaagcaatagtgtacaaaaaaggagaaacgataaggtacaatgtgatgtattatgattatgaaacggacccgagcaaggctcagtattggcgctatatgcatgtcccggcaaatgatggaatacatccacaggcaggaaagacgctttcagctccgatagaacagttttatgttgacggtaaatatacggttatgcactggcaggaggacagcaccggtaatgttaattacgataagcagtcaaacatagcggagatgacattttatatcgagggcggagcgagcgcgccgtggattacgagcatagagactgttccagcaaagataaaggaaggagatacggttattctcaagatcggtgttgatgatatagaaaaagatgtgttatctcttaaaactgaattgtattacaacaataaggttatatatgaacatcaaaaatcaaatataacggcaaataagaacggaaagtacccgtacacgcttacagaaccgattatgcttgcagaagagggagtatatacggcagtatgtacagttagtgatgaaggcggcacaggagtacgtgagtatacatttaaagccgaaatggatgatggcattaagggaaaggcggagcattttcctgcctgggagaacgcgcgtattgagtataataaaaataatccggacagtccgcgcgcagcaaatgtgttctgggcggcggaagcgtttaagcttagcgctgaagtgtatggcagaccgtcgcgtgtgacagttaaaataaaagagtatccgcagcagaaattgcagcttgcgccgcaaagcgttgcgcagggagcagacaggtatgcaatttacagtggctcgcttttcgacagcgcgatctcagctgatctcgctaaaaaatgtgcagcttcgccaggaggtgtgtgcgcgctgagctttgtatttacggcagagtaccccggcagaaacagttgtacagataccgttacagtaattatcgacgataacggcggcagcggaccgcgaattcaccgcgtattttaa

SEQ ID NO: 1002 - DNA, 2202 bp, Unknown
  Unknown gut bacteria
atgtcgactaaaatagctcttgccggaaatccgaacagcggcaagacgacactttttaacgctctcacaggatcaaaccagtatgtaggtaactggccgggcgtaacagtggagaaaaaagaaggaaaactcaaaggaaataaagatgtaacgataacagacttaccgggtatttactcgctttcaccatatacacttgaagaagtggtagcgagaaagtatctcataaacgaaaacccggatgcaatactcaatatagtagacggtacaaatcttgaaagaaatctctatcttacaacacagcttgcagaactcggaattccggtagtcattgctgtaaatatgatggatgtagtcgaaaaaaggggcgacaagatagatacaggaaaactttcagcagaactcggatgcccggtatatgaaatttccgcattaaagggaagcggtattaaagaagcggcggcagcggcagtttcagctgcgaaaggaaatacagcaccgaaaaagatctttgcagcagaaattgaagaggcgatagagaagatatcagaactgcttccttcacagattgctgctaatcagaagagattttatgcggttaagatctttgaaagagacgaaaagattatggatatgctcgacacgggcacagccaaaaatcttgcagctaaggccgaaaatatcatagcagaggttgaagctgcgctggatgatgacgccgagagcattatcacaaatgaaagatatgtatacataggaaaagtaataggaggcgcatataagaaaaagaacaaggatgcgctcactacatcggataagatcgacaaaattgttacaaacagatgggcggcacttccgatttttgcagtagtaatgacaattgtgtactatgtatcggtaacgacacttggaggcgtgctcacagattgggcaaacgatggactgttcggtgaagaatggcatctcttcgggatagaaagtatagtaattccgggaattccggtatttttcgaaaatgcactgaatgctataggatgcgcagattggctcagtagcctcgtgctcgatggtattgtaggtggtgtaggagctgtactcggatttgttccgcagattctgcttctctttatattccttgcgatactcgaaggctgcggatatatggcgcgtgtagcattcataatggatagaattttccgtaagtttggactttcaggcaaatcgtttattccgatgctcgtaggtacaggctgcggcgttccgggaataatggcttcccgtacgattgaaagcgacagagacagaaaaatgactataatgacgacaactttcattccttgcggagcaaagctgccgattatagcacttatagcgggtgcgcttttcggaggcgcatggtgggttggaccaagcgcatattttcttggagtagcatccattatagtgtcaggtcttatccttaaaaagacacggatgtttgctggagatccggctccgtttgtaatggaacttccggcatatcatattccgacagttggcaatgtcttaagaagtatgtgggaaagaggctggtcgtttattaaaaaggccggaacaatcattctcctttcatcaataattatttggttcctctcgaattttggatttacagacagtggattcggtatggtagaggatatgaacgacggacttcttgcagctatcggcggcgctatcgcctttatcttcgtaccgcttggattcggtaagtggcagtatgtatcggcttcgcttatgggacttgtagccaaggaaaatcttgtatcaacgctgggtatactctttggatatgctgaggttgctgaagatggcgcagaaatctggggtgagctttcagcgagcctgactcctgcgggcgcatatgcactgcttgcatttaaccttctctgcgcaccgtgctttgccgcaatcggagcaataagaagagaaatgaacaatcctaagtggacttggtttgcgataggttatcagacaatatttgcttatctcgtagcgcttatgatatatcagttcggaacactcgtaagcggcggtggttttggcataggtactgctgtagctatcatagttgcaatagcatttatatatatgatagttcgtcctaacaagtatgaaaacaacactcttaatgacaagagaaatgttctgtcggtaaacgcgtaa

SEQ ID NO: 1003 - DNA, 3525 bp, Unknown
  Unknown gut bacteria
atgcacggattcaagtcttttgccgagccggttactatagattttcacgaagggattacctgtatagtcggaccgaacggttccggaaagagcaacatttctgatgctatacgctgggtacttggagagcaaagcccgaaagcgctgcgcggcggcaagatggacgaggtaatatttgcaggtacggcaagcagaaaatctcgcggaatggcggaagttactctcgtaattgacaattccgaaggaatactgccgatagactacaacgaagttgcaattacgaggcgaatgtatcgctcaggcgagagtgagtatctcattaacaacaaccagtgcaggcttaaggacatacgagagctgataatggatacaggaataggagttgatggttattcaataatcggacagggcaaaattgccgatatcgtgtcgaataaaccggagtcgagaagagaaatctttgaagaggctgcgggtattgttatgtacaggacaaaaaaagcggaagttgagagaaaattggccgcgtcgaatgcaaacctcgagcgtgtaaacgacatcgtatcggaaatagaaggccgtatcggtaagcttaagactgacagtgaaaaggctgcggagtatctcagcctgcgagatagatacaaggagcttgaaataaatattacgcttaaaaatatagaaaatttggagctcaaagtggagtttctaaaggacgatataattgaagctgccgcggaaatagaagcactgcgcgaagaaaaggcggaaatcgataagaaaacagcggcagacaaaatgcgctcggaaaatctcgaggagcttgcgagcgaaacatcggccaagctgcttttggcggtagaagaaataaatgcgctggcgcgcagaagtgaagtaaaccgcgagagaatttctgcattagatgaaaacacgaggagactgacggcagagatagcagcggcagcagcaaagctggcagatgaaaaggaaaatgcagaaggcttaaagcgagataacggcaaaatagatgaagagcttgcgcagttagacaatgcgctgaaagatgctcttgaacgctatgaaaagcttacaggtgtgctcggagcggaggcggagagcatagacagcaggaaaaacagcatatacgagctacatagtcttgctcagagcaagcgtgccgaggcgcagagcttgagaagccttaaggaaaatttaaatatgaggcgcgcgcagctcgaagcagaatacgaagaagagcaagctgaacgcgcaaatgcggagaaagcaaagcgcgagtctgaggctgaaagagctggacttataaaagatacggaggatgcgcgcagtgcagcgcggactcttaccgaaaaatacaacagcagtttgatgaaagaaagacagactgcaaaggagattgaagagcttcgcataactattggccagctttcgggaagaaagaagactatagaggaaatggaagccaactatgagggctacaaccacgccgtacgttacataatgaaggcagatatgcgcggaatagagggcgtagttgcggagcttatgaatgttcctgctggttacgagacggcaattgaaacagcgctcggagcatcgctgcaaaatatcgtctgcgctgacgacaaaagcgcgcaggatgcggtaaacattcttaaagcaaacagagccggacgccttacgtttctgccgcttgcatctgtaagaggcactttgaataaggacagccgcgtaacatcggcggcgggctttaaaggctatggcagcgagtgcatagaatttgacagcaagtataggaatatatttgaatatctgctcggcagaacagtcgttgtcgataatatgaataatgcggtaaagctttccaaaacggcgggcagcggacttcgcttcgttacactggaaggagaaataataaactctggtggtgctattacgggcggacgctataagaataacacggcaaatctgctcgagaggaaagcagaaatagcgaaacttgaaagtgagattgctgtcaagactaaaagtaagcaagaatcggacgagaaacttgatgaattaagacgttttatagagaggacagcggatgaaatcgctgaggcaaacgaagaagtaaaaaggcttgaagttgctcttataatgtgtgaaaacaggcttgaaacagcattgagcgtacttgccgatatggacgagagtaaagaaaagagaaagagtgaatttgatagaatagaagaagaaggcgcgaaatcaagcgcaatgatagcagctctgcttgcggaagctgaaaaagccgagcgcgatatcgaagaagcgacggatgagactaacagcgcgctggccgaatacgaagaaaagagaagcgcactcgatgaaataaacgaagagatagtgaaagcgcgaatggctgtgaacttatgcagagagcagaagaacagtattgactcgatggcagtgcttgtaaatgagcgaatattagatcttacacgcgagttggaggaaaagacgcgcgaaagagaaaatcttcttaatcagcggagcgaaattacatcgggtcacgatgatacggatgcgcttgtatcggcaaagatacgcgaaagagaaaatcttgaaagctacgctgcggaaatcgcagaggaaaaggcggccgtagctgcggcaatcaatgaaagctcagaagcaaaggatgagatagaacaaaagcttacagtactccaggacagtaagtacaatacggaaataaagatagcgaaaaatgaaacgcagcttgataattttaaggacaagctgtgggaagaattcgaggtttcatatgtacaggctatggaattcaagaaaaaagactttgtgatgaatgcggccgtgcaggaatcgcgaaagataaaaagcagaatcaaggaactcggagaagtaaatgtcggcgcgataagagaatacgaacaggtaagcgaaagatatgaatttcttactaagcaaaggactgatatactcgaagcgacaaactcacttgctgaaatcataaaggatatggacaagaccataaaggcgcgttttaaagagagctttgaaggagttatgacaaattttgaggagatattcagagaactcttcggcggcggtcatgcgcagcttgcactcgaggacgagaacaatccgcttgaatcgggtatagaaattatcgcgcagccaccgggtaagaaactgcagaatatcaatcttatgtccggaggggaaaagacgatgacggctatagcgcttatgtttgcggtgcttaagaccaagccgacgccgttctgcatcttggatgaagtagaagcagcgcttgacgacgccaatatagaccgatttgctaattatttaaagaactttgaaggcatacagtttgcacttgtaactcaccagagagcgacaatggaacacgcggatgtgctctacggggtaactatgccggagcagggtatttccaaactcatatcgctgcgcctcggcgataagttcgatttataa

SEQ ID NO: 1004 - DNA, 3657 bp, Unknown
  Unknown gut bacteria
atgccgtttgcgtatgcggcggggcaggaaactgtccaagtaacaatcaaggatgacgtgatagcgccgggtgcggagagcattaccgtaaatcttacggcaaaaccgtctttaggtgtgttcaaagtctttgctttggatggaagtgaggattttgatagctctcatttttttgatggaacatataccgagctgtatatcgcttatcttttcagcgatacgacgcttagcgtcggtgacagtaatcttttgctgaacgcggctccgcaggcgggacaaaaactggtagcagtgctgcgcgacagcagcggcgaaaatcctgttgattatatctcgaatgcagtgctggtatcggataatggcgggaatacggatgaagggaataagaaaccggaaactattcttgcaaactgttcggtaactatgatgcaagacggagaagagcgaacagagcttttcaaagaaaatgactcagctgtcgatgtagccgtgaggcttgatgattcgattgagaacggatgttatctcacaatctttgcgtatgccggaaatactgcgtttgacgcagatgctgtgcagaatataaggctctggtctggccttgtaactgacggatatacgggaacatgcaatttcagcagctcacagcttcctcttaaagtaggatataaagtaatagcctgtcttaatgttccatgcggagaggataattacggcgatgtatattatcgctcggttgtgtcatctccgatagatgttgctgatgaagacggcaatgtttttcaggattatacatacccggacgcatctataagcgaaactgaaattgaggcgggaacaactaaactgcatataaatcttacgggagatgaaagactctttaaagcggcacaggaaaatcaaattgcgatatcggtaatcgtaagagaatatagagacggtgatgaaatcgacttggatgaaggcgaggatcagaaaactctctatggcaattacagtgttacagcgccgatggacaatgtggaagttacgctgtcagagccgctgcgcgccgggtacagagtgcgcgcaattacgtactggtcacaaaatactgaaattttccttcctaaaggaaacgattacgaaaagatgttttcgaggccggatgactcagttttagtttcggaaggcgaagaaaccactgatcccgatgtgccgaaaacgctgagcgcagttataaacggcggaaaggtttatgacaacgcaagtacaataaatattgcggtaagcggcagccttccggaaggcaatgtggttcttctcgtaaaggcgtacgaagcctccgaaacggaatatccgacaaacggcggcacatgggtaggaagcgtattcgatataaaggaaagcaacacgattacacctcaggagggttcgcttgttgcgggcacgaagcttgtagctataatattgaattcgggaaatcctgtcgcagtatcggcgccggttatggtagaagaagcaaagtctgcggccgatgacagtcttgtaattaacgaggatgaatttgtcgccggagtttcaaattcggcagcaatagtcgttgcgggctgcgatgagtttgcaggcggacatctcatactgacaacaggagacgcggctacgaattttgatgctgacagcaggacaagacttgcaagcgtaagctttacaggtgcgggaacatattctctcgattttaattcatcgcttattaaagctggagatacagtacaggcgcatctttacaaatataattttgatgacgacagtacgatctataaatacagtcaggctgttggaattatcacagaaagcggccttactacggaaacacagcttgaaattgtgacgcagcaaattcgggaagatgcgtcactgctttatgcgattgcaaatttcgatgcatcatttaccggcgtactcaagctgtatagctattctggcgatgagttcgacgtgaattctgcggaaattataaagcggatgcaaataacgccgagcgagacgagcagtcgtattgattttaccgcagatcttacggcaggaaataaaattattgcagtactgactttgacagataaagatggaaacagtacagatacactttccaatgttaaggttattcaggcaatgccggaaaaacagcagccggatgcaaaaattattgatgagacaatcacggcgggtgatacgcagctcaaagcgtcgctgacaatagacccaagtacggacaatgcaaactttgtactttacaaatttacgggagatacgcttgatacggaaacagcagctgttctttcatcgggaatactttacagaagcgatgcaaaccgcatcatatatctcggaacaggcagaatcgcagcaggagataagctgcaaattgttctcacggcagatggagtaagcgcattttcaaacactgttgcagtagagccgtcaccggattggggaacgccgtatgctgcgtttgaagtaagcgctgttcgcaccgacgataaatcggtagatgtaaatataacttatgcggaagaatatatgagccttggaagcgcgttttactgtgatgtgtcgctttatacattctcagcttcatatacagacgaagagtttgaagaaagggaactttgggagagcacatcattttcccagcgcgtagggcagataaattcaaattatggcgacgaaacgagaggaacggttacggtacctctctttgaaagcgcagtactttcacctgatgacagaatgattataaagctgcggctgccgcatactgagtgggaaggtgaagaagtggactatatttcggcttcggtgccgatcatagaagaaggaacggaaattccaactgcgaaagttatactttataacctcggtgaagattcgtcgcgcggagctgttttgcgttcaattctcaatgatatggcagttgtatgcgagacgatgacggacgagcatctcaatgaaactgtcggctatcttgcaggacttgcaggctatgaggctgcgggagagacttatacaggcgcaggcagtacatcagagtttatgctcatatgcaatatgccggaagcgcagcttgacagattccttgatatgatgacggaaaagggaatccgtatagatcataaggctgtcatgacagattacaacaaagattggcagttcagtcagcttatatcagatatagccgatgaacatgaggtatttcaggcgctccttgaactcgataagcttatagatgatgctgaaaaattgagtgaggaggaatacggcacagagcagaactgggaagaatttaaaacagctctcgcaagtgcaaacgaagctcttgcaacgtatgagccgccgattgaactcctcagagaaaatattgacgcgctcaaagaacagtatcttattttgacgggaatgcaggaaattgaaggcatcgccgtaataacgatagaaaaagacagcgaaggaacttacacgatgaccgcttcagtaaaagacggaaaagacgaggcgcaatatacatatctttggaaaaacggagaaagcggcgatactatacgcggaattgaagccgagaaattgatgggaatgtcgctgactgtgactgaggaaggagcttacggctcgcttacagcg

SEQ ID NO: 1005 - DNA, 3030 bp, Unknown
  Unknown gut bacteria
atgagcgcaaaaaagaaagaaatcagaaacttcaaaagagtactcgtggccaatagaggcgaaattgcaataagagtattcagagcgtgccgtgaactcggcatcaggtctgtggcaatttactcggaagaggataaaaacactctcttcaggggcaaagcggacgaatcttatatgatcggcaaaggcaagtcgcctgttgacgcgtatcttggtatcaatgaaattatcgagcttgcgaagtcaaaaggtgtagacgccattcacccgggctacggcttcctttcggaaaacagcgagtttgcaaagctctgcgaggaaaacggcatcgtatttattggaccaaatcacgaaatgatggacagactgggcgataaaattcagtcgaagcttgttgctatggaagtaggagttcctactattccgggtgttgagcaggctataaaggatgaagaggaagcactcaagtttgctgtgtcctgcggatatcctgttatcttaaaagcggcggccggcggcggcggacgcggtatgagaatcgtaaggacaaaggaagaaatgcctgagcagttccgtgcagctaggagcgaagctaagaaagcgtttggtatagacgatgtatttatcgaaaaatatcttgaaaatcctaagcacattgaggtacagatcttcggcgacaactatggaaatatcgtgcatctcggagagagagactgctcaattcagagaaggcatcagaaggtagttgaatttactccggcgctctgcctgacagacgcgcagcgtgaagctatctgcgctgacgctattaagattgccaaggctgtaaattacagaaacgcaggtactgttgaattccttctcgatactgacggcaagcattatttcatcgaaatgaacccaagaattcaggtagagcatacggtaacagagctcgttacaggcatagatatagtacaggctcagattcttgcggctcagggctatgcgctggattcagatgaaataaacattgcacaggaagatgtacattcgagaggctatgctattcagtgccgtatcacaacggaggatccgaacaacagctttgcgcctgatacgggagagatagacgtatatcagactccgggcggctatggcataagactcgacggcggcaatggatttgccggcgcgcacattactccttactacgattcgctgctcgttaaggtgactgcctacggcagaacatttgaggagactacgaataaggctataagagcgcttcgcgaaatgaaagtaaaaggagttaagaccaacattcctttccttatgaatgtgctcaatcacgagcttttccgaaagggacagtgcaatacgggatttatagagcagcatccggaactctttaacataagcgcgcttcctgacagagagctgcgcgtgctcaacttccttggaaataaagctgtaaatgaaaataagggtgtcaagcctgattttgacgtgccggtattcccgagaattccggaagcggaaattgccaagctcaagggcacaaagcagatatttgataaagaaggtcctgaaaagttttcacagtggatactcgatcagaagggacttctcattacagatacgacgatgagagacgctcagcagtcgcttatggctacgagagtaagaacagtcgatatggaaaagatcgcagctggtactgcttattacggcaataagctcttctcggcggaaatgtggggtggagctacgtttgacacagcgtatagattcttaaaagaatcaccgtgggaaaggctcgacacgctcagaaagaagatgcctaatattctcttccagatgcttataagaggtgcgaatgctgtcggatataagaactatcctgataatgtcataagagagttcgttaaggaatcggccaagagcggcatcgacgtattcagaatattcgactcgctcaactggatagagggtatggaagtagcgctcgacgaggtgctcaatcagggcaaactggctgaagcctgcatctgttacactggcgatattctcgatgagtcaagagaaaagtataatcttaaatattatgtagatatggctaaggaactcgagagaagaggtacacacatcctcggtatcaaggatatgtcaggactcttaaagccgatggcggcaaagaaactcgttgagactctcaagcaggaaatcggcattcctatccaccttcatacacacgatactacaggaaacggcgtggctaccgtgcttatggcagctcaggcgggcgttgatatagcggatactgcgttcaactcgatgtccggactcacttcacagccggcgctcaactcggtagttgctgcacttgaacatacagaaagagatactggtattgctcttgacggcattcagaagatttccgattactgggaagcagtgagacctgtatataaaggatttgaatcagatcttctggcgtcatctgcggaaatctacaagtacgaaattccgggaggacagtattcaaacctcaagcctcaggtagaaagcttcggactcggacacagatttgaagatgtaaaggaaatgtaccgtcaggtcaacctgatgcttggagatatcgtaaaggtaacgccgtcgtcgaaggcggtcggagatatggcaatctttatggtacagaatgatcttacgcctgagaacatctatgagaagggtaaggacattgacttccctgattcgatagtatcattcttcgagggtatgatgggccagccgcagggcggattcccgaaagacctgcaaaagcttgtgcttaaggataaaaagcctatcacctgcagaccgggagaactccttcctgcggaggacttcaaggctataagtgctatgctcaaggaaaaatacgatcttgacggcaatatgcgcgaagctctgtcatattctctctatccaaaagtatatgaggattatctcaaggtgctcaagaatgacggcagcttcagatatatgggttcggacatatatttccac

SEQ ID NO: 1006 - DNA, 1998 bp, Unknown
  Unknown gut bacteria
atgacacctaacaggattaagaaaagactcataataggctttacgttagtgtgcgttttgatgtcagcgctgttcgtaaaggtaggctatatacaagtagtgcacggtgcggaatattccaagcttgcagttgagcagcagacgaaggatatgcctatatcggcaaagcgcggcagcatacttgacagaaatggagaagagcttgcgtcaagcgctgtatgttattcggtgtgggcgagacctgcacaggtgaaaagcggaaatacagacgagcaaaaagagataagcgtgaacaaatgcgtagatacgcttgcagaaatactcggtatggataaagaagaagtgagaacgctcgttacaaaggaacagtcgcttgtaaaggtggcaaaatacctcgacaaggagacggcagataaggtaagagacgctgatatttacggcatagaaatagccgaagacgtgaagagacattatcctctcggcgattttgcctcgcagcttttaggcagcgttacggacgacaataacggacttgcgggtatagagctgagatataatcagtatctttcaggaatttccggaagatggataaagaacactgacagaaacggcaatagactttcatatggagtagaaaaatattatcaggctgaagacgggcttaatgtagttttgacgatagatgaaataatacagcattatgcggaaaaatccattgatacagtgcagcaggctacagatgctgataaggtaatgtgccttataatggatccaaaaacgggagatatactggcaatggcaataacgccaggctacgatccaaacgacccgcgtgtaccgctcgacgaaaatgaggccgcttatttggacactttgacagacgaagaaaagctcgagtactggaatcagatgtggagaaatcctatagtcagcgatgtatacgaaccgggttcgacatcgaagctgctgacgacagcgatggcgctcgaagaaggcgttacatcattagacgatagatttacctgtacacattcatataatgtaagcggtacgatacttaactgctggaagagtacgccgcatggcaatcaaaatctggtggaagcggtgggaaattcctgcaacccggtatttatacagcttgcgcagagaataggaatacagaaattctacgattacctcgaactttttggaatgacggagagaacgggcatagattatcccggagaagcgtatcctattattcagaatataaatacggcaggacctgtaggacttgcaactatgtcgtacggacagggaatcgcggtaaatatggtgcagcagctgacagctatatgctcgcttggaaatggcggcaaactcatgcagccgcggctcgtaaaagcgctcaccgattctgacggcaatatagtgcaggaattcgatacggttgaagtgcggcaggtggtttccgaaaagacagcttcggaaatgtgtctcataatggaatccgtagtatctgaaggcggaggcggcacggcgaagataccgggctatcgtataggtggtaagaccggtactgccaacaaggcggcggcaggcggctacagcgaagaaacgtattcttcgtttgtcggtatggcgccgatggatgatccgcaaatagcgatactcgtggtagtggataacccgaaaggtactaagttcggaagccagacagcagctccgggcgctaaaatgatactcgaagatacactgagatatttgcagataatgcctgaatatacacaggaagagctcgaccagataaacagcaagatgagcgtagtgccggatgtgacgaatacggcgttcagtactgcgataggaattcttggcggtgcatctctcaattatgtaatatcaccagccgttacggaagctgataatgagagcgatttcacgatagtcgatcaatatccgaaagccggtgaaaagctcgaaacgggaggtacagtatacatatatagggagtga

SEQ ID NO: 1007 - DNA, 2238 bp, Unknown
  Unknown gut bacteria
atgatcggagcggcggaagttgtgggcgatatcggtgagagtataaaggaagtgctgcgcccgataaatttctttatgcttgtggatgcggcattcataatatttatgcttgctctaaaaaaaaaatcgggcggcaggagcggcagaatagacagtgacaatgcggcaggcgcagttttggatggcgaagatacagaggataaaaatgcgaagaaagaagcagaaaaagcgcattcaaaaaagaaagccaaaatcaatctgaaagcgatagcatttttcgtaataatggtactgtttacgacaacaaatatttttaattggagttatatcacttcactttccaatcaggaatttttttcttaccatataaaagacatagtgtccggagcgtttgccggagaaacgagcgaaaatcttgcggcgtggacggactcatacgagcaggaaaaaaacgggccgcttttcggtgctgcaaaggataaaaacctcattatgatacaagtggaatcaatgcaggactttgtgattggacgcgagtatgagggtcaggaactgacgccgaatcttaacgctctcatagaaggcaatgcgacatattttgataacttctatcagcaggtaggaagtggcaatacatcagacgcggaatttgcggcaaataattcactgtacggtacacttgtcagctatacatacaagctctttaaccaaaattatttccgtggtcttccggtactgcttggggaaatggggtacgatacggccgtatttcacgcgcacgaggacaggagcttctggagtcgtgagagtatgtatccgtcagagggatttaacagatattacggcggacttaaaggccgcggcggggattatgaaatgacggaatggatgggctggggtcttaccgattccgagttttatccgcagacggtggaatatatgaaggaacttgcggagccgttttacagtttcgtaatttcgatatcaaatcaccatccttatgaaatgctcgaccactacaagtttatagagcttgcacctgaggatgaggatacgattgtcggcaaatatttgcaaagtgcggcgtacaccgattatgcactcggagtgttcttcgacgagctcaaagaagccggtctttacgacaactccatatttgtgatatacggagatcatacagggcttgcgcattccgatgaaatagatgaaagcatggagagaatactcggaaagccttatgactatgaggaaatgctcaaggtacctctcataatctattcgcctgacgagagcatagagcttggcgatacgataatgacggcgggcggcgagacagatattatgcctactgtagcctatcttatgggaattgaagaactcgatacgatatacacaggccacaatctttacacggtaaaagagggttttgtggcagagcagacatatatgacaaaaggctcattctttacaaatgatattgcctatgagatgtcgcgcgacggtgtgtttgaaaatggcagagcctggaatattcatacgggggaggctgtcgacgtatcattatgctatgatggttacctgcgctctgtggacattgtcaatacatcggaatacgtgctcaagagcgatgcgataagaatgatattcaaggacggagaaagcatcggcaatgtggacagcataaatatctctcgtatatacgcggacgagatagtttacgcaggatatccggattctgagcttgtcggtacaaattcggccgaggcgcttgattattccgtgtatgccgggaacagaagcataaggcttgacgtttactggaacgaagatagtcagccatatacgataaaccagaagacaggtgaagttgaaatggaatatgacgaaattatagagtggatggaaagtcatgcgagcgtcgatctttatatgaatatggaaaagagcgctgattttatgatacagttctgcggaacgctttcacctgctacacgtgagcgtattatacttgaagtgccgaatgctgaggaatatacgggaagatacgaggcgatcctcgatcttaattcggcggggctttcatatgaaaatgcgcttgaatttataaaatcaaacaaggtatgggcggttgtaatgtcaaaagaggattctgaggggagatttgcgaagcttttaggaggagatgtgacagtatacatcaacgataaggatgcagggatcattaccaaggtcaattaa

SEQ ID NO: 1008 - DNA, 3669 bp, Unknown
  Unknown gut bacteria
attttccaagccgttgtaaatcagacaatttccggacttgcctgcggcagaacgataaagggaaacgtagcgtttctcggcggcccgctgtcattcctttcggaacttagaaagagatttgttgagacgctcggacttacagaagaacaggtaatttttcctgatgattcaaaatattttgtggctataggtgcggcaatgctctcttcaaaatacgagcctcatacggttgcagaactgatttccaggatagaagaggcaaagcctgatatgctctcggaaacgaagcatctggaaccgctttttaaggatgaggaagactatgcgaagtttagagaaagacacgatgcggacaggataaacagaaagcctcttgcagaagctaccggtaaactttatctcggcatagatgcaggctcgacgacgacaaaggctgcgcttatagacagtgaaaaaaatctgctttattcgttttacagcggtaacgacggcaagccgatcgatacgacgcttgtgatgctgcgcgagctttacccaaatataccggaaagcgcttatatacagaaagtaacggttacgggttatggtgaaagcctcataaaagctgctgtcagagctgattatggcgaaatagagacgatggcgcattataaggcggctgaagaattcttgccgggtgtagattttattctcgatatcggcggacaagatatgaaatgtatgaagataagagacggagcgatttacagcattatgctcaacgaagcgtgctcttccggctgcggttctttcatagagacatatgccaagtctgttaatatgagtgttcccgattttgcaaaggaagcgctgtttgcgaaggctcctgtagatctcggtacgcgctgcacggtatttatgaattccaaggtaaagcaggcgcagaaagagggcgcgaccatcggagatatttccgcgggtctttcgtactccgtcatcagaaacgcgctttataaggtaataaagctgagaaaccctgaggaagcaggtgaaaaaatcgtagtgcagggcggtacgttccttaatgatgcgatacttagaagtatcgagcgcataatgggaagagatgttgtgcgtccggatatttccggcataatgggcgcttacggcgctgcgatagtagccaagaacaacgacgacggcataagaagcaagctcatcaatctttccgaaatagatgatttcaaggttgagaacagccacgcacgctgtcacggctgcgaaaacaactgcatgctcacgataaataagttcggagatggcacgcgcctcatcacgggcaatcgctgcgagcgcggcgagggtaaacagaaaaaagacagcgagcttccaaacctttatagttataagtttaaaaggctgttcgattacgagccgatttctttggaagcagcgcggggagttgtcggtattccgcgtgtgctcaatatgtacgaaaactatccgttctggtttactttcttcacggagctcggcttcagggtggagctgtcgcctgtttcttcgaaaaatatttacgaaagcggaatggatacgatttcgagcgacaccgcctgttatcctgctaaactcgttcatggacacataaaatatttaattaacaatggtgtaaaatatatattttatccgagcataaactacgaaagaatagaagacgaaacggctcaaaaccattacaattgcccgattgtagcgacttatcctgaggttatcgcaaacaatatggacgatctgtttgcggaaaacggagtgagatttatgcatccgttcctgccgtatgatgatgacaaatttcttgtgcgcgagctcacaaagctgctcgcagagtttggagtttcggcggcggagataaagagcgcggttgaatctgcaagggcagaggatatggcgtttaaagaggacataaaagagaaaggaagagaatatctcgaatatgcacgtgcccacggcaaaaaagtgatagtgctttcaggaaggccttatcatattgatccggagatcaaccacggtatagataagctgataagttcgtttgatatggtggttctgacagaggattcggtggcgcacctcggcgaggttccccgtccgataagagtctgcgaccagtggatgtatcacagcagactgtacaaggcggcggaattcgtgagcacgacggacgactgcgagataatacagcttaattcatttggctgcgggcttgacgctgttactactgatcaggtagaagaaataatgtcaaagcacaataagctttatacagttctcaaaatagatgaaggtaccaatattggcgcagccaagatcaggattcgctcgctcaaagcggctatggaagaaaggcagaaaaacggtatagtacataaggaagacaatacgccttacgaaagaaaggtatttacagcggaaatgaaagatgagtatacaatactcattccgcagatgtcgcctgtacatttcgaccttatagagccggcgcttgaggtatgcggatatagaggcgtgctgcttccgcctgttgacaaaaatgcagtagaagagggtcttaaatatatcaacaatgacgcttgttatcctgcaatagtatcgctcggacaggtgatatcggcgctaaaatcaggcaaattcgatttaaataagacggccatatttatgtcgcagacgggcggcggctgcagagcgtcaaattatatacctcttttgagaaaagcgctcacagaactcaatatgccgcaaataccggtaatatctgtaaatatggtggggctcgaaaaaaatccgggctttaaactgtcgatggcactgataataagatgtataatggctctcatatacggcgatatgtttatgaaagtgctatatgccacaaggccttacgaagcggagaagggggcggccaacgcactctatgaaaagtttgcggcagaggctaaagaaattatcaaaaaagcgagctggtatagatttaaaaagcatttggcagaaatagtggaagcattttcggagctgccgctatgcgatgtaaagaagccgcgcgtcggcgttgtcggtgaaattctcgtaaaatatcacccgacagcaaataatgatatcgtgggtataatagaaagcgagggcggcgaagctgttgtgctcgatctggttgacttcttcctgtacggaatgcacagcaaggaattcaattacaagacactctcaggcaagtatattacgatgataatgaataaggcagcaatagcatttatagaaacattcagaaagccttatcgcgacgctctgcgcggaagcaagtttattcagccttcgcatatagaagagacggcagaaaaagcctcggagataatatcaataggcaatcagtgcggcgaaggatggctgctcacaggcgaaatggtggagctcatagacagtggagtagagaacattgtctgcctgcagccttttgcgtgcctgccaaaccatgtgaccggcaagggtatgatgaaggcgctgcgcaagagaaatccgtacgctaatattacggcaatagactacgacccgggcgcatcgagcgtcaaccagctcaacagaatcaaactgatgatgtctaccgcacacaaaaacctcgaaaagcaaagtgcagaataa

SEQ ID NO: 1009 - DNA, 3486 bp, Unknown
  Unknown gut bacteria
atgctgcgcatactttacggaagagaaagcatagacaaagcgaaaataatatttgacaatgcaaaggccaagtccatagtgcttgtgccggatcagtttacgttggaggcggaaagggaagctttccgctgcctcggtacggaaggaattacagatccggaaattataagcatatcgagacttggttttcgtatactcgcggaaacgggaggtataaaaaagcgcagaatagataaatacggcaggcatattcttctgacatcggtaatagaagaattggcgaaaaaaggagagcttacggtgtatggagcgctttccgggaaaaattcgttcactgaactcgttaacaattttatcgctgatttaaagcagcacagcataaatcccgatggccttgcgggaatacgagcgggaatgaaagacagcgaaattctcgcgagaaagcttgttgatatagagaagatatacaggtgctacgagggaaaaatcagcggaatttttatagatacagaggactatatagatatgtatgtgccggcagcggcagaggcaaagagtttatatgggcgcgatatctgggtatgggggtttgattattttgcgcctaaaaatgcggaatttatcgtgcagcttgcaagcgtgggcaatgttatggtgatgatgacggctgactatggtgcgcgtgatgaagaaattttttatcttacggaagggatgatgcgccgctttgaagcgatggcggaggaacgcggtgtgaagacgagcaggattgcgcttgcggaaattgaagagagagatgcgaatgcacgccgcaaaaaagctgatttcgaaaacgcttccgcagtcctcgaaagagagcttttcgccatcccggcaaagccggccgcgccgcatagccgcgcttcaaagcaggtcacgcttgttgctgcggcaaactgctacagcgaagcggaaacagccgccgcatatataacagaacttgtacgtgataaaggctttcactataaggatattcttatggtctgcaacgacctttccgcgcgcgggactattatcaaaagagtgtttgccgagtacggcatagatgtgtttatggatgaaaagagaggaattcttaaaaatcctgtaatagtctatattctttcgctgctcgaaattgtggcaaaggattataggacaaaagatatatttgaatttttaaaaacaggcttcactccgtttgcacggagtgatatagaagagcttgagaattatgcagtaaaatacagaatccgcggctcaatgtggaaaagaccgtttaagtacggcataagcgaatacggcgacaatgactttgcgcgtctcgaagaaatgcgcggggagctctgcgattttataggtgcatttgaaacggaatttaaaaaaagccgaaaagcgatattaagagcgcaggcgctttacaatttcttaaatgaaacggcgcagattccgagaaaaatagaagaagccgcgtttgaagcggaagaagcaggcgcgggcgcttttgcgcaggagcttttgcaggtttgggaagagattgtttccgtgctcgatcagattgtcaatgtaataggggaagaaagcccttcgatgaagactttttctgagctcatgcgcgcaggttttgaagcgtctgaagtcggtctgcttccgcctgcggccgatggcctttcatgcggcacaatgcagaggacaagaagcggcaaggtcagagtgcttgttgtgctcggcgcaaatgacggtttgctgcctatggaaatacgtcccgaagaactgctttccgaggatgaaaaaatgcggcttgccgaaaacgactttgaagtcagcgagcttgatgaactccgggtgcgtgaagaaaagctcgcaatttacaggacattttcattgccgtccgattgcctttatattagctattcggggtcggataccgaggggaatgagcaaaaaccatcgccaatatttaacgcggtaagaaaaatattcccggatatctctgtacagggggatctcgacagcagaggcgagccgatggcgctcatcgaaagcaaaggcagtgcccttaaccacctcgtgcgggaaatcagagaaaaagacggcgcggttgcggaagaatggcagactcttatggactggtataagataaacgaaacagaaagatttcgcgaagcatcgtcggggcttacttacagaaacaatatcaaaaggctgcctgaaacacttgtgcagaagctctacaagcaaaacgagaaagacgatatggtgatcagcccgtcgcggcttgaaaaatacagcagatgcccatttgcgcattttgttctgtacggactaagaccagaggagagaagagtgtttgaagcgggagcgcgcgagataggggatatgtatcatgaatgcctgatgagattttccgaggaaatgtcgaaagaagataaaatagcagctttggaaacagcagacggctcaggcaaaaacagggaaggggttaaaaaatggtatagagtgacgcgcgagcagacagatgcgatgatagaagcaattatcaatgaaattacattggcgtatcgggaaggaatttttgcgtacggaggcgaagaggaatacagacgcagccgtatgaaagagtcgctcaaagaagtcgcctgggcgcttgtgcttcagaacagagcgggcagtatagacgaaatgtattttgaggcgggttttgggcgcgacggcgctaagaaatttcctccggttaatgtagaaacctcaagcggagatgtatttatagaaggcaaaatagaccgcgttgatatactgagaaacggcgcggtaaaggtgatagattataagtcgggaaacgaaagattcaaggctgaggaagcgcgcggaggatggagacttcagcttatgctgtatcttaaggcggcgtcttttgataagagccgggaaaagacacgtgagcctgcgggaattttctattttctcataaaagatactgatataaatgcagacggtgtagcggcagagaatatagccgaaaagctttcagacagcgtaaaaaaagagttcagaatgaacggactcatcgttgacagcggcagcaatgcaatcgatatagccggggactttgagagatactccgaggtaatagaagggctgcaaaaagtgaaggcaaaggattccggcaagcgtgagatgccggaaggagcagacgcagcgagagtgaacgaaaaagaggcattggagcaagcggacgcgagggcgtttgagtataagggctgcgttatgagtaaagaggaattttccgagtttgcggaagcgtttgatcatacaataaaggagctttgcgagaatttcaagtccggcgaaattgccgcaagaccaaaacgcacaggagatgtgacggcttgcagatactgcgcatataaaggcatttgcagatttgatataacagtgccgggatatgactacgaaaaaatagtgtaa

SEQ ID NO: 1010 - DNA, 1932 bp, Unknown
  Unknown gut bacteria
atgaataatattattcttcatccgggaattattctgattttgtcgggaataattgcagcgcttgtaccggaaaaaataagaaagattataatgatattgggccctgcaggcgcaattactgcaatgcttgcgcttgattatgggactgtgcttactgtaccttttataaacgggatcgagctgatgctcgtaaatgtcgacagactgagctatgtgtttggaatggtgttcagtatgatgtcgctcatcggctcggtgtatgcgcttcacaacaagggttctcttgagactacggcatcactttgttatgcgggaagctcactcggcgtaacgcttgcaggagattggcttactctcatatttttctgggagcttatggcggcgtcatcgcttttccttgtgtgggcaaacaggagcgaaaaggctgtaaaagcgggattcaggtacctgcttgtgcatatgttcggcggcaactgcctgttaataggcataatatttaaagtaaacggcggtgatatgcttataagcaatgttacggccgtgcacgacgctgcattttggctcatactccttggagttgcgataaatgcggctattccgccatttcacagctggcttacagatgcttatcctgaagccaatgttacggggagcgtattcctttcgtcatttacgaccaaggttgcggtttactgcctcataagaatgtttgccggcacttcgtttctcatctggtttggtgttgcgatggcactttacggcgcgctttttgccattatggaaaacgatgtgagaaggctgctttcatatcatattataagccaggtcggatttatggtggcgggagtcggtataggaacgccgcttgcgctcgacggagcgacagcgcacgcgttcagccatattttatacaagtcgcttctgtttatgggagctggagcgataattacggccacaggtataaacaagataaatcagctcggcgggcttgcaaaaaagatgccgtttgtgtgcgttgcgtttactgtcggggcgttttcgatttctggagtgccgcttttcaatgggtttatcagcaagtcgataacagtgtcggccgcgtgcgaggcgggttatccgctggcagagcttttgctgctcgttgccagcgtggggacattcctccatgttgtaatgaagatgctgtactttatctttttcggtgaggataagggcatagaagtgaagccgcttccgaaaaatatgtatgtcgcaatgagtatcggttctgtgctttgcatactttacggagtgttcccggatcttctttacagatttctgccttacgattttgaataccatccattcacatgggatcatattatgcagtacgtgcagcttctcgttaccggagtggtaccgtttattatgtatcttgagcatatggagccgctttcaaagatttcgctcgacacggactggttttacagaaaaccgtttgcggcgcttgtgcgcgttatttcctcgctttgcgtaactgtgcagattgggcttggcgcgtttttcaaaagcatatatgacggcgtgcggcgcgcatctaaaaatccgcttgtgtttatcggcgagcatggtattacagagtatgagggaatagaaagctcaaaaattgccgcgagcagtgcggcgagtgcgatatcgggcacgtcagcagatgttattgcggataatgccgaggctgtctttgatggcgattttgccggaaatgatatagatggtaaacttgcagcagaaataaaagaagaagctgaggagcgggcttttgacaacaatcagcttgacagcgctgatgtgtacgatccggacaaagagcgtgagcctatcggcgatataatgagcgttgtaatatttacatttatagcggctgccgcgtttatagcagcagtatttatgtag

SEQ ID NO: 1011 - DNA, 2766 bp, Unknown
  Unknown gut bacteria
atgagaaaaatttttgaatttagatattatcagtttttgatagtgggagcggtgcttatgacagtgcttgccataagactttttgtgctgacggttattgagcacgacgagtggagtgtatacgccgataatttgagccagaaaaaaatatacacctcggctccgcgaggcgaaatactcgatagatacggcagagtacttgcaggaaatgtgcagacatttcaggtgagctttgattccactggaatggagagcgaggatataaacaatattgcgctgagcgtcataaatatccttgaacaaaatggagacgaatatatagacgaatttcctataataatcgaaaacggaagctttgtgtacacatatcagaaaaatatagacgactggctggtaagcgaaggaatgccggtttattacacggcggaaatggcgtttaatcagatcagggaaaatctcgaaatagatgagtcacttgatgtatatgaggcgcagcttgtaatgcagaacacatacaatgtatatccgccgatctctgttaaaaatatgacatttacacagtataataaccagcagatttttctcgggaaatacggtatggcaaaggatcagatagattatgatatttctgctgaagaggcctttaataagctgcgcgagcgctttaaaataggagaagaatactcagtagctgatgcgcgcaagatacttgtcgtcagaaatgaaattgctgagcttggatatatgatgtatatgagtgcgacgatagcaaatgatatttctcaaaacagcatcataatgctcgaagagatgagcgacagtcttcccggagtatctgttgtgtcggagacgaagaggtactatccgtatggaaatactgcatctcatgtgataggatatctcggtaaaatttcggaggctaacaaagaagaatatgtaaacgaaaaaggatataatcctaacgatcttataggacaaagcggtatagagagcagttatgaagaagtgctccgcggcagtgacggcgtaaggacagtgcaggtaaatgcgaacggcgagcttgtcaatgttataagcgaaatagaggaaaagaagggcgattccgtttatctgacgatagatgcagaattgcagcagacggcggagcgcgcgctggagcaggcgctcgaaaagattcagactgcgggaacatttgagagcaaatatgggaattataaatacggcacagcatacccaaatgccaatgtcggcgctgcggttgccatagaagtggagacgggtgatgtgcttgcaatggcaagctgcccggatttcgatcctaatctctttgcaacaggaatttcaaacgaggactggcaagctctgcagagcaagaatacgcgggattacctttcgccggcgccgctttacaatgtagcgacgaggacggccgtgcagccgggctcgacatttaagatggttgttgctacggcagcgatgaaaaaaggactttcgccggagacaaagcttcgtgacggcggctatattatggtcggcaacagaccgtttaactgtcttatttggacgcgaagccacagcactcatggcgcggttgatctgcgccatgctatagaagtatcgtgcaactattatttctacgacataggaacgggttttgactactacaccggaaaaagtctcggctatgatatagatatgaacgatataatggagactgctaaggagtatggtctgggacttgcgacaggcatagagataagcgagaccgtagcagaagtgccttcggcggagagaaagatgaattcgatgaaatcatcgctcagatattacttgaattctaatgcagaagacctgtttgaagaagatattttgaatgatgatgaggctctcagtgaaaacatagagacgatagtttcatggacggaggaaaatccgacgcgttcagaaatcatagaaagactgccggaatacggcgtaaaagaagatatggtcacgagccttgccgatacctgtaagtttgattactacaatcaggcaaagctgacgcgtgccgatgattttaacatatctattggacagggtgaaaattcctatacaccgctgcaaatggcaaattatatagctacgataggaaacggcggatttcataacgaggtatccgttgtcaaggcgatagaaaatcacgatccgatagaaaaagcggctccgacaaaggtagatataacggaagaaaatcttgaggctttgatagatggaatgacgcttgttgcgaacggcacgtccggaagcctgcgcggcgtatttggaaatttcccggttacagttgccgctaagacgggaactgcgcagaagtcgggcgtgatacagcctgcggacgaagtcgaatatataagaacgcatctccgtcagctcgatgcaagtcttagctgggaagatgttgaaaccgaaatgaacagaattcttgcggaagaatcggacaaatacaggacgcaggcggcggcagtagatcaggctgttaagaatctttcaggaggcaaagtcaatcagacaaagataaatcagtggaagtctgaatacgataactttgcctgggtggtggcaatggcccctgccgatgatccgaaaatagctgttgctgtgctcatattccagggcggtacagcgggatacgcggcgcctgtcgcgcgggaaatcataggtgattatctcaagctttatgacgataatgaaagtgtggagttgaatataaatactgttgttgagtag

SEQ ID NO: 1012 - DNA, 2223 bp, Unknown
  Unknown gut bacteria
atgccggaggaaaaagaagtaacgatagctgaaataatttttcataacgataataatgcgtacacggtagctgtcgttcagagtgacagagaggaatttgtcgcggtgggaagtcttccggatgctgcaaagggacgcacctatgtgcttacgggagtgtggaagcagcatccatcgtatggagaacaatttgttttcagtgaattccgtgaggtgatgccgacatcactcgagggtataaagggatttttagcatcaggcatgctaaagggtataggtaaaaaaacggcggcttcgatagcggcgaagttcggaaaagatacatttgatattatagaaaaagagccgcaaaggcttacagaaatatcgggtattggaccagctaaggcagaggctatatctgaggcgtttcacgcgcaccgtgaatttgcggaagtgacagtttattttcagcagtacggtataagcgcggaatacgcgatgaagctctataagcagtatggcagcaatactatagcgatagcgacagagaatccgtatcagctcattaaagatgtggcgggcattgggtttcgcagggcggacgcgatggcgcttaagcttggaattgctaaaaacgacgaagcgagaataaggagcggtgtggaatttacgctttggtactatgccggcgagggcaatgtttttgtgccgcagaaagagttgtgtgaacgcacggcgggactgctcgatgtttcatctgatgaaatcgcagagcagcttatggtaatggcgatagagggcgatatcagagttgagatgctcgaaggcagggcggttgtttatcttgctgtttattacaatgcagaaaagaatgttgcagttaagcttgcgcagctgtgcgaatcagagcttaaaggcgtaaataccgatatgaattctctgattgcgctcacggagcgcgagacaggaataacgttgtcggagaagcagaaatatgcggtgataacatcgctgtcatatggtgtgtcggtgataaccggcggtccgggtacgggcaaaacgacaattataaattcaataataaacgtgctgagtcatggcgggcacaagattgcaatagcggcgccgactggcagagctgcaaaacgcatcacagagacttcggggcattttgcgcagacgatacacaggcttcttgaatactactattctgagggggaggatgccatgcgctttggcaagaccgcggaagatccgcttgactatgatgcggtgataatagatgaagcttcgatggtggatttgcttttgatgaacggacttgtaaacgcgttaaagccggggacgaggctgataatggtgggcgatgctgatcagctgccgtctgtcggtgcgggaaatgtcctgcgcgatatcatagacagcgagtacgtatattccgtgaagctcgatgagatttttcgccaggcacgggaaagtcttatcgttgtaaatgcccatagaataaataaaggcgagtatccgagcataaatgaaaaggataaagattttttctttatgagaaggaacggtgagcttgaaatacttgaaaccgtaaaacagctatacaaagagcggctgccgcgttattacacgaactgcgagccggtgcgtgatatacaggtattgacgcctgtgcgcaaagggcttatcggcagcataaatctgaacaaagaactacaggcagttctcaatccgctgcgcgcgggacttgttgaaaagaaatacggagacaaggtgtttcgcgtaggcgacaaggtgatgcagatacgaaacaattatgagcttgcctggaaaaggctctcggactttacagagggtgagggtgtattcaatggagatgttggctttatagattcgatagatgttgaatttaacgagatgaccgtagtgtttgacgaggataaatatgtaaagtacgatgtgacaaattttgatgagctggagctcgcgtatgctgtgactgtgcataagagccagggcagtgagtttcccatagtgataatgccggtttcgtggtttccgccgatgcttgcgacgagaaaccttctttatacggcggtgacgaggggtaaggaggctgtcgtgcttgtcggttcggagcagaaactctttgccatagttgataacaatgcaataactaaaaggtattcggggctggctgtacgcctgcgcagcattggctgcgacgggatgttgtga

SEQ ID NO: 1013 - DNA, 2820 bp, Unknown
  Unknown gut bacteria
ttgaaaggagaaataaaaaagatgggacttttagaaaaaatctttggcgatatgaattccagagaaattaaaaaaatagaaaaaatcgtagaccaaatagaagcgtacgatgaagagatgcaggcgctcacggatgacgagctgcgcggcaagacagcggaatttaaagaaagacttgcaaatggcgaagatatagacgagcttctgccggaggcatttgccgtagcgcgcgaaggagcgtggcgaagtctcggaatcaagcattttcgcgtgcagcttataggcggcgttgtgcttcatcagggtaatatagccgagatgaagacaggtgaaggaaagacgcttgtggcgacactgccggcatatttgaatgcactcacgggaaaaggtgtacatgtagtaaccgtcaacgattatcttgctaagcgcgactgcgagtggatgggcaaactttatacattcctcggccttacggttggctgtgtagtacacgggatatcgcaaaaggagaggcgtgaggcgtatcttgcggatataacatacggcacaaataacgagtttggttttgattacctgcgcgataatatggtaatatataaagaaaatttgatgcagcgcgagctcaattttgccatcgtcgatgaagtggattctattctcgtggacgaggcgagaacgccgctcattatttcagggcagggcgacaagtcaaccgagctgtacagcattgccgataagtttgtaaccggtctcagaattgaagaggactttgtgacggacgaaaaggaaaaatcaatatcgcttacagaagaaggcgttgccaagtgtgaaaagttctttaatgtggaaaacttctccgatcctgagaatatggagataaaccatcatgtgcagcaggcactcaaagcgagaaatatgatgaagcgcgatgtcgattatgtggtgcgcgacggagaaattattatcgtagatgaatttacagggcgtctgatgttcggaagaagatattccaacggactccaccaggctatagaagcaaaagagggagtgctcgttcagtcggaatcaaagacgcttgcgactattacgctgcaaaattatttcagaatgtacggaaaactcgccggcatgacaggtacagccaagacagaagaagacgagtttatggacatatataatatgcaggttatcgaaattccgacgaataagcctgtaatcagaactgaccttaatgacagcatatatgcgacggaagcaggcaagtacaacgctatcgcagagagaattgcagaggtgcacgagacggggcagcctgtgcttgtgggaacgatttcgatagagaattctgagaaaatctctgaaatgcttaaaaaaagaggcataaagcacaatatactgaatgcaaaacagcacgataaggaagcggaaatcgttgccgaagccggcaggctgggagcggtaactattgcgaccaatatggccggaagaggtactgacatcatactcggaggaaacccggaatttgaagcaaagcgggagatgaagaagctcggctacagcgataatgcgatttcgtttgcgaccagctttgtgcagtcggatgatgaggaaatgatggcggcaagggagaagttcaatgagcttcacgaaaaattcaaggctgaaagggcaggcgaacaggagaaggtaagagaacttggcggactttgcattatcggtacggaaagacacgaatcgaggcgtatagataatcagctccgaggccgttcgggacgtcagggcgatccgggacagacgcagttttttatttcgcttgaagatgagcttatgagactgttcggcggcgagagaatacagggcattgttgaaaagctcggcgtttccgagaatgaagcgatagaagcaagtatgcttacaaagtctgtggaaaatgcacagaagcgagttgaagggcgtaacttctcgatcagaaagtatgtgctgcaatatgataatgttatgaataagcagcgtgagatcatatatgatgaaagaagaagagtgcttttcggcgaggatttgcggcactacattatgaatatggtacagggactcattgatgagataatagatcctgtcgtaattgcatcaagatttcctgaagaatgggatctcgatactgtatggaacgggctttcaaaactctgtcaaagatacgaagcgccttcatatacaaaggaagaaatcgaaattctgacggtggaaagtctcaaagagcgtgcatatgcggattttgagacgttatatgaagaaaaagaagaagaaatcggagccgacaggatgagagagcttgaaagaatgatactcctgcgcgttgtcgataatcactggatggatcacatagacgatatggatcagctcaagaacggtatcggtctgcgcgcgctcggacagcaggatcctgcggcggcgtatgccagcgagggttttgatatgttcgagctgatgataggcgatattaaagagcagactgtacgtttttgctacaatgtaacggtacagacgaacaccgaaagaaagcaggtaatttcaggcggacgtgagcagaaagaagactttgacggcggaatgcagggtaaagctcaagctgcaggcggaatggacggctcggcagcagcgtacagtgtttcgtcaggaagcatgccggcgaagcctgcggcagctccgcgtgagagcaagccggagacctacaagcgcaaagaagcaaaggtcggcagaaatgatccgtgcccatgcggcagcggcaagaagtacaagaattgctgcgggcgcgagcaatag

SEQ ID NO: 1014 - DNA, 1692 bp, Unknown
  Unknown gut bacteria
atgacgccgtttacaactaaggatcttgagatacttgacgacggacttacgatagttacaaactatctcaagacatggcagatagtgcttatagcaataggggcagtgcttttgattgctggcataatactcgtttttatatttgcaccgaagaaagaaaaaataaattataaaaaaaatacagctatatttgcagcagtaatagcgattctcgcagcgtctacgggagcggcgataaagacggggatcgtcgacacttttttcggaaaccttgcgtatgcgtacagagattacggagtgccgtactgttttataaatacttggctcaacacaggagtaggaaaaccgagcggatactcggaggaaatgatgctcggcatatttgatgagggagagcttaccgatgcagtatatgcagatgctgcggaaaatgatgacggagaaatacatcccaatataatatttcttcagctcgaatcgtttatcgacccttctcttataaattcgatagaattgtcagaggaagcaacaccttactggaatgagctccaggaaaaatattcgacaggatggtttacggtgccgtcagttggtgcaggcacggcaaatacggagtttgaagtgatatgcggtatgtcggtaaaattttttggaccgggcgaatatccgtataagtcgattttaagcgaaaaaacatgcgaaagctatgcatacgatttaaaatcaattggatattcagcgcacgccatacataatcacagaggcgtattttatatgagaaacaaggtgttttcaaatcttggatttgatacatttacgagtctcgaatatatgagcaatgttataaaaacgccaaaaaactgggcgaaagataatgttttagtaggagaaattctggcggcgcttgaccttacggaaaatgaagactacatatataccatatcagtacaaggtcacggaaaatatccgtcagaacaggtgatagagaatcctgcgataacagtgctcagcgcacctacggaagagctgaaatggcagtacgaatactatgtaaatcaaatttacgaaatggataagttcgttaaaaatctgacagcagagcttgaaaaaagagatgaaaaaactgtgcttgtgatgtatggcgaccatttgccggcactcgatatgacggaagaggagcttacaagcggtgatctctacaagacggaatatatcatctggagtaattttaaaatggaaaaagaggataaagacctctttgcatatcagattggtgcggaagtactcgaaagactcggcatagacacgggaacgatggctaaatatcatcagaaccataaagacagtccaacttatcttgaggatctcagagcgcttgaatacgatatgctctatggacagggttacatttatgggggtaaacatccttttgaagcaactgacttgaaaatgggcatacgcgacataaaaataacaggcatcgttgaaatcggcggtaagttttatgtaaaaggagaaaattttacagagcagagcagaatttcgctcgacggcgaagtgctggagacgatatatcttgggccgacggtgcttgggcttctcgaagatgtagatccggcggaagcagtaaatatgaaagtcagtcaggttgacagaaacagcccgaccgatatattatcaacaacagaataa

SEQ ID NO: 1015 - DNA, 2592 bp, Unknown
  Unknown gut bacteria
atgacaggattactgctaaaccttaattttgcagcaacagcagcttctttacttatacttattgtaaagtacatattaagaaaaaagaccacaccgagatggcagcttttaatatgggcggtgcttgcagtgcagcttattgtttttccatttgcagaaaagctgccggaaagcggactttcgctcagaaattatctgccgaaagcatcagtttctgaaaatgcaagcctaaatgcagcagaattgaaggaaaatataaacgatgtaaatggcgggataaagataaatgccgacgcagggaatacagaagcggtacaggccgacaaagttttgcctggcagaggaaatggcgaaacctctgaaaccggcggcgggaatataaacactgggcgtgggtctaaagaccgcataattgcggttgaaatgccgcaggggaaaaaagtgtccgtgagcggagctgttgatgctgcaataaccacaatatggatctgcggcattgcggttacggcttttatacaaattggacgctatataagatgcagaaaaagcgtaaaggagcttaatgtatgtgaaaatgaaaaagtgcttaagacttttgaagaatgtaaaaatgcgcttgcaataaaaaaggagatatcaatttataagggtgcagatatgacaatgcttatcggcatttttaatcctaaagtatatataaatgaaagttttgcagagaatgaactaaaatatgtgctgatgcacgagctatgccattataaaaataaagacgtactctggagtttggcggctgccgcatacaccgcagttttttggtttaatcctgtgattctctattcgcttcgcgtattcagaagagatgttgagatttactgcgatgacagagctattgctgcggtctctgcgcttgccgaggataatggtttgactgcgagcggccgccgtgaatacgcgcgcgttcttataaagtcagctgcgggacagcagggatttgttcctgtaactacgtcttttattggcagcgaaaaagaggtaacggcaagaataaagcgtatcgccgagtttaaaaagccgcgggtgacatttgcggttgtttctgcactggcagcactgcttatacttgcagcttgcaccacgggagcacgcggaagcagcatgccggaaacggaaagcgtacttatcggtatgcatgtgcaggctgatgttccgtcgtcctggctttatgatatggataaagatgtgagccgtatagattatgcagacggaatgagcgaagacgcaaaacagttctttgatagagaaggaaatctttttgctgaaatctatgtgccggaagaaatgtttacatttgaagaaatgcagactttaaatgaatcttcctatatgagcgatgaacaagtacaaaatgcgataatacggcacttggaaagccgcggctacttggaaattcgtgaagctgaggcaaatacaaacgatatgcagactgaagaaggtatacggtattatgcctttacagcaaaaagagacgggaaacaatataacatcgccgtaaggacaggatattcatttgcagtagccgccgctgaaacctcgatatcagagctcatttcgtgtcttgaaagcgtacgcgcatcatacatatgggatgttgaagaaactgcgctgaaaagcgtccctgaatttcagcaaggaaattatgagcttacagattcgcaatatgaaaaatacgccagcgctttgcttgaacaggcatttgaaatctttgagaatgaggatgtgcctgtcgaatggaaaattaaagaacaccatataaattcaattgctgaaattaaacagcaggcgggcagcagccccaaaaagccgaatgtttttctcggagctttttatgacgatgtaaaatgggatgtcatatatcctaaggcaaaggcgtatgaaattgattatgaaataacgccgtatatggaagaatattttgccggtaaaacgaaagagaaaagaattgccttgtttgcagtaaatgattacattactgacgcagaagaagctgacggcgaagcacagattggcgaactatacttcttaggctttgcggacagcgaagatattgatttatttggaacggattcggtgctgctcgatatgctcgatcgttggtacacggggataaatccggcctttcctgcgcattatacgacagaatatataggaaatgcgatggcggtgggtaaacttatagcctctctgccactgcacgagtatatagatatgagcagcggtacgttcagcgataaggcgcttgtgctgcaaactgcggaagagccgtatggtcttacggtaaattatgattttacgaaagaatctccgctcgatatgacagatgaaatagcgatgacaccgattgatacgagaagcagacaaatcctttcttccggcttaaatgcctatgtggtgcggcaggtatatacaaatatgaacagattgtttgacggcatcggcaatcttggaattcttacggtaaacctgcaatataccgaggacggtgaaattcgcaccgagacactttcttttacgcgcgatgatttttggttataa

SEQ ID NO: 1016 - DNA, 3660 bp, Unknown
  Unknown gut bacteria
atgaagtggacggacagtcagcgcgaagccattgaattgagaaacaaaaatatgcttgtggcagctgccgcgggttctggtaaaactgcagtgctcgtcgagagaataaagcgtatgattctcgaggagcatataccgctggatagttttcttgtggtaacttttacaaataaggcagcagccgagatgaaagacaagataattgctgctttgactgaggaaatagaaaaaaatactgctgactcagctttcctgcgtgcacagttaaactcggtttacaaagccgatatttgtactttccatgcatttgcgctgtcggtgatacgaagatattattatataataggtgcggagccgggatttaaggtaagtgatgaagccgaaaacaggataatgaaagcagatgcggcggacagattgtttgccgggcgttttgacgaaggcgcacaggaattttttgattttctcgattgctattccaagggacgcagtctcagcggcataaaaaacataataatcgaaagttacgataagataatgagtgtgcccgatccggacggctggctcgatagatatataaaaggaactgcggaaaatgaaaaaaccgcgaccggtgtaaactcatctctgactgccgaaaataccggtataataaggctgatgctgaaggaaatccaaggcaggctgatgagcgcgtatcgctgttataatagcgccgtaaatatgcttgcggaaaatggactcgataagcttgcggcaaaggcagagcaagaagcggagtatgcgaaattgctgttttatgcggccggcggtacagaaagcgcgttaaataacaccaatattgcaagtgatgggggaaaaataaaagaggaagatatatataaaatttataaagaaacggcgggcctcataaactcgccggtttcagtgcgtttgacggcaggtaagaatgagaaagaagcctacgtgcagataaaagacagtgtaaagctgctgcgaaaccgggcgtctaagtacataaatgatgtgcgcgatgattattttgcatatgatattttggaatatatgggtgagcttgaagctgtaaagccgagcgttgcgtatttatgcggacttataaaggattttcgccgtctttatgacgaggaaaagagagaaaagaaggtcgtggatttcagcgatatagagcatatggcgcttgctatccttgataatgaagcggccgcggaggagtataggagaagaattgcctatatcttcatagatgagtatcaggattcaaaccccgtgcaggaggcgctcatagataagataaagcgcgtaaacaatgtatttatggtaggtgatgttaagcagtcgatatataaattcagacttgcggagcctgagctttttacggacaaatacaatcgttacaggagcgggattgatgaaaacagcgtcaagctggatttgaacactaattttcgcagtaaggcaggagttatagaaacggtaaacagaatattcggggagtcaatgcaggattatgatgaagctgcggcgctgcatatgggtataagcggtgaacatagcgacggatttaaatcggaagtacaccttttgtatgatgacgatgacagtgatattcctgatgagatagctgaaatgaaacttacagaacgcgaagcatacatagcagttgatattataaaaaaatcgctcggaagcatgatttatgatgtcaagcgcggcgataagagaatgctcgaaaaacgcgatatagtaatacttatgcgcagcgtcaaaacagcgggagctatatatcaaaaagtgctttcggaaagcaatatagcgtgctatatggatgaaagcgacggatacttcgacacaatagagatagatgtatttctcaatcttctcaaaatagttgacaataaaaagcgcgacacagagctgatatcggtgctttattcacctatttttggcttcagtacggatgagcttgcacaaataagagcggatcacagagagggctcatattacagtgcttttatgagttatgctgaaagcgggaagaacaatgcgcttaccgtaaaatgcgccgaggcggaagagaaaataaatttgtttgtatcgcaggcacgctcaatgccgcttgatgattttatatggaagctgatgtgggatacgggatattattcgtatgcaggggggcttccggcaggcagacagcggcaggcaaacctgcgcacacttgcggacagagcgtcagccttttctgaaggaagaagcggcagcatatacgaatttttgcgttatatagaaaatatgaaagagcgcggagtgcagacgggacagacgagactgctttcggaaaacgatgatgtagtgcgcataatgacgatacataagagcaaggggcttgaatatccgatggtaatacttgcgggactggacaagcgctttaattacaaaaaagacagaggccttatttctatacacaaagacatagggatagggcttgagcttgtaaatgcgaaagagcattggcataaaaagactattctgcaaaaacttatatacgctcgtacggacagagaatttgctgatgaagagctgagaatactctatgtaggctgtacgcgcgcaatggacaagcttgtgctgcttgggagcacgagaaaaaagaaagagcagcttgaaatttataagtatatgtcgtcgataaagaacataatgtcagcatcttcgtatcttgatatagtactgcctgcgatagcaggcgagacaaagcttgtgctgcatagtgcgggagagcttgcagatatagcttatactgcagatgaggctgccgattttataggcaggcttgtaagcagtaagccgagaattgatgcggaaagtttatatgcagaaatagacagacggctttcctatgaatacccatatgcaaaagagcttgctatgaaatcaaagtacagcgttacagagcttgcatctgataaagaggaaggcggcaacagagatgagagttcagggcttgcagtgccgctttttatggaaagaggcagaaaactgagcgcggcggaaataggaacactgtatcacagcgtcatagagcacatagattttaaaaggatatcaggaatgatgaaaagtggtgatataaacagaaaggcgacggatagaacagctgcagaggttgatatggatgaagctatttcttatatatcacagcttatagcggatatgacgcaaaaggatatccttttggcggaggaagcagaggccatcgacacggaaaagattatactgctcgtaaattccgatattggaaagcgtatggcggatgccgcctcgcgcggaacgctcgaacgcgaagtaccgtttactatgaaaaagagaattgcagacgaaagcgaagagagtgcggaagtgttagtgcagggtattatagactgtatgtttacggaaaaaaacgaagacggaagcgagtcgtatatcatagtggattacaagacgagctatgcaaagggagaagagggcgaagcgcatatcagagaaaagtatgcaaagcagatagagctttataaagaggcagtgcggaagacgcgcagtgcggaagtatcggaagcatacctgtggctgatactgcgcggcaaggctattgcgatgtaa

SEQ ID NO: 1017 - DNA, 1878 bp, Unknown
  Unknown gut bacteria
atgctgccaatgacggcactggcggcggaaggggaccccaccattgatcaggcaggttatatcctgaatggtgaggatgccaaggaagcactattcaaagacagcagtgacaatggcgaaaactatacaatgtatgttaagtttagccaagattttaccgaaggcacaaatctgtggtttgaaatcagcaatggcagcactacatatggaattgccggcggaaacaaatctatgcagtgctggagcttcctgaacaaaggacagtttgaatactggcctgaagatgtagaaccgggagcacctgctgcgggtgagtataccgttactgtatataatgcaggtgaaacggcagtcagcgctaatctcacagagcttccggacaaggagagctttacagagataggaaaaactacggttaatgttattgagcagcctacagttattgacagcggttatattttggatgcagcagcagccgaagaaaagctgggctatccttgcttcccgaatacgatgtacatagagtacagcgaagccttcccggttggtacatacctttggtatgttattactgatgctgaaggtaacgaatatgggcttgcaggtaacgaagccaaagttcaggcgtggagctttaataataatgtaggtcagtgggaaaagtggccggaaggcgttgaacacggcagtcatccggcaggtgaatataagattgaagtttatgagacagaagctaattatgctggagttacagaagctgaaaatcagcctacagatgctgagctgacaaataaagttgccgaaaagattgtcggcgtagttgctggcgaaagcacagttacgttcaaagctaacggtggtagatttgcagatgacactactgctgataaagaagttgtaactgtcaacggcaaggttgtaaatataccggaagtaacaagaaacagctatacttttgaaggctggttcaatggtaatgatcaggttgacaatgattatgtcttttatgaagataccgaagttactgcaaaatggaaatcgaaaaaatcagggggatcttccggaggcagttctgtatcgacaacatattcagtgactgtttcttctgtagaaaacggtcagattactgtttcctcgaggaatgcgaaagaggacgatactgtaaccataactgtaaaaccggatacggactatgtacttgataaactgacagtgtccgacaaagatggcaatagtattaggctgactaacaaaggaaacggggagtatacatttacaatgcctgccagcagagtgacgattgacgcttcatttgtaaaagaccttggtctgccgtttacagatgtggccaacaactcctggtatgctgatgaggtggcttatgtgtatgagaacggtttgatgctcggtacaagtaacactaacttttctccaaacttaactacaaaccgtggaatgatagtgacaatgctttaccgtcttgagaaagagcctgctgttacggaagcttgtccgtttactgatgtaagcgacggcagctggtatgaaaatgctatcatatgggcatctgcaaacaagattgttgagggctacggcgacagcaattttggtccggaggacagcattactcgtgagcagatggcagctattctttaccgctatacacagttcaagggctatgatttgactgcaaatgcagatatcagcagcttcaacgatgcttcgcaggtatcagactgggctcttaatgctatgaagtgggcatgtggcgcaggacttatacagggtgactctaacaatattatgccgactggtaacgctactcgctgccaggtagctgcgatcctgatgcgctattgtgagaatatcgtaaaatag

SEQ ID NO: 1018 - DNA, 3915 bp, Unknown
  Unknown gut bacteria
atggcgaagcaaaaagaaataagcaaaattattgctctgatgcttgtgctctcaatgctcgttacgcttatcacatttgttccgacggcaaatgtctacgcggatgagcagacagcatcggagcaggctacttttgagaatacgagcgatgacggagggcttgatgttataaatctctgtgaagagagaacatttaaggcgatgataccgatttcatcagcaagcagtattgataaatcaaacatagtgtggtctcttgacagaaatacagcaaagccgtatgtggatgcggcgctgtaccctaatcagactgatggcggagagctcagcgaatggactctttccgggggtacaggaaatcttttcagcgatgtgactacggaaatcgaaacagtgggcgggcaggattaccttacagtggaattcacggccagcgcatacttccaaaacagcagaacaggtgaaattttagataccgcgccgcacagcagcggaggagaatatcttgatgtgtgcggtacgttcgaccttactgcaaaacaggatggtgaagaggtaggaaaagttgaagttaatatagttccttatgatactttccgcacaatggagcagatatatgaagagcttgatgatatggtaacatatgcggaagaaaatacggatatttatgtagaaaagtattcgatgggtaaatcatccggcgttatatacgaagcgctcgatatgccttatatcattattgcaaaagacagcgaggctgtggaaagctggcttgaatttacgaatgaagctgaagaaaatccggaggaagtgctcgcagatatagagagcggagcatacaacgatattaaggttccggtgatgttttccaatattcactccaatgaggtagcggcggtggacggcattatggaattcgcctggaccatcataaaggcggcagacgatgaaaataacggaaatattccgtatgatacgctgacagcttttacggaagcaggagaaactcagcttgcagccgaaatgggacctgtgggagctgccggcagcactgctgtgcctgatctcgtaaaagaaacggccacatatcttggatttttaaaagcaggaaatagagtttccggcgagattgatctcgaaacatactataatgtagaagagcagataatgaatgtggatgagcttctcgatgatgtattcttcattctcgttccggaagaaaacgtagaaggcagaacatatataacgcgtgcggcgtcaaacggctatgatcttaaccgtgacaattcgttccagacgacgccggagacgcagaatatgcaaaagctcataggaacgtacaatccggtgagccttacagaataccacggcatggtaaagacttttcaggtagaaccttgcgatccgccgcatgagccgaattttgaatacgatctgcttgcggagcatctgatgacaggcggcgaggcgctgggtattgcggcagttgcgaacaacgatcaatacaacagctatacgacgccgcagagagattatctgaaatatacaggaaacacgactggagacggcgaatacgaaactcattgggacagcccgtgggatgatatgtcaacatcgtacacgcctcagtttgcaatgcttcacggtactgtggcatataccgtagagctgccgggctataatgatgccggagctgagcttgtaaagtacggatgtatcggccagtctgattatatagcggaagaaaagcttgaatatcttgaggcgcagatcggtatttttaagcggggagtaaacaacgaaaactcagacgctaaggaactggtaggacagtggttctgcgatcagtacgatgtggaaggtgccgaaatggaacttttcagaccggaatacaagggagagggcgaaaatggaaacttctatcctgagttttacattattccgctcgacgcagcaaatcagaaaaatttaaaggctgcttacgatatgatggaatggctttcgagaaatgatgtgaagataaatatcacagatgcgccttacacttatgacggagtaacttatccggcgggaacgatgattgtttccatgcaccaggctaagcgttctgtcgctaacagcgcgctctatgacggtacgcttataacatcatggacggatctttattctgagggcatcacatcgttcgcacagacgcgcggctttgatatggtaacagtagcaaaggaagcggagtttgatgaagtaatgaaggtgtgcggcggcgatatggattacgatgcatgcgtaagctatatcaattccaaaacctcacagtttacgggcactacgggaagagacgtcataatcaagaacacctcttcagatacagctgcggcagtaaaccaattgcttgcgagcggcgataaagtaggaatggtaaccgatgaagacagcatatattacggcgatttcatctgttcatacaaatcatggcagaaggtaaaagacaaatacatgctgacgggaataggaattgcgggccaaaatgcaagcttcccgacggcaattgtgatagaaaaagctccgagcgtatatattacgggcgcatcgggtgagaacaaaagcggctttatctacgcaggaagagtagcaaatgccaactggaattatgaccgtgtggcaatggaagcgatgaattttaaaacggtgagcgatccggacagtgcggatgtcatcataggggcttcgagccttaacagcagtgcgcttgcagctgttaaaagcggtacgccttacattggatacggaagcagagctaaccaggcaagcggagcgataggattgtttgagtcgggagaggtatcatacagcagctgcgcaagcggcagtatggatacgctgggctttgtgatctatcctgaaacgactcttgtaaacgcaaatcatgtacagtccggagatgaaatgctttacggctacggcgctaaatattattcggcatatcccgacggagcaaaagtgctcgtgaaatttgacggaacaaaagacgcaaccgaaggctttatagttgcaataagtgaagaacagcaagaagccgccgataaatatttcgattccgtgcagggtttttcgtatgagggcgctgataaggacggaaatgaaataaatattgtactgtttgccaacagcctgacgcacaaggcgcatcagacagacgagtattcgtatataagcaactttattttcagcaatatgctcggagatgaggaatatacggctacgccgaagagcagctcatcgagcagcagttcctcgggaaataacgccggcacgcagacagacgatgaaacaggaaatactacaggaagcggagtgacaacagcggaattcgttgatgtaaagacaggaagctggtattacagcgcagtgcagtatgcttctgccaatggtcttatgacaggcataagcgcaaacagcttcggcccgaatatggatacgacaagaggtatgatagttactattctttaccgtcttgaaaatgagcctgctgtaagccaagctgcagtatttgatgatgtaaaggcaaaccagtactatgaaaaagctgttgtatgggcgaatgcaaacggcattgtaaccggctacggcaacggattgttcggaccaaacgatacgatcactcgtgaacagatggcagccatactttacagatacgcatcatataagggttatgacgtatcggcaaaaaatgatcttgctgcattcagcgatgcaggagacataagtaaatatgcggtagacgctatgaagtgggctaatgctgaaggcattattacaggcgttacaagcagcactattgtacctgcgggcagcgcagtgcgcgcacaggcggcttcaatacttatgagattttgtgaaagtgttgaaaattaa

SEQ ID NO: 1019 - DNA, 3474 bp, Unknown
  Unknown gut bacteria
atgaaaaaaagtccggttaatatttccggcatatcggaaagcagggtggctcccgtagctgcttatataaaaaaagaaaaaggcggtcagggtctcataatagtttcttcatatgcaaaagcgaagaggctaaagacagacctttcttttttttatgacggcagtatatatgtgatacctgagcaggatgaggcgcttgtgcgctatgacgccggcagcagagagaatctgtttgaacgtatgaaagcgcttaaggctctctcttcaggcgaggactgcgtagtgatagcaccggtatcggctgtgctcaaaaaagtagcgccgcatagaacgcttactgaaagaaagataaaagcagcagtcggcgatacgcttgagcttttagaacttcgcgaaagactgtcggcgatgggatatgaaaatatgacgcttgtagatgggcgcgggcagtttagcatgcgcggcagcattgtcgatatatttacaccggatgccgattatccttaccggattgagttttttgacgatgaagtggactcgataagaagttttgacatagacacccagcgctccatagagaatttaaaggaagtgacgatttttcccgcctcggaaataataaacgatagagagctttatgccaaggcggcagccaaaatagagaaagaatatactgaagcagcaagaagacttgacaggaacggtacagatgaagcgcgtgcagcggcagcaaggttaagcgagcgcaaaaacgagcttatggaatatatgagcgagggcatatctatgctgcttatggaaaactatattcattatttttacgatgatgcggagtacatttggcaatatctcggtaaagattctgttattatgatagatgatcctgaccgcgtacacgaagcaatggattttagaaatgcggaaatcagggaggattttgccgtccttatggaaaagggctacgccgcacccgaggattttaaaattcatttgacgcgtggcgagtattttagcatatataatcaggacagcgtttacatatttacaccttttaaaaaacagataaaaggaatagacgagtacagtcagattcacagcgtgctttccaaacagacgcctgtatttaacggcagaatggacatctttgagtcagagctcaaatcatatgtaaagcacggctatgaggtgacagttgtatgcagtacggacgagagacttgaaaacctgagcgaattcacggaaagaatagggcttgacggcaagataaagctcgtgcgcggcgagctcacatccggcatagaatttcccgaacataaagtctgctatgtgagagatgaggatatattcggcgggcaaaagaagaaaaagacgagaaagaatgaaagttcgagtgtcgggcaaaaacttacgcatttttcggatctaaaaaacggcgactatgtggtgcacgaaaatcacggcataggaaaattcataggtatagaacagctcgatgtacagggtgtaaaaaaggattatctcaaaataaagtacgcggggcaggatatgctctatgtgcctgtggatcagatggacatagtccaaaaatatataggagacgattccggtgctccgaagatcaacaagctttcgggaagcgaatggaaagcaacaaaagcaaaagctaaggctgcgatagctgaaatggcatacgagcttattgagctttcggcggcaagacaggcagagccgggatatgcgttttcaaaggacagtgtatggcaaagcgagtttgaagaaagctttcagtatgaggaaacagaagatcagctgcgctgcataaatgagataaaaagggatatggaaaggcctgtcgctatggataggctgcttttaggagatgtcggtttcggcaagacagaagtagcggcgcgagcgctgtttaagtgcctggcggacggcaagcagggagctgtgctcgtgccgacgacgcttcttgccaatcagcattactatacgctcaaagagcgctttgaaagatttccgtttacggtggaggtgctttcgcgtttcagaagcagcaagcagcaggacgaaataataaaaaagcttgcagaaggctctgtggatctcgtaataggtacgcacaggctgctttcgaaagatgtaaaatttaaaaatctgggacttcttgtcgtcgatgaagaacagcgctttggcgtacagcataaagaggcgctcaaaatgctcaaaaaaaatgtggatgtactgacgctgtccgcaacgccaataccgcgcacacttcatatgtcgcttacaggcataaaagatatgagcatcatagagcagccgcccgaggaacgctatccggtgcagacatatgtgctggagcaggactatgcgcttattaaagaaattatcgaaagagaactttcgcgcggcggccaagtttatgttgtttttaacagagtacagggtataaataaaatcgcggccgaaataagagatattgtttccgatgccagagtggcagtcggacacgggcagatggatgaacgcgagcttgaaaaagtaatgctggcgttcataaacggagagacaaatgtgctcgttgccaccactatcatagaatctggtatagatataccgaatgtaaatacgataataattttaaatgccgacaagcttggcttgtcacagctctatcagctgcgcggcagggtaggcagaagcagcagaatggcatatgcttatcttatgtatcaaaaagataaagtgcttacagaggtggcggaaaagagactgcgcgcgattaaggagtttacggaattcggcgccggctttaaagttgctatgcgcgatctcgaaataagaggagcggggaatatacttggtacggcgcaatccggacatatgatgagcgtgggttatgagctttactgcaagcttgtagatgatgccgtgcgcgctctcaaaggtgaaattgtcaatccggatgcggaagaagcttcaattgagcttgccgcagctgcctacattcctgatacatatataaacgacgaggtaacaaagcttgcgatgtataagagaatagccggtatcgttacagctgaggaagaggatgaactcacggacgagctcatagacagattcggagatataccgcaagagacggttaatcttatgaaaatatcgcgtataaggtcagcggcggagagcataggtgcgacgcgtgtgcgcgaagaaactattaccgtatcaggaaagccgagcaagagaatagtgctcgattttgctgcgagaaacggacttaaaccggaggcgcttgcagaagctgtatcgttatacggcaagcatatatttatacatggcggagtaaaaccgtttgtgagatacgtacttgccggcggtaggaaagataagctcagcgagacacttgagcttcttgaaactttgcattataaaaatgaaaatttgaaagttgacaagatgtga

SEQ ID NO: 1020 - DNA, 2472 bp, Unknown
  Unknown gut bacteria
atgaacgagagatatgattttaaggaaatagagcttaagtggcagaaatattgggaagacaacaagtcattcaaggtttatgaagataagagcaaggataagtattatgtactcgaaatgtttccttatccgtcgggcaagcttcatatgggacatgtaagaaactattcgataggcgatgtcgtagcgagattcaagcatatgaacgggtttaatgtgctgcatccgatgggctacgacagctttgggctgcctgcagaaaacgcggccataaaaaatggtgtagagcctgcgaagtggacattttctaatattgcagaaatgacggaccagctcaagcgcctcggcctttcatacgactgggacagagaagttgagacatgcacgcctgagtattatagatggatgcagtggattttcattcagttttacaagaaagggcttgcctttaagaaagaaaatccggtaaactggtgcccaagctgcaaaacagtgctggcaaacgagcaggtagttggcggctgctgcgaacgctgcggaagcgttgtcggcaagaagaatttgtctcagtggtacctcaagataactgattatgcggaaagactgctcgataatcttgaaaagctcgaaggctggccgcagaaggttaagacgatgcagaaaaactggatcggaaaatctgtcggtgctgaagtaaactttgaaatcaagggctttgacaagcctctccaaatatttacgacaagacctgatacgctctacggtgttacttatatggtaatgtcgccggagcatccgtttatagacgagctcgtttccggtactgaatatgagcctgccgtaagagaatatcaggacaaggttcaaaagatgaccgatatagaaagaacgtctacggcaaatgaaaaaacaggcgtatttatcggcagatatgcggtaaatccgctcaacggaaaagaagtacctatctatatttcagattatgtacttatggattacggtacgggcgctattatggccgtacctgcacacgatgaacgcgactttgatttcgcgaaaaaatttgacctcgaaatcatcccggtagtacagccggatgatcctgagatagatataaacaatctcaaaagcgcttttgttgccgaaggaaagatgataaattccgcaatgtttacaggaatggacaataagcaggcaatcgagaagattatcgattatcttgaggaaaaaggcatcggcaagaaggcaataaactacaagctcagagactggcttatttcaagacagagataccggggaacgcctatacctatgatttactgcgagcactgcggctgggtgcctgaaaaggaagaaaacctgcctgttttgcttccgacagatgtggaatttacaggcaagggtgaatcgcccattgctacaagcaagacatttgtcgatacggtatgcccggtatgcggcaagcctgcaaaacgcgaagtagatacgatggatacattcctcgactcttcatggtatttcctgcgatactgcgatgcgagaaacgataaggcggcgttcgacccggaaaaggcaaggtactggatgaatgtggaccagtatataggtggagtggaacacgctatactccacctgatgtacgcgcgtttcttccagatggtattttacgacctcggccttactgataaggaagagccgtttgaaaacctgctcactcagggtatggtaataaaagacggcaagaagatgagcaagtccatcggcaatgtggtatcacctgaggaaataataggaagatacggagcagatacggcaaggctcttcatactctttgcggcgccgcctgacagggaactcgactggtcggatgcgggtgttgagggctcgtacagatttttgaacagagtgtatagactcatatttgagcttgcggagaagtgtaaagacgctccgaagaattacgaaataagcggtaaggacgacaagtcgctcgcatatgaaatgaatgcttcagtaaagaaggttacggaagacgcgggcggacgctttatgttcaatacggctatttcctcgataatggagcttgtaaacgaaatgtacagatataaggagataagcaatgtaaatacgggacttcttgcggatgcagcagaaaagcttgtgctcatactctctccgtttgcaccgcatatttgtgaagaaatgtggcaacatctcggacatgaaaagtctatatacgacgaagcttggccgtcatatgacgagtctaagatagtaaaagacgaagttgaaatagttgtacagattaatggcaagattaaggaaaaacttaacgtacaggcaaaccttgacaaagcgacttttgagaaaactgtaatggaggacgacagagtaaaagctctgcttgacggtgtaagcgtgataaaagtcatagcggtgcctgataaacttctcaatgtcgtcgtaaaatag

SEQ ID NO: 1021 - DNA, 2223 bp, Unknown
  Unknown gut bacteria
gcgagagttacggcaaagattgccgtaggtatggcgcttgaggacatcgctattgccaataccaacgcggcatttgaaccgagcctcgactatgtagttgccaagttcccgcgttttccgtttgacaagtttgcacaggcgacaaataaactcggtacgcagatgaaggctacgggggaggttatgggaataggctcaaccctcgaagaatgtatgctcaaatcggtgcgttcgctcgaaataggagtaaatcatctctatatgccgaaatttgaaaatatgtcaaatgaggaaatgcttgcatacataagcgatttcagagacgatacaatttatgcggcggcgcagcttctgagaaacggtgtgagtgtggataagatttatgaggtaacgatgattaccccgtatttcatcgagtcaatcaagaagattgtcgattttgaagaggtagtaaaagctcataaaggtgacagcgccgtgcttaaggatgcgaaaactatgggattcagcgacgcgtttatcgctaagctctggggtgtaaccgagcttgaggtgtttgagatgagaaagcgcgataatttattccctgtatataaaatggtagatacctgccatacaggcgcatacattccgtatttttattcgacttacggcaaagaaaacaattcaattttgtctgataagaaaaagatcatcgtgctcggcgcaggaccgataagaatagggcagggcgtagaatttgactactccacggtgcacgcagtgacgacgataaagaattcgggctacgaagctattatcataaacaataatccggagacagtttcaaccgattacacgacagctgataaactttactttgagccgctgacgacagaggatgtaatgaatattattgaatttgagaagccggacggcgttatagcttcgctcggcggacagacggcgataaatcttgctgagccgctgatgaagcgcggtgtaaaaattatcggcacggattgtgaggcgatagagcgcgcggaaaacagagatgcgtttgaaaaggtgcttaaggagctcggaattccgcagccgcagggcagagctgtaaccaagatagaggatggcgtaactgctgctgctgagataggatatccggtgctcgtaaggccgagcttcgtactcggaggacgggcaatgcagattgtcggcaatgaaacacagcttcgtcactatttaaagacggcagttgaaatcgacgaggacaagccggtgctcgtagataagtatatttctggtaaagaggtggaagtggacgccatttgcgatggaataaatgtgtttgtaccgggaattatggagcttgtagagcgcacgggcattcacagcggcgattcgataagcgtttatccgccgttcagcatttcggataaggtaaagggcattatactccagtacgccaagaaactgggactcggactcggaattatcgggctttacaacatccagtttatagtggataagaatgagaacgtatatatcatagaagtaaatccgcgttcgtcgcgaacagtgccgttcctcagcaaggcgacaggttacagccttgcggatatcgcaacagaggttattctcggcagaaatctgaaagagcagggaatattcgatatttatcctgatgaaaaagagcgctggtatgtaaaggtaccggtattctcgttcaataagatcagaggcctcgacgcatatctttcgcctgagatgaaatcgacgggagagacgataggctacgatgataagcgcgagcgcgctatgtataaggcgctgcaggcttcgggaatgaaactgcaaaactatggtacggtgtttgtgaccattgcagatgacgacaaggaagaggctctgccgcttatcagaaggttttataatctcggatttaatatcgaggcgacagatggtactggcaagttcctcaaggaaaacggcatccgtacgcatgtgctggcgaagataagtgacggcagcgaggaaataccgcaggcgatacgtcaggggcacattgcgtatatcataaatacgagcagcatcggcagctcggataatactaagaacgatgggcacgagataagaaagctcgctactgagaacaatgtcaatatatttacagctctcgatacagtagcggcgctgctcgatgtgcttgaagagacgacactttgcatttcgacgatagatgcgtaa

SEQ ID NO: 1022 - DNA, 2292 bp, Unknown
  Unknown gut bacteria
atgataattatgcttgtacaggtgctcatcggaagcatgatgatggtgtcgcagcatagcaattcagtatctctggaagcctacgatctatttgaaaataaaagctatatagagagtgaagagcttaggtacaatatgcatcggcagacagaaaatatttttgagctgtttgtaaattacagaagcgaagaggatatactcgcgggacacagtatcgcaaacgaagaaatgaacgagtacatcgaggaactatataacagtggctgggtgtattttaacagcggggagataaccgcaaattatgaatatgatgcctatgagccctacgcagaatttacaggcgatgtacgcaaagcgtttatagatgccaatgcggataatatcgaggaaataaagcaggccttgatagaaagagatctcgaatatttccgcagaaatataaaaaggctcgaggaaatagaaggcctgatgtactttatttctgacggtaaagagtctataacaaacgtacagggcggaaatttaagtgcggatgatttcaaaaaataccaggcatacacagtgtatgaaaacgggatatttgaaagcgagcctaacaatgcttatgcaggcaattatgaaaactattatcacagcgaggaattgatagacgattattacggaggcggcggcgatgatttagtattatgtatcgcttatacagactcttatattgcggctatgaatgaggaatatacgcgtgccagagcggcggtaacggaatggcttcctatggtgctttcgtcgcttgtctgtgctgttgtcgcaatcctgtggcttatgattactacaggaggaaaaaatcctgacggcacaagaaaactgtatgcgatagataagctctggacagaagtgcagcttgcaatttttgggtgcgcgtttgcgggcgcagcagcaagctattttgaagcggttagctattcgtattcatatgcgtatatgcgctacagcggcgtttcggattatgtcggaaaagatatgatttcttcattcggcagcattgcgctgatcgcagcctttgcggcgtgcctggcagttgccgcttggtatatgctctcgtttataagacttttaaagtccggcgtattcattaaaaattcgctcgtatataaaatatgcaggtttctctggaagcctatatcaaatgcagtgagcaatgtgataaacggcggcagcactatgcgcaaagcagtgatacttacagtgctcgtatgcctgctttcggcgacagtattcctcgtgcctgttgtgctctgtctgctgctcgtatttgtaccaaagtggataaagcgttttgaagaggtacaaaagggtgtggatgaggtcaaaagcggcaatctgacatataaaataccgattgatccggataagccgacagatgagctttcgagactggcaaagggtataaacgaaatatcggaggcctcaaatgttgcggtgcagaatgagcttaaaaatcaaagaatgaaaacagagcttatttcaaatgtttcgcacgatctcaaaactccgcttacttcgatggtatcgtatatagatctgctgaaaaaagaagggcttgacagtccgaatgcaccgggatatcttgatatactcgatcaaaagaccgagcgtctgcgcaagctgacggaagatctgtttgaagcggcaaaagcgtcaagcggtgcaatgcctgtgaatatcgaaacggtggatctgctctcgctcataaatcagagtatgggagagatgagcgcgcgcatacaagcttcatcgctcgactttatactaaatgccgaaaaggataagtactatgtcagagccgacggacagctcttatacagagtggtggaaaacttgctcgtaaatgtgctcaagtacgcacaggacggaagccgcgtgtatatagatataaaggaaccgttggccggcatcggtaaaggagcgcttgatatgggtcaggacgcgtttggcagtgcaggtgataatagcggagcctacggtgtgagatcatccgcaagaaaagatattgtagtgcttgagataaagaatatatcaaaacagcagctcaatataaatgctgatgagcttatggagagatttaagcgcggtgatgattcgagaacgacagaaggaagcggactcggtcttgctatcgctaaagaccttgtaaagcttatggatggctggtttgaaatagcaatagacggcgacctgttcaaggtacgcgtagtgctcgacaaagcaccggcgccggtaaagcaggatgaatag

SEQ ID NO: 1023 - DNA, 2343 bp, Unknown
  Unknown gut bacteria
atgaatatatcggaaaaactcgcaagcgagtttcaaattaaaatatcgcaggtagaaaacacagtagcgctcatagatgaaggcaataccataccatttattgcgcgctacaggaaggaagcgaccggcggactttcggatgtaacgctgcgcgatatggaagaacgccttgcatatctcagaaatcttgaagagagaaaagaagaggtaaaaaggctcatagatgaacagggcaaactgacagaggaactcaaagctgaaatcgaaaaggcagaggtgcttcagagagtagaagacctgtacaagccgtataagcagaaaaaggcgaccagggcatcaaaggcgagggaaaaaggacttgaaccgctggcgcttgcgtttcttgcgcagagcgaaagagcggcaagcaaagaagcggcagctgttatctccgctttagctgcgccgtatataacggctgcggatgcgaatatcgaagatgcaaagcgagttgcagatgaaaatgaagctgtgaagggagcctgcgatataattgcagaaatgatatcagacgacgccgaaatgacggctctcgtgcgcgaaaaaacggtttcagcgggtgttatcgttacggaagccgttgatcccgaagaacagacggtatacgaaatgtactacgagtataaagagggtatctccaagataccaaatcatcgcgtactggccataaacagaggtgaaaaggaaaaaaagcttagagtaaagttaagtgcgcctgcagaagatataatagcggcagtcgccgagaacgttatcaccgatgaaaaagccgcagtatacagtcttttgatggaaaccattgccgatgcatacaagagacttatggcgccggctgttgaaagagaaatgagaaatatgctcaccgaaagagccgaagccgaagcggtaaaagtgtttgcgaagaacacagagaagctacttatggcgccgcctgtcagcggcgcccgtattatagctatcgatcctggatacaggacgggctgcaaggtagcggtgcttggcgaaacaggaaaacttatggcgtatactacgatttatccgacagagccaaaatgcgatatcacgggcacggaagcggtgctcaagaaactcatcgagaaattcaatatcaatacaatcgtcattggcaacggtactgcaagccgcgagacggaagaggtcgtggcaaacttcctggccaaaaatgattacgatgtaaaatatactattgtaaatgaagcgggagcttcagtatactccgcgtcaaagctcgcgaccgaagaatatccggatcttgatgtgacgacgagaggcgcaatgtcgcttggaagaaggcttcaggatccgctggcggaacttgtaaagatttcgccgaagcacatcggagtcggtcaataccagcacgatataaatcagacactgctcgaaacagcgctgacaaatgtagttgaaaactgtgtaaacagagtgggagtagatcttaataccgcttcgccgtcgttgctttcgtatatagcaggcgtgaatatgacgatagcgaaaaatatagttgcttaccgcgaggaaaacggcagttttacggagagaaggcagcttttaaaggtggctaagcttggtgaaaagacatacaatcagtgtgctggatttatgagaataaacggcggcaaaaatccgcttgacgcgacagcggtacatccggagtcgtacaatgctgcagagcagatgctcgaaaagcttggcatagacaaggccgctattgcgggcggcggcgtgcgcgatatagaggaacgaatatgcgaagtatataaaacggaagataaaaagagctttgaaaagcctgatattgcgacgcgcggcaaaggccttgcggcgcttgcggaactttcccaggaaatgaaaaggcaggaaaaggaggcttctggcgcgcctcataaaaatttcacaaaggctgtggctaaaatggctgaggatatcggcataggtgaaatgaccctgcgcgatatcgtagaggagattaaaaaacccgcgcgtgacccgagagaggatgcgccgcctgtagtattccgaaacgatgtaaaacactttgaggatctcaagcctgatatggaaatgaccggtacggtaagaaacgtagtcgatttcggcgcctttgtcgatattggtgtgaaaaatgacggacttgtccacatttccgagctttcagacaggtatgtaaagcatccgctggatgttgtttctgtgggtgataccgtaaaggtgaagatattgtccgtagattacgataagcagaaggttgcattaactatgaagggagtgagaaattga

SEQ ID NO: 1024 - DNA, 2277 bp, Unknown
  Unknown gut bacteria
cacggcgacagctctatttacgacgctatggtaagactggcacagccgttttccacaagatatatgctcgtggacgggcacggtaacttcggatctgtggacggagacggcgcagccgctatgcgttatacggaagcgcgtatgacgccgttcgctttacaaatgctgcgcgatatagataaagaaacggtagattttgtaccgaattttgatgaagaagaaaaagagccgaccgtgcttccggcgagaattccaaacctgcttgtgaacggcagcaatggtattgccgtaggtatggctacgtccataccgccgcataatctttgtgaagtcatcgacggcgcagttaaaatgatagatgacgaaaactgcacagtggacgatcttatgcagataataaaaggtccggattttccaacaggcgcagttatcacaggcaaaagcggtatcagagaagcttacagaacaggacagggcaaggtaattgtacgcgctgttgccgaaatagaagagacaaacagaggcagacatcagataatcgtcagcgaaataccttatcaggtaaataaggcgaggatgatagaaaaaatggccgaaatggtcaaggacaagagaattgaaggtatttctgaaatcagagacgagtccaaccgtcacggtacgagggttgtaatcgaactcaaaaaagatgtaaatccgcagattaccttaaacagactttacaagcatacacagatgcaggaaagcatctcaatgattatgcttgcgctcgtagacggtcagccgagaattctcaatctctacgatattttaagcgaatatctcaagcatcagaaggatgtagtaacgagaagaacaatatatgataagaaaaaagcggaggcgagagcccatatactcgaaggttacctcattgcgcttgacaatatcgacgaaataataaagataatcagatccagctataacgacgccaaggaaaagctgatagagcgcttcggactttcggatattcaggcacaggccattctcgacatgcagcttcgtcgtttacagggattggaaagagaaaagatcgaaaacgaatacaaagagctcgaagagaaaatcgcttattatgcgagcctgcttgcggacgagcatcttcttatgggagtaatcaaggacgagcttcttgaaatcaaggaaaaatacggcgacgaaagaagaacgaagattgtggctgacgcaaccgaattggacgaagccgatctcatagaggaagaacaggtatgcattactcttacacatctcggatacataaagagagtgtcagctgatacatacaagacgcaaaagagaggcggcaagggcattacagggcttactatgcgtgaaaacgactttgtgaaaaacctcataatgacctcaacacacgattatctcgtattctttacgaacacgggaaaagcgcacagaattaaggcttacgaaataccggaggcgcagaggacagcaaaaggaacaccggcgatcaacttcctgaatcttatgccgcgtgagcgaattacagcggttattacgacaaaaggctcaggagctgaagaaagtgaaaagtattttatagcggttacaaagcgaggcacgattaagaaaacggcgctttcagaatttaataccaatagaaaaacaggtcttatagctataagcctcaaggatggagacgagcttgtaagcgtaaaggaaacatccggcagcgataatgttcttataatcactaagaacggcaagtgcatctgcttctcggagaatgatgtaagacctatgggaagaaacgcaggcggcgtaagagctataagcctcgaagatgacgatcaggtagttgcaatggagcttgtgcagcctgaacaagagctgctcgtggtaacacagaagggctttggcaagagaacaaaggtagaagagtataagctgcagacaagaggcggcaaaggacttcttacctacgacaaaagcaagtttaaaaagacaggcgagctcataggcgctatggtagtatcggacgatgatgaagttctgatgataaattcagacggaattatcatcagaataaaggcaagcgatgtctcaagacttggacgcgctacgcagggagtgcgtattatgagagttgcagatgacgccaacatcgtaagtatagcaagagtaataaaagaagacgaagacgatacagaagaagacagcgcaagcgccgcagaaaaagaagacggaaactcgcaagtagagattgttctcgaatag

SEQ ID NO: 1025 - DNA, 2226 bp, Unknown
  Unknown gut bacteria
gagctcaacaaaaagtcgcatttcgtgacctgcgcggattatgtaacgacaggagacggtacaggtatagtacacaccgcgcctgttttcggtgaggacgattatcagacggggagaaggtatggacttccgtatttccagcctgttgatgagagaggctgctactcggaaggaccgtgggaaggccgctttgtaatggatgacgaccttgccgttgatattgtaaagtaccttgctgcggaaaacaagcttttttctaaggaaaatatagttcataactatccgttctgctggagatgcggcacgccgctcatatactattcgaagccgagctggtatatagagatgagcaagctcaaggacgagcttgtggcaaacaacaatacggtaaactggtatcctgattttgtcggcgaaaagcgtttcggcaactggattgccgatgtaaaggactgggcaatttcaagatcgagatactggggtacgcctattcctatctggcgctgcgagtgcgggcatctcgagagcgtaggctcgagggcagagcttgttgaaaaagctatagataatatagatgaaagcattgagcttcatagaccgtatgtggatgatgttcatctgacttgtcccgaatgcggcaagcctatgagccgaattccggatgttatggactgctggtttgactcgggcgcgatgccgtttgcacagcatcactatccgtttgaaaatgcggacagatttgacgaggaacttttcccggcagactttatctgcgagggtattgatcagacgagaggctggttttattcgctgatggcgatttcgacgcttattaagggcagagcgccgtacaagaatgtactcgtaaacgatcttattctcgataaggacggcaagaaaatgagcaagtcgagaggaaacacggtagacccgtttaagctttttgaaaagtacggagccgatgcgacgagatggtatctgctgtcagtatcgccggcttggacgccgacgaagtttgacgaggatgggctcatagatgtagtgagcaagttctttggtacgctcaggaatgtgtataacttctttgttctctattcaaatcaagatgaggtggatgtcgataaagtatttgtcgattatgacaagaggcctgagctcgacagatggattctctcaaaatataacgggcttattgccgatgtgacttattcatttgaacattacgatcatatgagagttgtgagagctattacggattttgtgacggaagacctttcaaactggtatattcgccgcgcaagaaggagattctatgcgcccgatatgacggaagataagaagagcgtatacgctacgacttacgaagttctcgtaggcgttgcaaagctcatagctcctatcgctccgttcatatccgatgaaatgtacacgaaacttacgggagaagaatccgtgcacctcgcatacttcccgaaagcgaaggaagagcttataaacaagagcgttgaagagagaatggatcttgtgcgcgatctcgtggcgctcggacgcggtacgcgtgaaaaggaaagaatcaaggtaagacagccgctttcagaaatacttgtggacggcaagtacgagagtctcatttccgacctcacaccgctgattatggaagagctgaatgtaaagcaggtggtatttgaaaacgacctcgatgaatatatgaactttacgctcaagcctaatttcaaagtggcgggtccggtgctcggatctaagatcaaggcgtttggcgctgctgtttcatcagttgacgccaaagagcttgttgcaagccttgaaaacgcagagtccgtgaagatgaatgttgatggcgaagagtttgatattacaaaagattttatcgacgtaagaattgacgctaaagaaggatttgctgtggcaatggaaaataatctctttacgatactcgatactacgctcacagaagagcttgtaaaagaaggactggcaagagagttaatttctaaggtgcagcagctccgcaagcaacacgactttgagatgatggataacatcaacatttatattgatgccgacgacgaagtaaaggcggcggtttccgaatacaaggattatataatgaaagagacgctggcgctcgtaatagaagagaagggcggacttgaagagtataaccttaacggacataaaacgggcatagatgttgagcgtctttaa

SEQ ID NO: 1026 - DNA, 3333 bp, Unknown
  Unknown gut bacteria
atgctgctcggtccggttattccggcttcagcttcagaggtgccggaagtgtacggcgatgttgccgatattattgccgaatatgacggtgacgatatcgttacaacagatgtgcttgatgaactttacgcactgatcggcgatgcctatgaagcagacagagaaaccgtatcgggaggtgcagcggaaagtgaaacggagcctgaacaggtaaatgcggcgactgatcccgctgctgatttcagtacagcaggtgcaggccctgaggaacttaatgttccgagcggagctgctgttgtaattgacgcagcaggtggcggaagcggtggaaacgagccgacaaatgcagagaatcctgtagaacagacaaaccctgtaaatcctgaaaatctgccagtatctgaagagccgggagaagaagaaactcctgctcctgtacccgcagctgcgacacagcaggaaaatgtaatatttgtgcttcgttttgcgggtatgaatgacagccagctttcggcagtcagtcaggaagaaaattcggagcagtttgcatatgactgtgagcagcttgcggaaagtatcaatctgtttaaagggattgagtataatcagacagaagcgtgtacatttgcacagcttacagcaatgttaagcaatgttcagccgctttatgatgcgctgcatgctgacaagcttcagccgcttttcataaacggaatggcacagcctatattcccgtacacgagcggaatggttgaatcagatgacgatcacaatcttacgggcacttacaataatgccgacagtgatatcattcgtttcttcgtatatgtagagacaaattatgatactgacggtgacggtgcgcttgaccttgtaaagacgcttgttcagcttccgcgtgcggcaatggaaggagattacaaggcggcttccatatttgaagcccgtccgtatattacgggatgcacggacggcagaactccaaatgtagaaggagcttcatatgatatagaaaagatgtacagtcagccggatgcccgcatgccagagggcgaaacgactacggcagaacatgcgcaggacgcagatataaatgagtggtattattggaacccttatgaacgcatgtttgattatgaggatttggattggtatgactactatctttcacgcggatttgcggtagtagagagcggcggtctcggaactcacggttctgacggatttgaaacctgtggtacagaccttgaaatagacgccttcaagtgtgttatcgaatggctccacggagatagggtagcttatacagataaaacaaataacattactattgatgcagattggtcaaacggcaaagtcggcatgacaggccgttcatatgccggtactacccagttcggacttgcgactacgggagttgccggacttgagacaatcgttcctgttgccggtatagcaagctggtacgagtatacaaattcgcagggaacggcaacgggcggtgtttcgtattcggattatcttgcatattattgcaacggacgtcttttagacgaagattacgagactgcaattaaagaaaaatatgaagcttacttgactcagataagcagtgatcagactgctctcaacggcgactatgccaatgcagagctcggtctcaatcattggcagatccgcgactatactgttgagcctttgatggacgactggacgggaatacatattccggcgcttatcgttcacggacttaacgatacaaatgtaaggacaaagcagtttgacctcatgtacaagtcgtttgataaggcgggacagaatgtaaaacttctgcttcaccagggaacacaccttactccgacttatccgggcggaagatatgagattaagattgacggtgagtactatgatacaatcctcaacaagtggttcagccactatttgtacggcgtaaacaacggcatcgaaagaatggcaaatgtgactgtacagagcaatgttgacggaagctgggatacatacagcagctggaagacagcttcaaagcagatatttaatgcttcggatgtagcagagagtgcaacatcgcagattataggtgcagtaacaacaggctcgggatggagacctaccatcgtggaacctgctgttaacggaagttatacttttgagattcctgaagatgtaatcattcagggagcggtagctgtacatatccgtgcagcggcgactgcaacgggagagactccgctcagcgatatggatcgtgttactatgacggtagagcttactgataaaaacgatgaaagctttgatgcttttgttccgagcaggagttatcttcctatcacgacattgaaagaaaaaggtgcctggatgggcggtggagttgcaaattacgacttggtagaatatgcgcagactccggcaacttcaaagagtataggtcttggatatatcgatgtattcaatccgacagcaggatatgattcggcttctgcttctttacgtacagaacttgccgacggacagtattatgattatacagtatatattcagcctactgtgtatactttaaaagcaggtcatacggcagaggtaacaattagtctttctaataacagcggcgtagcgcttactgttgacaacagcgcgacatatgttgatatacctgttcacagcacaagttcaaatggaggcggtcattcgggcggttcatcaggcggaaatgcagcggacactcagccgccggctgacaatactacaggttcggctgtacagacaggaagcttcagcgatgttaatacaggaaactggtattacagcgcagttgagtatgttgctaaaaagggtattatgacaggcataagcgcaagcagtttcggaccgaatcttgatactacgcgcggtatgattgttactattctttacagactggaaaatcagccgacgggcacagaagcggcggctttcagcgatgtaagagccggtcagtattatgcagatgcaatcgcgtgggctaatgcaaacggtattgtaacaggctacggcaacggactcttcggaccgaacgacgcgattactcgtgagcagatggtggctattctttacaggtacgcacagtacaaggaatatgatgtatcggcttcggctgagcttacagctttcagcgatgcggcaagcgtaagcggatacgcagttgatgctatgaaatgggcaaatgcggcaggacttattaacggagttacaagcagcaagctcgcacctggaaacagtgcggcaagagcacaggtggcttcgatacttatgagattctgtgagaatattaaataa

SEQ ID NO: 1027 - DNA, 2286 bp, Unknown
  Unknown gut bacteria
atggacatattcacgggcgtaagctacagcgagataatttccgggcacagcactaatggattgcagcatgctcattatgtggaagccgatatagagagcggcagcataaagccgattgtatttaacggtgaagtaaggggtacttacagcatagaagatatgataaaatacgcaggtgagcagggatataaggtaatcgccgccattaatggggatatatatgatatgtcgtcgggtactcccaagggccttgtaatacacagcggaaatatcgtgacatcgggatacgcgcctgacagggtgattgcgttttataacgacggaagcgctgaacttgtaccggctaagctttcttataaagtgaagggtacgattgcctatgatcagcaggtaccagtttcgcctgaagaaggtacagatcaggcagcaggaacagacggtacgtctggtacagatgtcttggtacagaacgagaccgtgcattacgaagaagagtggaacggcactgtagattttttcaatgtgcctcatggagcggcaaatggtctgcatttatataacaggcattattcgtcgagcacgaaaacatcgggtacatgtgcggaagtcgtaatcgaatgcgatgatattcaattaaaagtaaacgatactattaaggggacggttaaacaggtgaatacagcgacaaacaatacccctataaccgataataccgtagtgctgtcaacggtctacggctctgcgacatataattatctctcagcgcttaaagtcggcagtgaaatcgaaatttctgtagaagatgtcggcggtgcagatcttgagaacgcagatgagtgcataggaatatattattctctggtggagaacggccgcaatgtaacatcaggaacggcagcgaatccaagaacagctcttggcataaaagaggatggaagcataatgctttttgagcttgacggcagacaagcttcggtatctaaagggcttgggctctatgatcttgccgatgctatgatagaactcggatgtgagacggcggtaaacctcgatggcggcggcagcagcgtaatttatgtgcggcagccgggtaaagatgcagatgcggtaatacagtcctctccgtcatcaggaagcgagcgaaaagtagccaacggaatacttctcgtatataaggaaaatgcgggcagcagcgttgagcacctcaatgtatatccggagcttacacttgcaatgccgggggcaaaggtgcagttaaacacatatgcatcaaatgaactttatgaaaaaacgagcctcagcggcagcgtgaaatacagcgtagaggattctgcttacggtgctgtagatgaaagcggtatattcactgcgggaagcaagacggggagagcagtaattgaagcaaagtcgggaaatagcaccggatatacggaagttgaaattgtggacgatattataatagtaccgtccgtgactaagcttacaatagaatcaggtgagacgcgcgatataaatgttacggcctgtgttggcgcttacggcgcatcggtgccagtaaattccagcgacgacctcttcacattcagatgcgatgaaaatataggaacgatagatgagcttggtgtgtttactgctactacggcatctgcggtgtcgcagagcggaaatatatatgttgaatataataataacagcatagagatacctgtgcaggtaggggcttatatagtggaatttacggatacgacaaatcactgggccaagacttatataggaactctcgcgggaatgaatattctcgatggaatgggcgataatacattcgcaccggatggctcgcttacgagagcacagtttgtggctatgctcgccaagatgacagacggaatagatataacagcagcggcttcggcgggatttacagatgttaatgaaaaagactggtacttcggttatgtgaactggggatacgaaaatggcatagtaaacggaatgggcgacgggacattcagtccaaatgctagcattacgagagagcagatggcagtaatgctctgcaattatgcacgctcggtgggatttgcacttccgcagacagtatcaggagtatctttcagtgatgcgtcatctataagctcgtgggcggccgattatgttgccacggcggctggcgcaggcataataaacggatttgacacgggcgatttcaggccgcagggcgtggcaacgagagcacaggcggcgactgttatctacaagatgtgtgagatacgcggtatgctttaa

SEQ ID NO: 1028 - DNA, 2760 bp, Unknown
  Unknown gut bacteria
atgggaaaaaacggaaacggaagaatagtaatcatagatggcaacagcttgataaacagggcgtattatgctatgcagcgtcctatgatgacaaaaggaggactgtacacacacggcgtgtacggttttcttaatatgctgacaaaaatatttaaggactatgagcctgagtatattgccgtgacatttgacagaaaagcgccgactttcaggcatcttgaatacgacgcgtataaggcgggcagaaagaaaatgccgccggagcttgccatgcagcttccgctgcttaaggaagtattgtccgcaatgaagataaagatgctcgaaattgacggctttgaagcggatgatataataggcactgtggcgcagtgtgcggagagagaaggacttgagccgtatattataacgggagacaaggacgaactgcagctcgccagcgatattacaaaggtaataataacaagaaaaggcatttccgattttgaaatatatgacagacaagcgatgatagaaaagtatggatttacaccgcagcagtttatcgatttcaaaggccttatgggcgaccagtcagataatattcccggcattccgggagtaggtgaaaagacagcgtccaaactcataatagagtacggcagcgtagaaaatctgatagcaaatttggatacgatgcctgcgggtaaattaaaagataaaatcgaagaaaatatgcagcttgccgtaatgagtaagcgtctggctacgattaatacaaatgtaccgatagaaattgattttgacgaatttaaagtagaggagccggactatgatgcgcttatagaaatatacaaaaaacttgaattcaacagttttttaaaaagattaaaatacagcggcgataatatgcagggcataggtgcaatacagatgcaaggcgctgcttttcaagcgcgggacggcaaactcgaaaacagtgaaacggaagagattattgtcacagatgaaaaaacgctcggagcacttttagaagatataaagcgtgaagaaaaaattattattaaggtactttctgataataatcatacggggctgcctcatatatacggtatgggaattctgctgaaagataaattttattatatagacggcgcgagaaaagaacttattggaagcgcagtctcgttttttatcagccttaaaggcgaaaagaaacctcaaatatcaggacacgacctcaaaagagattattatgctttgatttctttattcggagactcatttgaaaatgcgggggaaagctttttttatacggcttttgataccgcggtggcagcatatctgcttgaaccttcgcgaagctcttacagcattaaagtgctggcatcagagtattttcacgaagatatggaggaagaggagcaattcatttccgaaaattcacagataggctttttcagcagcgatagcgataaattctgcaaatactgtttgaaacattgcagaatcgcaggtgcgctcgctgacatatttaaggaaaaaattgcggaagaaagcttggaagatgtgctttataaaatagaactgcctttgacagagatacttgcgtatatggaagtgcagggctttaaggtggacaaagacgagctttatgcgataggaagcgaaatttcagcgagtatagagaaaatttcagatagaatatatgagcttgccggtgaaaattttaacataaactcaccgcagcagctcggaattatattgtttgaaaagctcggacttccggcgggcaaaaaaacgaagaaaggctactcgacaaacgcggagatacttgaaaagctgcgcgataagcatccgataatagagtttatacttgagtaccgcatgctttcaaagctaaggagcacatatattgacgggcttatcccacttataggcaaagacggcaagatacatgcgcattttcagcagaccgtcacagctacgggcagaataagctgcactgaacctaatttgcagaatattcccataagacaggagctcggaagaacgctgagaaaagcgtttacaccggaaaaaagcgaagattttctcataggtgcggactattcacagatagagctgcgtgtgcttgcgcatatgtcgggagataagcatctcataagcgcatttaacgccggggaggatattcacaggagcacggcagcaaaggtgtttgatgtaccgcaggatgaggtgacgcctcaagagcgaagtgccgcaaaggcagtgaattttggggtaatatacggtatgagcagctttggactttcttcggaaataaatgtttcgagaaaagaggcggaacgctatataggcgaatatttcaggcgttttccggatgtaaaggaatttatggatagacaagttgcggaatgccgcagaaaaggctatctcgaaacgataatgggcagaagaagatatattccggaaataagcgcctcatcatatatggtgagacagctcggcgagcgtctggcgatgaacagtcctatacagggaagtgcggccgatataataaagctggcgatgatagctgtgtacaggaaactcagaagcgaaaagctctcatcaaaacttatactccaggtgcatgatgagttaatagtggaaacggcggcggaggagaaagaagcagttatatcgcttctcacagagtgtatggaaaatgtaatggaaatgagtgtaaagctgtctgttggcgtaagctcgggccgaaactggtatgaacttaaatag

SEQ ID NO: 1029 - DNA, 1860 bp, Unknown
  Unknown gut bacteria
atggatattaaatacgaattggacaagctgctcaagcttgtggaaaaaccggccagatacataggccgcgaaatgggtgaaatagtgaaagataaagaaacggtcgattgccgtttctgttttgcgttccctgacacatatgaaataggaatgtcatatatgggacttcaaattttgtattatgtcgtaaacaaggaggaaaacttaagctgtgaacgcatcttcgcgccggggctcgatatggaagagctgatgcgcgcgcgaaatatacctcttttcacactcgaaacaaagacgcctatagccgaaatggatatgataggttttacgcttcaatacgagatgtcgtttaccaacattttaaatatgctcgatctcggaggcattccgctgcttgcatcggagcgcagcgatgatatgccgctcatatgtgctggcggaccatgcgcatgtaatccagagcctcttgccgatttcattgatttctttatgataggagacggtgaagaactgctcccagaaatgataaaacgctggggcgaatttaagaaaacgggtgggagcaaggaagattttctaaaatcaatatgcggtatcacgggtatctatgtaccgaaattttacgaacctgtgtataatgaggacggcactgtaaaagaaataaaaaaactttacagtgacgcaccggacactgtaaaaagatgtatcatcgacgatatcgatcatgcattttttccaaaagaaatactcgtaccgctgatcgaaaccgtacatgacagagcagttgtcgaaactatgcgcggctgtacccgcggatgcagattctgtcaggcaggtatgatataccgtcctatacgtgaaagaagtgcagagactgctgaagatatcgctctcagtcagcttgcttactcaggaaacgatgaactttcactgctttcactttcgacgagcgattattccgaattcaaaccgctcatactgagactaatagataaatgcagagaagaaaatttctcgatttcgctgccttcgctcagacttgataatttttcatttactgtgcttgaagagctgcaggaaggtcgtagatcgggacttacattcgcacccgaagcgggaacgcagagactgcgtgatgtgataaacaaaaacataacggaagatgacatctacggagctgttagaaaagcgcttgagctcggctggagcagcgtcaaactctattttatgatgggacttccaacagaaacatatgaggatttggatggaattgccgagatctcaaaaaatataagagagcttttctttgaagtgacaggcggcaaaggagctggcaggtttaaggtgacagcgagtgtagcaaactttgtgcccaagcctcacacacctttccaatgggagccgcaggacagtccggaaagcttcaataaaaaacacctctatctgcgtggcaagatgaagataaaaggtgtcacatttaattaccacgatactttgacctcgagctacgaagctctctttgcccgcggagacagaaaaacagggaaggcacttttcgccgcttttaagcacggatgtaagtttgacgggtggacagaacacttcgaccctaaaaagtggcaagaggccttaaaagaggctgatatcgacatttcattttataccgagagacgcagatctgaacttgagatcttcccttgggatgtcatagatatgggtgtaagcaaggagttccttctgcgcgaaaagaaacgtgccgagcaggcgcttactacgcctgactgccgatatggatgcgtaggctgcggtatcagcaaactcacggactgcccgtttggaggtgtgcttgcaaatgaatag

SEQ ID NO: 1030 - DNA, 2049 bp, Unknown
  Unknown gut bacteria
atggagaattccgtaaaaagaatgaaagaactcgtgcaaattctgaatgacgcatcaagagcgtattatcaggaaagccgtgagattatgacgaattttgaatacgacaagctgtatgatgagcttgttatgcttgaaaaggagagcggtactgtgcttgcgggaagtccgactgtaaatgtaggctatgaagtacttagcagtcttcccaaagagcggcaccagtcgcgtatgctttcacttgacaagacgaaaagcagagaagagctggcggaatggcttggcacacagacaggcgtgctttcctggaaacttgacgggctgacgatagtgctcacatatgagggcggaaagctggtaaaagccgtaacgcgcggcaacggcgaaattggagaagttgtgactcagaatgttaaggtatttgccaatgtgccgttaaatataccttataaaggcaagcttgtgcttcgcggtgaagcgcttataaaatactcggactttgaaaaaataaatgcggaaattgaggatgcagatgcaaaatacaaaaatccgagaaatttgtgcagcggcagtgtaaggcagctaaatacgaagataacggctgaacgacgcgtgcatttttacgcattttcgctcgttagtacggaaaatatttatgctgcggcagaaagcggcgatgcaggggctgaaaataacggcatcagcacggagagtgtggatttcggcaattcacggctggcacagtttagctggcttgcgcagcaaggctttgatgtggtggagcatacgcttgtttcagaagataatataaatgaagctgtcgatgagtttgcaaaaaaggtaatgaaaagcgatttgccgtctgacgggctggtgctcacgtacgacgatatagaatatggaagcaggcttggcaatacttcaaagtttccgcgcgattccattgcgtttaagtggaaagacgagacagcggacacaactctccgtgaaatcgagtggagcgcttcgagaacgggtctcataaatcccgtagctatattcgatcctgtagatatagaaggcagcactgtatcgcgtgcgtctgtacacaatgtcagcattgtaaaggagctgaaacttggaatcggcgacacgatttccgtatataaggccaatatgataattccgcagatagcggaaaacaaaacaaaaagcggaaaacttgaaataccggataaatgccccgtatgcggcgagcatacggaaatacgcagcgaaaatggtgttgaaacgcttgtgtgtgtaaataaagaatgtttggcaaaacagataaagtggtttacgctttttgtttcacgtgacgctatgaatatagaaggcctttccgaagcgacgatagaaaagctgatagctaagcggctcatatcggagccggccgaccttttctgcgtgggaaaatataaagacgaaattataaatatggaaggctttggagaaaaatcgtttgccaatctcgtagcttccattgagaaggcgagaaatacgactgcggcaaggcttctttacagccttggcattccggggattggaacagctaacgcggggcttataagccgtgcctgcggtgacgattttgagcgcattaaaaatgtaacgcgcagcgagctcatagaaatagacggtatcggcgatattatggcagataattacagagcgttttttgacaatcccgagaagagacggattgccgaagatatatacgcgcaggtgaaaatagaaaaaaaagcgcagcaagagacaggagcaaattccgggatcgggggcaagacgtttgtcgtgacaggctctctttctcatttcaaaaacagagacgaactcaaagagctgatagccgaatttggcggcaaagttgcaggatcggtatcgaaaaaaaccgattatctcataaacaatgatataacttcgggctcatcaaaaaataaagcggctaaggaaaacggggtaccgataataacggaggaacagtttattaaggatatcttgaaggatgaagcgtatattaccgagtaa

SEQ ID NO: 1031 - DNA, 2370 bp, Unknown
  Unknown gut bacteria
gtgacagaagactataatgatataaaagtgttagagcctgaaactgatgaaaatgaagtgaaagagccgctcgtgctgccgacaatagcgctgagagggctttcaatattcccgaatatggttattcattttgatataggcagggaaaaatcaataaaagcgcttgaaaaagcgatgattatgaatcagcaggtatttctcgtcagtcaaaaggatgagaatacggagctgccaacggtagatgatctttatgagataggaacggtggctaaggtaaagcagatgctcagacttccgggagactctataagagtgcttgtagaaggtgtgagcagaggcagaatcaaggaagttgtctttgaagttccgtactttaagtgtgcgatagagattatcgaagagacagatgcggaagaaagcgtggaaaatgaagcgctcaagcgttcggtgcttgacgaatttgatgaatatatagaaggaagagaaaatggccatgagatattccgcaccgtatccggcatagaacatccgggaagacttgcggatgcgatagcagcgcatcttaatacaaaggtcgaggacagacaggtactgctggaaacgatagactgtatcgagagacttaattcgcttaaaaatttattgggacgtgaagttgcaataagacgtattgagaacagcatcaatatgaaagtgaagtcgcagatgaatcaaaatcagaaagagtattatctgagagagcagatgcgcgctattcaggaagagctgggctttgaagaggatacgattgaggaagccgaaaattggagaaaaaagctcaaaaagctcaagatgccggctaagaccgaaaagaaaatcgaaaaggaaattgcaagattcggcaagctgcagccacagtcagcagaaagcaatgtttcgcgctcgtatatcgagacgatccttgaactgccgtggaacaagacctctaagacaaagatagatcttaaagaagcggcaagaatcctgaatgaagatcactatggactcgataaagttaaggaaagagtactggaatatcttgctgttgtcgagctttcgggcgagcttaaaggtccgatactctgtcttgtaggccctcctggcgtcggcaagacttcaattgcaaggtcgattgcgagagctacaggcagggaatttgtgagaatgtcgctcggaggcgtcagagacgaggccgagataagaggtcatagaagaacttatatcggtgctattccgggaagaattatgtcgtgcctcaaagaggcagggacgaacaatccggtatttttgttcgatgaagtggacaagataggggcggattataaaggcgatccggcgtcagcgcttctcgaagtgctcgatcctgaacagaacaaggaatttatggatcactatcttgaggtaccgtttgatctctcgaaagtgatgtttataactacggcaaataccacagagaccataccgcgtccgctgcttgacagaatggaggtaataaatgttgagggctacaccgaggaagaaaaggtggaaatagcaaaaaattatcttatacctaagcagatagagaatcacggactgaagagcgagaatatcatattttccgagccggcaataagagatacgataaattattacacgagagaatcgggcgtaagaaatcttgaaagacagatagcaaatgtgtgcagaaaaacggcgcttaatctggtaacgacgaagaaaaacacgtatcgcatcacaccgaaaaatctcgaaaagtatctgggcaagaaaaaatatagatacgatataatcgaaggacaggaggaggtcggcgtaaccactggtctcgcctggacgatagtgggaggagatacactcttcatagagacgactgtagtaccgggaagcggtaagcttgtgcttacgggacagcttggcgaggtgatgcaggaatcagcgaaagccggtatctcgtatattcgttcggttgccgataagctgggaatagaagaggatttctataaaaccaaggatcttcatattcacattccggagggagctacgccgaaagacggaccgtctgccggggttacgatgtgcacagctatgatttccacgcttaccggtattcctgtgagaaaggatatagcgatgacgggagaaatcacgcttcgaggcaatgtactgcctgtcggcggcatacgcgaaaaggtgctcgcagcgcatagagccggcataagaaaagtgctgcttccgcgtgaaaatgagcgcgatatcgacgatattccggaaaaagtaagaaagaaaatggaatttgtgcttcttgatactgtcgatgatgcacttaaggaagtattggtaagaaaatga

SEQ ID NO: 1032 - DNA, 1845 bp, Unknown
  Unknown gut bacteria
atgtttgacatcgaagaaaatctgaaaaagctcccggataccccgggagtttatattcacaaggataaactggggcaggtgatatatgtggggaaagcgatttctctcaaaaaccgcgtgcgtcagtattttcggctgtcaaaaacagcagatcccaagctcagagcgcttgccgctaacattgaagaatttgagtatataaactgcgctaccgagatggaagcgctgatactcgaatgcaatctcataaagaaatatatgcctaagtacaatgtgcttctgcgtgatgataagacatatccgtacattaaaataactatgggtgaggaatatccgcgcgttgtcaagacgcgccttgtagaaagcgacgggggtaaatactttggcccttacagcgatgccggtgcggtgaatgagatcgtcgatatgctaaatgacatatattctctcaaacgctgcgctgcgcgttcatttccggcgggagccaagccgtgcttaaattatcatatagcaagctgcggcggcgtatgcacgggaaagataggaaaggacgaatataaggataaaatagataaaattgtagaatttttaaacggcaaaaataaaccgatgctcgatatgcttattggtaaaatgaacgcagctgcggaaaacctcgactttgaaaatgcggcgaaataccgtgatcaaataacggcggtaaaggcaatatccgagatgcagagagttgtgatactcggtgcgggcgatatggatatggtgctggtactgcgcggagcggacagactttacgcagttgtgttttttgtacgaggaggaaagctttcaggcagagagagttttctgatgcaggcggatgagagtgagagcaacgaaaatattacggctcagtttttaaagcagtattacagcgatattggaagtgtaccgcacgagatactcgtagaaaaagagccgccggagagggaactgatacaggagtatctgtctggtgtagcgggacgcgcagttaaaattactgtgcctaaaaagggcgataaaaaagcgcttttggatctggcgcgccgcgatgtttcggaaatggcaaagacgatagatgaacgcgctaaggcggcgcgcgagcgcagtgaaaatttagcccaggagattgcaaaggtactgattgaaataggatacgaagtgcctaagtctgctgcgagcggctatcgcatagaagcttacgacatttccaacacaaacggtgttgattcagttggcgcaatggtggtgtttgaaggcgcaaagccggtaaaaaaggattacaggcgctttaagataaagacgatagaaggaccgaacgattacgcgagtctgcaagaggttatatataggcgttttcggcgtgccgagcagggtgatccgggcttttcaagcttgccggacttcctgtttatagacggcgggcagggtcaggtgacagctgtgcagcaggtgcttaaagcgatgaaaataagtgtgcccgtcgttggaatggcgaaagatgatcatcataggacgcgggcgcttgttgcgggcgacggacgcgaagccgagcttgcagcaaggccgcttctttttaaatatataggcgcggtgcaggaagaagtgcacaggtttgctatagagtatcacagaggtcttagaaataaaaaaatgcttacttccgtactcgatgaaatagaaggaatagggccggcgaaaagaaatgcgctgctctcccattttggcagcgttgattccataaaaaaagcgtctttggaagagcttatggctgtgaaaggcataacaaagacaaatgccggaaaaataagagaatattttaattga

SEQ ID NO: 1033 - DNA, 2358 bp, Unknown
  Unknown gut bacteria
atgagatatgaggatgatggatttgatccgactccgtatgaccgtatacttagtggaatacatacgccaaagagagcggcggcaaatgcagaagatatagatgcgtacagagcggcgcgcgaaaacagcgaaattcaaagggacatacaggaagaaagcctatcgcaaatagacgatgaaatggtgccgaaagctgcaagcgctggcgcaagtatggaaattgcggcagaagaatatgcacaggattttgaagaagattttgaggctgctgatacagattttgcagaaacagacggcgacattgaggcagagatagatagtgaattggcagcagaaacagacagcgaacttgcggaaactgtggaaaccgccgcagacaaagaattggcagaagcagaaagtgagttggaggaacgtgcagagccagtaagcgcagctatcgaaaacgataaaatgcaggaagaaagtctatcgcaaatagacgattatgacgatgaaataaaagacaaaaacgcagaagctgttgatgaaattacgccggaaagcgatattgcagatatggataatgaaatttcagaagaagaggcagtagctaacaaggcagaaaatacagaaacggatgcggaggactacatctcatcaccaaaaatagaggataaaacagatgataaggaaacagcatccaaaatatcgcttgataacctgctcattgcaaatgaactcaatttcacggaaataagagatggcgaaagcacgcgcgtgtatatagaagaggatattcttgtacctgatattaaacctgatatggccaaaattctctcgatggacggcagcgtaaagtgtgcagacaaagaaataaaaagcggacagaaaggcgaggacagaataaaggttaccggagatattacactcgaaacaatttacataccggaaaaaccggcagcagagccgattgtaaccattcaatcgcgtattccgttcagaacggactgggggatcagcaccgcgccgttttcatcggcagtcataaagcctgtaattgaaagtattgactatatggtgataaacgaaagaaaattccgagcgaaactgaccgtcgtacttacaatgcgcgaatacgcgggcaaatatctcgagctgttcgagggtattcgtggtgaagacattgaagtactcaaggaaaaaataaatataacggatattcttacgaaaaaaaaggatgtgctcgacatcgaggaaaacatgcttcttaaagagaacagtcctatgccgggcagaattttaaaatacggaatcaatgtggtggaaaaccacaagcagataacaccggaaaaagcagtaataaacggcactgtttattgcaacattctatatcttgccgagtcgcctgaagatgaaatcatcgagacgtctatggaagccgaagactttatggacgaaacggcggaaacgggtgcaagtgcagcagcgctgatacctgaccctgcattttatcagggaaaaattgaatttacacagtttatcccgctcgatatagacgacacgcaatcgggaagccgcatcacatttgacggaagtgacctttccgtgagaataaagaatttcagcgaggatgatgacgaggcgagcggcattggctttgcccttgaaggcagtataaacacaagtattgaaatatataaaaatgttgaagccgaaatcgtaacagatgtttatcataatgaaaaagaacttgcatacgacagtgaaccgtttacagccaaagccatagcaggaagcggtgtaacagagctgtctgcccgcgaaatcatcaacattccggcacaatacggcgatatagaacaggtaatatatatatccggcaaagtgcagaatgttgagtgcacagcggaaaacggcaaagaaacagtaagcggtgtaatagacgcagagcttcttgcaatcgcagcggatgaagagaaaacgccgttcaagatgcagcacagcctgccgttcaggggctcaatggacatttcgggtgcaaaggcgggaatgatagccgagagcgacatttatgtaaaagaactttggtttgataaaataaataacaagcaaatagaagtaaatgcgggcattttggcgctgggaacggtatcgggacacgaaacttgcagtctcatcaaaaatcctgtatttatacaaaacgaaaatgacggaaaacgtaaggcaagcatgataatttatatttcaagaccgcaggacgatttatggactatagcaaagaagttcagaacaaccagagaaaggataagccgcattaacggacttgatcccgataaagctatatccgaaggcagcaaacttctcattataaaatag

SEQ ID NO: 1034 - DNA, 1542 bp, Unknown
  Unknown gut bacteria
atgataaaatattcgagaatagcaggacttatgctcgtagacctgctgatcgtaaatttttcatatatatttgcactacttctgagatttgaattcgaggttaacagcaatcagtttaatcagtattttaccgtttacgcggataatattgtaccgcttacagctgcggcgcttatcgcttttgctatggtcggcatatacacgagcatatggcgctacgcgggctcggatgagcttgtaaaaataggaataggctcgattttggcttcggttttcggactggcctttatttcgatagcaagaccgatgacgatacttccgagaagtgtgtatattatttcagcgatgatgatgttcgtactcgtcgcgtgcacgcgctatgcgtacagatttatcagaaatctgagacatccgggtacttttaacactatattcctgaacgtcggaaaaaaagagctgataggcagcaatatgacgaaagttatgattgtcggtgcaggtgacgccggggcttcgataataaaggaaataaagcagcatcctgagtataataaaaaggttgctgttgcgattgacgatgactcgagaaagatcggcaagcggatatcaggagtaaaaatcgcggcagaccgttcaaaaataaagactatggcgcggaaaaagggcattgacgagataattgtggcgattccgtcagcaaaccataaggaaatacagaatatactgaatgaatgcaacaagactaagtgcaaaataaaggtactgccgtcgctcggcgagctcatcaatggcgatgtcagcgtgagtcacctgcgagatgtcgagattgaggatctgctcggccgcgaccctgtaaaagtaaatctgcgcgagatttcgggatatcttgaagaaaaaattgttctcgttacaggcggaggcggctcgataggctctgagctttgcagacagatagcgaggtttcgtccgcgcaggattatcgcgatggacatatacgaaaacactgtatttgagcttgcaaatgaaatgaagtccaaatatccgcagcttgaatttgaagtggtgataggctcggtgcggagcagggagcgcgtacacgaggtatttgaaaaatacaagccgcatgttgtgtttcatgccgctgcgcataagcatgtgccgctgatggaaaaaaacccgaaagaggcaataaaaaataatattattggcaccaaaaatcttatagatatggcggatgaatattcggtatcgaagtttgtactgatttccactgataaggcggtgaatccgacgaatgtgatgggagcgactaagcgcgccggggaaatgatgctgcaggaaaagagcacgcattcgcggacaagctatacggcagtgcgttttggcaatgtgctcggcagcaatggctctgtaataccaattttcagaaaacagattgaaaacggcggtccggtcacagttactcatcctgatattacgaggtattttatgacgatacctgaggccgtgcagctcgtaatacaggcgggagctatggcggac

SEQ ID NO: 1035 - DNA, 1881 bp, Unknown
  Unknown gut bacteria
atggctgaaaaagaaaaaatcataaatatagcggtaattgcccatgtagacgcaggtaaatcgactcttgtggacgcttttctcaatcagagcggtgttttccgcgccaacgaggagatagtagactgcgtaatggacagcgatgatatcgagcgcgaacgcggaattacgatatattctaagaattgctctgtaatgcacggtgatgtaaagataaatatagttgatactccgggtcacgccgatttttcatcggaggtagagcggataatgaagacggtagatacagtaatcctccttgtcgattcctccgaaggtccgatgccgcagacgaggtttgtgctcaaaaaatcgctggagcaggggctcaatccgatccttctcataaataaaatagataaaaaggacgcgcggatagacgaggtagtggacgaagtttacgagctttttatggatctcgacgcaaacgataagcagcttgattttccgatactctacggtatcgccagacagggcatcgtggtttacgatccgaaagatgcagaggggcttactgtcggagagggcgatagcaaaataaagaagagcgcgtcaggccacagcggactcaacattaacccgctttttgagactataataaagcactgcgagacatatcccgacagggacgatgagccgctgcagtttcaggtgtcgacgctcggatacgatgactatatcggcaggctcggcattggcaggataacgcgcggcagagtgcacgaagggcaaacagtgagcgtctgcaaggctgacggcagcgtagtacagcgcaaaataaatcaggtattcgtctatagaggcttaaagcgtatggcggtactggaagccggaagcggcgatattgtagtcgtttcgggaatttcggacatttccatcggcgagacgatatgcgacgaaaaagtacctgaagctatggagatgatccatattgaagagcctacgctttcgatgaattttatggtaaataagtcgccgtttgccggcaattccggaaaatttgtgacgtcaagacatataagagagagacttgagaaggagctcgaggtaaatgtcggcctcatcgttgaggaaacgaattccacagacagctttaaagtttcgggaagaggcgaacttcatctttcgattctcatagaaaatatgagacgtgaaggatacgaacttgctgtatcgaagcctgaggtcataatgagacgcggagaaatgggcgagacgctcgaacctatcgaggaagtcgtaataaatgtgccggatgaatattcgggaacggtcatcggcaagctaaatatcagaaagggtctgatgcagcagatgagcagtgaaaatggttattcgaagctcgagtaccttgtgcctacgagaggtcttctcggataccgctcggaattcataaacgatacgagaggcgagggcactatggtgcgccattttcacagctttgacacctacaaaggagatataccgcagaggacgaacggcgttgcgattgcacaggaagagggcgtttgtacgggatatgcgctttttaacattcaggagcgtgtgcagatgtttgtagagccgggtgtaaaagtctacgaaggtatgatcgtgggtatgaattcaagaggagacgatatggttgtaaatccttgcaaagccaaaaaagttacaaatatgagagccgcaggttcggacgaggctatcaagctttcaccggcgaggacattcacgcttgaagaagcgctcgaatttataaacgacgacgaacttgtggaagtgacaccggacgatataaggctgagaaagaagctgcttcacgaactcgatagaaggagaagcggcagggtttacgagtaa

SEQ ID NO: 1036 - DNA, 2175 bp, Unknown
  Unknown gut bacteria
atgacctgcagaatagtgcatctcatagaacagggcgtgagcccatataacattcttgctgttacatttacaaacaaagcggcaaatgagatgagagaaagagtggaggagcttatggcggatataccggggcttatgatgtcgccggcggatatttcaggtatgtggatacagacatttcattctgcatgtctcaggatactcagggtaaatgcggagcgcctcggatatgagagaaattttgcagtttatgaccctcaggatcagaaaacggtaattaaaaatatcgtaaaagagcagaatatagatgataaaaaatttactccggtatactttctttcaatcataagtgactgtaagaacaaaggtcaaagcgccgatgattacataaacgcgtgcggagaggatttcagaacaaaggtaatttataatgtgtacagagcttatgaaaatacactgagaaaaaataacgcgatggatttcgacgatcttttgctaaatgccgttaagctgctttcagaaaacgaagatgtgctgcttcggtaccagaacagattcaagtatataatggtagacgagtatcaggatacaaactatattcagtacaagcttgtgcatatgctcgcaagtgcgcacggcaatatctgtgtagtaggggatgacgatcagtgcatatacgaatggcgcggtgcggatataaggaacattctcgattttgagagagattttaaaggaacaaaagtaataaaactcgagcagaattaccgctcgtacggcaatatactcaatgcggccaattcggtgatttctcataataaaggaagaaaagcgaagaagctgtggacgtcaaaggatgccggcgataagataatatattacagagctgataacgaaaaggatgaggcgagctacattgcgagggaaatagacaggctcagcggaagaacgcttgcagttggctcatcgggcggcaaagcggcagacggcagagaacttgaataccgtgattttgctgtgctttacaggacaaacgcgcagtcgagaaattttgaagacgctttttcgagaaatgatattccgtacagagtgctcggcgggctcagatattacgacagaaaagaaatcaaagatatgatggcatatatgcggcttgtacataacagcgccgatgatttgtcgcttgtgcgaataataaacgagccaaagcgcggcatcggtgataaaacggtcgaaaaactaagagcgcttgcggacgtgcgcggtcaaagcatgtttgacgcgcttggcgacgaagatgtgctgtatgctctgccggcaaaagcgataacgagtgtcgcggaaatgctcagagccataaaggagtgcgctgaagaaaaacaaaatcttagagtttcggatatatatgatgcactgcttgtgcgcacgggatatcttaaggcgctcgaggatcagaatacggttgaggcagacggcagaatagaaaatttgcttgaatttaaatcggtaatatttgaatacgaaaaagatgatccagagcttacacttgaggattttatggaaagggtagcgcttatttccgatgttgacaatcataatgccagtgaaaatgcagttgtgcttatgacgatgcacagtgccaagggacttgaatttccggttgtgtttcttccgggaatggaggacggattgtttccggggtggcgagcatatgaaaaacctgacgggcttgaagaggaaagaaggctttgctatgtcggtatgacgagggcaaaggacagactttatttaacgagcgcggcagtgcgcacgctgtacggtaagactgattatacgagagaatcgcaatttttgcgtgaggtagataaaaaactgatagacggggatgctatatacgacggcaagaagagcagcggcggctttggtggatatgacggctttgcgtcctctgcgtcttctgcaaagccctttgacagcctgaagtatgccaagcaggaggtaaaaagcaaggcaagcggtgcaggaaatgcttcttacgaagcaggtgacgaggtaacgcatggaaaattcggacacgggctcgttatagaatccgacgaacgcacagtgagtgttatgtttgacagcgtcggtctgaaaaagctggcaaaggatatagcacctctcaaaaagctttaa

SEQ ID NO: 1037 - DNA, 3756 bp, Unknown
  Unknown gut bacteria
cggattaaagatacggagtccgtatatgcagcagaaacagaaggtcaaacgttaaatgccgatgtgacaatagtttcacagttaagcggcggatttttgcatgacagagaaacggtgtctgtgaattcgggtcttgccgaaaaatatgattatgcggatgcaattgacagcgcaaaagctgtttccgcactcgatgtgcttgtggcggcatatgagcttgtgcttggagaagagtttaacgaagaaaccgcgaaagagtatctcagcttatcagacggttttgtagacaattttttcgatgccggcaagggtaatttctcatttgcgatcaacaaagcgcagccaaataacggcattgagggtcagtatggatacagcggcacggcagtaaatcagactgtagtgcattcgggtgatacggtagaatttttcgcatatgccgatccgtactatatggattattacacttggtttgagacagacggaaagcaagtagataccttgtatatggaaacgggcaatgaagcagagcttatgctgaaaggctattattttgcctggtacggggcttatgcaccggacagtcttgaatcttttattgaagcgataaaagaagttgaagtatacgccggagatgaatttatagatgttacggacgatgagggaacgattaccgtgtcatttagtaaagcgggcgagtacatattgtctgtgccgtctgaggacgattacggaatgtattatctgatgccgaatctcaaaataattgtagaagatgagcttacagacagcatgaaagcggaaaatgccgcgcagatgcttagctggggcgatataagagatgaaaacggcagcatatataatgtgagcactaatttgacactgccgacaagcgtaacccttgtaaacggcgatacagcagaggttacgtggaaaagcagcgacacagagctgatcggaaatacgggagaagtgtcgcttgataatatcagcgaggatacagaggtaacgctcagcgcttttgtgactgtaggcagctcctcggtacaaaaagatttccatctgcaaatatatgctggtggagcgaaggatataaccgagtacagcgatgatgaacaaaaagctcaggctgaggaaataacggcggctttggcggtaaacgagacggttgccggacttttgccggacttatttttacagggagattttctgataggttatcttgcgtgcggcggaacgcttaccgcgcagcaggaagaggctgtgctgagaaaggtgcaggtggatgcgagctcagatatgacaagcagcgtgcttggcactcttgccaaagacgcacttgtgctctgcgcaatgggcaaggacccttgcagtgtaaagatatacagcgataccaccggtgatgcgggagatgaagcaagcgcaaagacggtgagcctcatagatatcattgctaaagcaccggcttcaaacctttcaatttacaatgcgccttatgtgctgctggcgtatgctgcaaatgacaagtgcagtccagagagctcagcaacagcaggagataaaagcgatgctgtgctgacacaggactttgtcataaggtatatacttgataatcaggagataagcggcgataaggccggcagctttaagggcacatacgatgtaggagatacggcgtcggtagttctcgggtttgcgggctatcaggactatgagagcgaaagcgtgagaagcagcgaaataacagatgcgattgaagctgcgtttgactatatagtgcgcaaaacaggaggacttgcggattttggaagttctaattacaacgcgtatatagtgcttgcaggctcgatgctcgcaaaaaatccgcaggagataacaaagggctatggatatcccgatgttatagatgcgctgcttgccgattcgctgggaacgggcaaaggctttagatataccggcaatacagtaaatcttatggcgacggcagatgcgatgcgcgcactgacagcatttaagaattacttaaatgatgagagcgcagttaagggaaatatttatgattttacagataaagtacttgtagaagaagagaattggccaaagggcaaagttcttaccgatttatttatagcgcctccgacaaagctcgtttatgaaaagggagaagagctcgatacagcgggaatgacagtaacggctaaatacagtgacggaacaacaaaaatacttacagagggtgagtataaagtaggaacctttgccagcagcacagcgggtgaaaaagaaataaatgtcacatacagcgaaacatcatacggaattacagaaacaaaaagcgcaagctttgccgttattgttgcggacgattcaggaagcacgggcggcggttctcaggtatctgagccaaaggtaagcaccgttgtcaaaaatgcaaacggcaaagtgcttgcagaaggaacgacagttataaaaaagaacagcacaacagttatcagtgtactcaaacaggtgctggcaagtgccggcataacggcgactataaaagacggaaactatgttgtgagcatagacgggctcagtgaatttgatatgggcggcaattccggctggatggtgcgcgtggacggtactcttatagaaacgagtgcggcgcagtataagcttaagggcggcgaggaaatagagtggttttacacgaaggactggaccaaggtgccgggatcgagcggtattaaggacgcagctgcggtgcctttaacggaaaagaataaggaaataagtgaggcggcattaaaagcagatgaatttatacaaggtacagagggaaaaggaacgtcttatcatcacgctctttttggtgaggaatggtttttaatcggaagagtgcgcggggaaaacggcgaaagagtaccagcagcttataaagagggatattatgaagaggcgcgggcagcgatagcgaaaagcggcggcgtccttgaccagagacgggttacagaaaatgcaagagttgtaattgcgcttacagctatcggtaaagatgcatctgctataggcgggcagaatttgctgctttcgcttgccgatatgcaaagagtgacaaaccaggggttaaacggagcagtgtggacgctgattgcactcgacagcggtgattatgatattccgcaaagcgatgagctgcaaaaggctttagctgccgcttctttatcaaacgcgggcgatacgggcaatatagatataagcggtacggcttatggtaagcgcgctacaagagcgcttcttattgatacaatacttaaagaagagaaaagcggaggcggatttgcactgtccggggaagaagctgatcccgatattaccgctatggcgcttacagcgctcgcaccttacaaggatgaagaaaaagtgaacgaagcgattgaaagaggtattgctttgctcagtgaaaagcagaacaaaaacggtggatacacaagttatggaagcgaaaattcagaaagcacggcgcagacgataatcgcgctttgtaccctcggtattgatcctgatttggacaagcgttttatcaaggacggaaagagtcttatagacaatctgctttcatatcagctaaaagacggcagctttgagcatacaaaaggcggaggcagcaatattatggcgacggaacaggctctttgtgcgcttgatgcatattacagatttacaaacagtttatcgccattatacgatatgactgatgttgcggaggtt

SEQ ID NO: 1038 - DNA, 1227 bp, Unknown
  Unknown gut bacteria
atgatggaaaataatatgaatatgccgcttttcggcataaaggttgtggagctttcgacagttgttgcagcgccgactacagcaagaatgctctgcgcatacggagcggaagtaataaagatagagacctcttatggagatgaggagagaagatcgggcagttttcagaaggtgccttacgaagatgacagaaatcccgtttttgcgattaagaacagcaacaaaagatttgtttcgataaatataaagtcggaagtcggacgtgaagcgataatgaagcttctttccgatgcggatgtattcctgacaaacgtaagaggtgcgtctcttaaaaggaatgggcttgattatgagactctcaaagaaaaatttccgaggctggtgtatgctcactttacaggctacggaccgaaaggccctgatgccaacgaccccggatttgacagcacggctttttggcttagatcgggaggtcaaaatgaatggcaggtaaagggcgcttatccatttaaacctacatacgcatttggagatatggctacaagttctacattccttgctggaatattgatggcgctttacgggcgtgagaaaacgggacgaggcacaaaagtggaaacctcgcttctcgcaagcggcatctggtgtaatgcaaccggtatagtagctacgcagtttgagaggaagcacttaaacccagatcctgaaaacagaacagatccgctcagcgaatattatatgtgcaaggacggcagatggataatggtgtgcgaaaatgaatacaagcgcgataaagataaatatttcaaggtgcttggtcttgattatcttataggcgatcctcgcgtggagactattgaggcactaaatgagagcggtatggtgaaagaagttttcgagcagtttgaaaagaaatttgccgaaaagacgagcaaagagcttaggaaaatgtttatagctgaaaatatttcctgtgagataatgtgcgaaatgaacgaagttgcaagagatccgcaggcgatagaaaacgggtatgttgaggaacttgaattcggcggcggaatgaaagtgatgatgccaagtccgcctatttttttcagtgagtacgggagaaagccttacgatatcacagggcctctgggaagagacacggatgaggtgttttctgagcttggatacagcagggaagaaattgcggaaatgaaagcagaaggtgtcattaaataa

SEQ ID NO: 1039 - DNA, 2868 bp, Unknown
  Unknown gut bacteria
gtgccttcgcatgccgcaagcttcagcgacataagcgatcactgggcaaaagactacatcatcgacgcagcaaacaagaatatcatttcaggatatccggacgggacattcctgccggataaggcggtaacacgcgcagaatttataaaaatggtaaataacgcgctcggaaacaatgcaacatcgtccgttacatttacagatgtacctgccgctgaatggtatcacactgaaatatcaaaagctgttgccgcaggttatgcgggaggatatgacacgggcgaatttctccccaacaacaacatcacccgtcaggaagctgcggtaatgctttcgcgtatagttcctacatataactacagtgcttcgctcacatcatacggcgacagagcaagcataagcgactgggcggaatcaagcctttcacgcattgtcggtaagaaatatatgggtgcatatgatgacggcaatcttcacccgctcgacaatcttactcgcgcacaggcggcaaagattatctgcgatatcgtagacaacgaaaccatcgttaagaatgcactgacaatttcagaagaagacacaaaggtttcaaataaaatctactccaatggcattacaataagcaagaatgtcggcgaaggcgatgttacgattgataactgcgtagttctcggtgcgctctatgttcagggtggcggcgccagtgaaagctcagatgacggcgagattaccataaacaattcccgcgttgcttcgtgccaaataagcaaaacagcttccgcagtgctcgtacatgcaaaaaacgaaactcgcatacttgaaacaagcgcgtacaaaacgacacaccttcatacctcaagtttaaaaggcggtcttttcggcacgggctttgataaagttacactctacggcaattctgagacatacttcgatggcagcttccctgccgttactataaacggcgccgattgccaggtaaattttgaatccggtacaattacaacacttaatattgaaaacgccggtaaaaattcggaggtatcgctcgattcgcatgcaacaattactacggcaaacgtcaacgctgttgcttcattcaaaggtaacggtacaatccgtacaatgaacgccaacgagagcggcattacttacgagacaaaaccttccactataaacacaaagagcggcaaaacagcgcctaaatataccgatgaagacgacgatatttcggtaacgccaaagcgcggtgaagacaatgtagatgttgacagcacgataaagatttcgttcagcacggctgtcacgaaatacagcagcggcaaaactctgacaagctcagaccttgaagatctgatcgagcttagaaaaaagagcacttcaggtacaaaagtcgctttctcggcatcaataaattcatcgaaaaagacggtgacaatcacccctgacagcgatctcgatgaagataccagatattatgtaataatagataagaacacatttaagtatacggacggcaagggcaacgcagcgttccagacatactttaatacaggcgacgatgacgccgacggcgatatttcaatttccccgaaaaacaaagcaaccggcgtaagtatatcaagacctacaataaaaattacttttgattccaagatgacaagatacagcagcggcagttctcttacagcatcatatgcggaagactctatcgagctgcatagggataaagcgacaggttcggacgtatcgtttacagtaacaagcgtatcctctacctcaatatcgcttcgtcctgacagcaatctcagatacgatacggattattacgtagttatccctaaaaacaagtttatggactcaagtaaaaacggcaacgataaattcacaagctactttactactgaaaaggaaactgctactggaattacagaaatcacttccgagtcaactgaagatactattacggtaactgttgtttccaatacttccggctctatatacggagttcttttgccaagcaccagcaaggctccgagcagcactcaggtatatgaaggcaaagacggaagcggcgctgccgtaggcacaaaccgcatcatcacaaacaaatccatagcgaaaaacggaaaaattactcaaaagtttgaagacctcgaaagtgataaatcgtacgttttctatgcaatatttagaacgggttcaacaaactcgtcagttgagaaacgtactgtttcaacaagcaagccttccattccgagcgcaagacttacgtctctcagcgttagcagcgacgcgtcaggcactgtaactatgccgtcgtttaacgcaagtactacaagttatgatgtaaccgttccttacggtacgcaaaatgttactgtaagtgccaatgcagcagcaggaacagatattttatataaaggtagcggctcttcatatgatacagaaaattccttccctgtatcaggcagcaccgaaaacaaaatagaggtcagagcttttggcagcggaatgaacgatactatttatacacttaatgtaaaagtcaaaggcaatacagcaaaaggcagcgtcaaggtcagcaatgcgacttccaactctaaccatacaatatttattgttcctgccggaacagagtctgtaaatgtagaaatttctgcacaggaaagttccgctactgtagtctgcacacagctcagcaacacaagcggcacaggtacactttccggtgaacttaatctgactgccggtaccgacaataaagtgagatacaaaatactttcaaaccgcgatgaagaaagctatgaatttacaattacatttgaacctgcagacgataccgaaccttcttctattatacagcaatga

SEQ ID NO: 1040 - DNA, 2124 bp, Unknown
  Unknown gut bacteria
atgagacaatttgtctattcattcgtcgaaggttctaaggatatgggaggactgctcggacgcaagggtgccagccttgcggaaatggcgagaactggacttcccgttccttttggatttatcgtaactacagatgcctgccgcagttactatgaggacggaaatattatttccgaggaaatatcgaaagagatttttgaaaagcttgcagagcttgaaaatgtgacgggaaaatcttttggagacagagaaaatcctctgatagtatcggtgaggacaggggcggaaatttatgtacctggacttgtagatacggtgctcaatctcggccttaacgatgagactgttttaggcctttctgccctttcgggaaatgaaagttttgcctatgattcatataaaaggtttatccggatgttcggcgaggccgttatgaatgtgcctaaggaaaagttcgactctctggctgattccgaggctttgagcgagccgaaaaaagccgtggaagcgtataaggcgctcgtctttgccgagacaaaagaggaatttccgcagaatccgaaatatcagctcataaaggcggtatcagctgcttttgattcgtggagcggggaagaagcagaaaattacagaaagaaaaacaagattctgtttgatataggaatggccgtgagcgttcaatctatggtgttcggcaatatgggcgaaacatcgggttcgggaatggcgtgtacaagaaacccggaaacgggagacagagagctctcaggcaaattcgccatcaatacccaaggtggaattctgcgtttaaaagaagaagagatgcattcgatagatgaacttgcggaatggctgccggatgtatataagagctttgtaaaaatagccgaaattctcgaaaaacactatcacgatgcacaggatatagaattcacgatagaaaacggtaagctctatatattgcagacaagccgcagtgaacttacacctattgcggctatgaaaactgcagtcgatatggaagctgaagggcttatagacaaacgtacggcactgctgcgtcttaaaccgcagcagatggatgtgcttttcaacaaagaatattctgagtcagttattacggaactttcaagttatatttctgtgataatgaagtggacggatgaagtaggcaggcttaaaataagaacgaatgtagatgatttgaatgatgctgagtttaccgtaaaattcggtgctgacggtatagggctttgcagaactgaaagcacatttctgcggcctaagcgcatatccgcggtgatgaagatgatacttgcagattcggaaaaggaaaggaatgaggcgataagcgtactgcttccgcttcagacggctgattttaagaagctgtttgagacagtcggagaaaagccgattgccataagactgctcgattcgctcccatatcacgaatttgaaactgctttgggtcacagaggctgccgcatagctatcgcttatccggaaatagcagcgatgcagaccgaggctataattacggctgcgatagcggtgaagaaagaaagcggtatagaaattgcaccggaaataatggtgccgctcgtaagtatggacaaggaatttatctttgtgaagaagactgtcaccgataccgcgcagcgctgttttgaaaagcttggagatgaagtggaatactcggtggggacgatgatagaagtaccgagagctgcattgacagcggatcagcttgcgcgggaagccgatttcttttcgtttggtatgaacgatttgacacagatgacatttgggctttcaaacgagaacaatgaaaaaatagtaaaagagtatatgggcaatctcatacttgattacgatccctttgcttcgatagataaggatggtgtggggaagcttgtaaaaatagcggttgagcttggaaaatcagtaaaaccgaatctcaaattcggaatgtgcggagaccatgcgggcgatcaaaatgcggtggaattctgctgtaatataggagtaaattatatatcctgtccgccgatgaaggtgccgatggcgaagctgatagcggcgcagtatgtagcaagatgtgaggcggaaaatgatgtataa

SEQ ID NO: 1041 - DNA, 2631 bp, Unknown
  Unknown gut bacteria
atgaagaatgtattgaaaaagctgctacccggtttaatggcggccgtcatgctgctatctatcattcctactgccgcactggcagcagaaagcggctcagaatattctcagggtgttcaggactttttagatctggcttcatctattcccgaggtgatcaccgaggatagtatgccagatgtatatgagctggtgctcacttgcagggatgcttatgagaaactgtcattggaagagcagaagcttgacacggtccaggaggcataccttctgcttgagcaggcaatcgaccgcattagtgcgttcagtgaaacaatggttatcgctgagaacagtattgacagcgatgttgtttacaaagacggcacttatactggtaccggaacgggctacggcggtactgttactctgtctgttaccatcagcaatggtcagatcgcgaacattgaggcggtaaatcatagtgagacaagtaactattggaacagggcaatttcgttattttcaacaattgtaacggcgcagaacaccgaggtggacagcgtaagcggtgcaacaagaagcagcaatgctatcaagacagcggtgaatgacgctctcattcaggcagcttcagccgcaaacgacgatgatgacagcgtggtgttctcttcgggcagcggtacggaaaagaatccgtatgtcattaaaacagcttctcagcttgccaattttgcaacatccgttgatgagggtgcagcttatgagggacagtatattgttcttggtgcggatatcgatctttccggttacgaaagctggaacccgattggagcagaagctaaaagcgacgataatcttgcttatatcttcaacggtacatttgacggtcagggatatacaattagcaacatgactatcaatgtagatgcagtcacagagaataatgttggtctgttttccacattgaatacttctgctgttgttaaaaatgtaaatatgacaggcgtagatattacgctcaataacaatggaacggattcatcgaattcgcagtgccgtgcaggatctatcgcaggcaacagtgtcaatgccgcaagaaacggcaatggtgactacaccggcgtaattggtgcgcagattgactcatgtcaagcagcaggcacaatatcgataaaatctgaaagtgccattctgacgtggggcggaggcattatcggccgcgcgatgatcgcaactgccgttacgaactgctatagtgatgttgatataacagcagaatcgcttggaggaagcaactctgcgtatgcaggcggaatcgttggtactacgggcaactatgctatcattgccaactgtgcatcgtttggcaatgcttatgcttcatcaccgaagagtgcgaacttcggcggtatggcaggcggcgttgtcggaatgctggcaggcaagatgtataatgttgcgtcttccggcaatgtgaccataggtaatggaaacagtaaatatcaatggggaggcgctatcgccggtgaaattacgagctccggaatggaaaagcagacagacggcagctacgaatattacagcaccggtgcttatcgcgactatggatattacgcgactgacagcactttgactgaggaaatatacagcagcggcgaactcagcagttctaatgctatatcccctgttctgcctgttggcattccacgcgctggtgctaccggcactattagcacctatgataaggtctataagactacaggacagacaatggcggaaatggcgacacaaagctttgtcgatacgctaaatggcaacatcaaggacagcctggagctgcttgccgcatacggcacagaaagtttagaacttcgtgagtgggagctggttgatggaaaagcagtacctaccggcagcatctgggtgagcagcgatatcgatgccggtatattccagtccggcagcggtacagaggatgatccgtatatcataagcacagcggatcagctggacgcatttgccgcttctctgaatgagaagatagactacaaagatgtgcatattgcacttggcaatagtatcgcagttaatagcggcgactggaagcctattggcggcagtgactgggcgtttaacggtacatttgacggcaaaggctataccatttccggtatcagtgaaggctcagtgcaatccccgcttaagcttgacagcgagaacttgtttatcgggctgttcggcgtgctgggaaagaacgctgttgtgaaaaatgtgaatctgacagatgttgcgatttacacgagctttaatgcctctgcatatataggcggcatcgctggctatatggaaggagataaatctaactatacaggagctcttattgatagctgctttgtctccggcgtgatctctcataccgctgaagctggcaatcagtttgtgggcggattggtcggccatcagtacaagggtgctattatcaacagctggacggacgctgacctttcaggtacggttgcaagcggagaccttgcggaagttggcggacttgttggcctgaacaaccgcggccttgtagcaaactgttattcattcagtaatatttacggatcaggcaaccgcgacaacggtaatgaaggtatggcgggg

SEQ ID NO: 1042 - DNA, 2274 bp, Unknown
  Unknown gut bacteria
atgcctttcgataaaatttgggctaccgtatatgaagatgacgatgaagcagttgagatctggaaaaagctcggactgcctgaagagcgcatagtaaggcttggaagagaagataatttctgggaaattggtctcggaccctgcggcccatgttcagaaatttactttgacagagggcctgaatacggctgcggcaagcctgactgcaaaccgggctgcgactgcgatagatatcttgaattctggaatcatgtattcacacagttttcaaaggaggaaaacggtgaatacagcaatctcgaaaacaaaaatatagatacaggtatgggactcgaaagaattgcctgcataatgcagggcgttgattctatattcgacatcgatactataagagctgtgctcgatgaggtgactaagaaagctggagtcgaatactgcgacggaaaagctaagacagatgtttccattcgtctcattacagatcacgtacgctcggtaacatttatgattggcgacggcattattccttcaaatgaaggccgcggctatgttttaagaaggcttttaaggcgagctgcgcgtcatggcaaaatactcggcataaagggtcctttcctcgcagacatctccaagaaggttatagagacatcgggcgaagcttatcctgagcttgttgaaaagagcgactatatcttcaaaattctctcgatagaagaagagaagttcgcttctacaatagaccagggcacagtaataataaatgaatatatagatgagcttaaagcaaattctaaaacggtgctttctggtgacaaagtattcaaactctacgatacatttggcttcccgattgagctaacacaggaaatactcgaagaaaacggctgtactgcggatgtagacggatttaacgaaaatatgcagcatcagaaagagcaggcaagagccgcaagacgagagggtgaagaagcgggctggaaggaatctgtaggtcagggactttcacttaacgctacagaatttattggctatgaaactctctcaggaaccggcaaggttgaagctatatttatcgctggaactccaagcgatagcataaacgaaggggaaacgggcagaatagctcttgatagaacacctttctatgcagaaagcggcggacaggcctcagacctcggaaaaatatatggtgataacggctttgaagccgatgtactcgaagttacaaagctgcaaaatgtatttatccacagaatagatgttgttaaaggaacacttaatgttgatgataatgtaaaacttgaagtatgcgttaccaatagaaatgcaacagcaagaaaccatacggcaacacatcttcttcataaggcactcaaaactgtactcggtgaacatgtagcacaagctggctcaagcgtagaagctgatagtctcagatttgacttcacgcactttgaagctatatctgacgcacagctcagagaggttgaaaagattgtaaataacgaaattatgaaattcatacctgtaacgacagatattatgtctatggaggaagcttctaaaagcggtgctacagctctgttcggtgaaaagtatggaaatgaagtaagagttgtttctgtgggagatttttccaaagaactctgcggcggaactcatgtagcaaattcaggtcagataggtgcgtttaagattctctccgaaaacggagttgctgcaggggtgagaagaataacggctatcactggcacgggcattctcgatatggcaactgatgaggaaaatgttataaagtccgcatctgagcttcttaagacaaatacttcgcttcttcttgaaaaaataacggctatgaatgaagagcttaagagtaccaagaaagagctctctgaactcaaaaaagccgaaatgaacagtgctgctggcgaaataatagcagaagccgaaacaataaacggcgtaaagtttatcaccaagaaatttgagggcgcaagcatagacgatatgcgcacgatttcagatgatgtaaagaagaaaaacaagggcgtcgtaatggtatttgctgcagtaaacgcagacagggtaacatttatagtttccgtgacagatgatcttctcgacaagggttatcatgcaggcaatatgattaaacaaattgctgcggcggcgggcggcggcggcggtggcaaagctgatatggcacaggctggagcgaaagacccttcaaaaatcgcagctgcatttgaaatagcaaaatcgctgataaaataa

SEQ ID NO: 1043 - DNA, 4695 bp, Unknown
  Unknown gut bacteria
gatggaaaagccgtgaatgaggtctatgggtgcaagctgggagacttcaagaactggacgtgctacgcggggctttccacggattcgtgggcggcgcagggcggatcgggcggcgcaaccgttgtcgcagtttacgatagcgagatgccggtgattgcagcgcctgataaaccgggttatttgttcggcggttattttgacgaaaggaatgggggcggaacaaaatattacaatgccgactgttcctctgcaagcatatatcgtaagacggaagggatcacactatatgctttatggacgccgattacgtatgacattcagctgtacagcaggggagaaaacgttggcacattaaacgatgttatctacggcgagctgcgcttaccttctgccgagagccttggaatatcttataccaatcacaattttgtcggttggaatatttatgacgagcaaaattgggcaatgtatacagcggacagagactattctgctggccttgtgacagagcagggaaagatagcatatatttatgcagcctggctggaaaaagataaatataccgtaacctatgacgctaacggcggtacgggagcgccttctgccgtggaagtccatgtagatgaaaccattgtgctgagcggcatcgtgccaagcagggaaaattatacctttgccggctggtcggaaaattccggcgcagctacagcgcagtatcagccaaatgacagctttactatgggaaattccctgataacgctttttgcagtatggaatagaaatccggagcttatctacaatgccaacggcggtatttttaatacttatgccgggacttcatatcctgcggccggatctgaggttacgcttacgagcgccataccgcaaaaggaaggatatatatttgttggctgggcagagagtgaaacggctgcggcatcggacatcatatccgcgccgtatataatgcctgataacgatactgtgctctatgcggtctatgaaccgattaagtatgaggtcaatatatatgcggcggacggatattcagtttccggaataaacgaggatggttatataatcggcgaatatgccgaatttaccgtgagcggtacagctccgaaggtatatatcaacggtatcctcgcaactcctacagacggaatatacaaatttgagatacagaataacgcttctgttgtcgttgccgatgcttctttggtaaatgtgatatacaacgctaacggcggtgtgaatgcgcctgttgacgtgcgcgtttacgcaagcggagacacggcggttgtggcatcaggcgtccctgagaaaacaggatatacattcagcggctgggcaggcacagcggatttggagtatgcggaatataccgccggcagcagcataccggttgctgctgaagatattgttctttatgccgtatggacgccgataacctatacggtgaaatatgacgcggcaggcggcagcggcgatatgacggcaactgcggccgtttatgacgaggaatttacgcttgcagaaaatacatttaccaaggcaggctgtcagtttgccggatggtcatacgcatcaggcggagagcttgcctatgtagacgaagcaagggttagcaatcttaccgatgtgaataacggtgaaattacgctttacgccgtctggaaaggcgcgcaaacaactgtgcgcttccattttgaaggcggttcgtcaggtacttcctcctgtgaaactgcatacggcgaaattttgccgacagataggttgacggcgccgggcagatacggatatgtatttgcaggttattacactttagaagacaaaggcggagatttggtctataatgcggatatgtctttgtcagaatactatcaagctaatccatgggacagcgttgcagctgaacttaatttatatgccgcctgggagcctgtgaactataccgtggcatttgtaaacggtactgaaaatctacaaggtaccatagatgctgtctatggacagagcttcttcttgccgcaggcggaggaacttggcatttcccttcctgctggttattccttcagaggctggtctattgcatcgggaagcgatatagtctattacagcgccgggcaggaaattacgacagggcttacgggcgagaatggaataacggtatatctttatgcagttattcaggaaaatgagagctatacggtaacccttccggcctctggagaaggatataaggtatactacaatgagagtgagttaacttcgcagacggatataagggttaatgagaatgaaaaggtatccttcaatataagcgtggaggagggctacagtgctgacagaatgattgttctggcaaatggcgtgctgcttaccggaaacaaaatcggaagcacttacacttataccgtttttaacattgaagcaaatcagctcattactgtaacaggggttgaatttgacaagtacgtcgtaacctatatggttgacgaacagatatatttaacggtacagacaggttataacgcattgcttacagaacctgtatccccggcaaaggcgggaagcacatttaaaggctggtctgacggcagtcatctgtggagcttttcagcaggtaaagttatagaagatacgacgctctatgcggtttgggataacgatacatttaaagtgacaccggcggcaagcggaagcggttacacagtaacttctgatgacgatcagacggtagcatttggaggcagctatacctttatagtgactgtttctgatcactataatgccgacgcgatgaaagtttatgccaacggagtattgcttgtccctgatgtacacggaaatgtttatacatttacagttgagaatataaccgcggatgttgcgattactgtaagagatgtagcagagggtgtttacaccgttaaatatattgtggacggcgaaatctattacagtgagaatgtggtttacgccggacaagcgcaaagaccgagaacgcctgtaaaggccgggtatatctttgacggatggtttgccggagatgagaagtgggattttgacactggaatagaggacgatttagagcttgaagcaaaattcacccggcttgtatatcgggtaacggtgcccgatgctcaaagcgaatttaccgtaaatgctgtatctgctaatccggtagaatacggcggcagctttgcctttgatattatcgtggcagatggttataatacagcggatatgatggtttacgcaaacggcattcttcttgaaaaactttccgaaaatgaaaatacggtatcatttgagctgacaaatataacagagccgcaggctataaccgtaaggggaatcggacagaatacttatgccgttacttacagagcaaatacaacagagtatgtaggcaatatgcctgacaatgcgataaaagcttacggcagtgatatagccatatctgatttgctgcccgaaagatatggatatcgcttcctcggctggtcaactacagcaaatgctggagtcgaatacacggctttagatatctattctgaaaatagtgatcttacactttatgctgtttgggaggcgatgacctttgctgtttcttttgaaaccggcggaggaagcatagaaagcggtgaggtaactgaatacacatacggaacgggagccgtactgccgactgaggtgataaaggaaggctatgattttgcaggctggtatgaagatgagcttttgcagggcgtaagagtatatgagattaaagagactgattacggcgacaagaagtattatgccgcatattcaatggctgatgtggtgataaatggttatacaggtgagtacgacggcaaagagcataatattacttatacgctcgctgataatgtttccgttgcagattatcagtggtattttgttccggatggcgcgagcgaggcgatcgcggtttcgtcagactactatcatacttatgcggtaaaggatgcagatgaaagcggcgaatattactgctgtattgagactgtttccggtagttatgtaatacgcatgtttacagagaaagcaaaagttgcaatcactaagaagcctatttccgtaaaagctgccgacagcggcaaggtttatgacgcgcagcctcttgcggtaaatgaaattgagctgacagatggaagcagtttggctgataatcatataatatcggctgttatgacggaagaaagtacattgaccaatgttggcaccaaggctaacgagatagaacgaattacaattttagatagtgaaaatagagatgtgacggcgaactacgaaatcacaaagcaaagcggtacgctcagcgttacgccgcgtgctcttatcgttgctgctgaaaatgtgagaattgcggcaggctcggcgctgaatgaaaatcacttgtataaaataagcggtgtgttgggaaatgaaaatctttctctggcaaatacttcggtttcagcgaaaaatgcagacggtgaagatgtttctattgcggacattgcagataataccggtaaatacaccgttacaattgtctatagtggatttgacggcgcaggcagcgagaattaccaaggcagcggtacaatcacatctacagttactgtttataaaagcactggaggaagtactggcggcggagggggcagcagcggcgggggg

SEQ ID NO: 1044 - DNA, 1932 bp, Unknown
  Unknown gut bacteria
ataggtgcggacgatgcgagaagtgtcgcatttgcgtgttttctgaccgttctttcatttgctatgggaagggtggaaatggcgggcgctttttttccttgcggtattgcgctgatgtcggctgcgcttaaaagaagcagtctgaacatatatctcatcatacctacacttgccggaatgcttacgctctggcgcggcggcgcatatatatggggagatgtaattgcggccgcggccgcaagtgcggtatttatgatattggcgaagcgcgggcttccggatttctaccgcatgatcatctgcgtgtcgattgtcattatttcaaactctgtgtattacacggcggcgcacatactttacagacttgatctcaaacttttgctgctcgaaacgataacggtcggcgggctctattatatattccatgtatttttctcgctgtctaatatgaaagaaacattccgcggctcagttgagggcggcattgtttcgattgccggcatttgcgcgctcatattctgcgggctcacctcatggagaggagcgtcgtactatattacagagtatataccgatgacggcgggttttctctgcgtgctgattttagggtacaagcttggaatatcggcgggcataacggcgagcgcgataatagcagtcatattttatctgtgcagcataattcctatgtctcaggtcatcatatttatatgcgcaggacttacagcgggatttttcagagggctcaacaaatatacgacggctgcgtgttttgctgcggtctgtctcgtttttggacttgcctgtacaggtgcgcttggtgcgcttccggcagcgccgccgctcatagctgcactcatttttgctctcataccttcacggatgatgaaacagataaacgaaattctcaggcggcttgtttccggcaatgcgggcgtatcgtcatacgagcttcaggaaggcggtatcaatacggccaatgtaaaagatgtccttgatgggtataaggagtgctttggcagccttgctaagctttatgatataggaaaagatcagcgcagcattatttcacaccagttccggggaatgcagcaggtggtaaatcagctggaaatggacataaaatcagcaaataagggcagactcgcgtgcgttcctgtgaatactgaatataaatacaatatagatgtaggcacgtcaggctatgcgcgtctcggagatgtatcgggagacagttacatctgcaagacgctctcggatggcaggtatattataatcctgtctgacggaatgggcaaaggcgaagcagcggcgatggagagcagtcttgcggttaaaacactcgccaatctcattgaagccgggtttgatgtagaaatagccttgcgtacgctcaattccatacttcttctcaaatcggaggacgagatcttctctacagttgatataggaatattcgataaaacgagcggaaaattaaagctttataaaataggtgcagcttcgactttcataaaaagaggcgaaaaggtgagcgcggtaaaaatggcggcgctgccaatgggaattgtcgacggcctcaaaatagattttgtcagtcttaagctgcagcccggcgatcagataataatggtatcggacggggttacggattcagcgcgctacgcaaatgtggccgaaaacggcagcggaacaggcgcagggagcagtgaacacggtgaaaaccgaaagacaggtacgcaaaatgccgataacggctgcgagtggctctgcgagactgtgcgcgccataaagtcgaaagatccgagcacgatggcggacctcataataaacaaagccgtggaaaattacggtgtcagagaaaaagacgacctcactgtaataagcgcagttataaaggatacctctttgacttgcagtaaacgagcatag

SEQ ID NO: 1045 - DNA, 2052 bp, Unknown
  Unknown gut bacteria
atggtcgttgggattttccctgcaaatgtacttgcattaggtgcgggtactccgacaaaccaaatagggaatcattgggcagcagacagcatgacgggtgtgttggctgttacaccggaacttaccggtaacacatctaaaagttatgccgatggctgggtattaactgataagactatcagtgctggcacaaatgaaaacgagtttttaattacgcttgatgttcgtaccaaagcggaaattgaaaatattgtattttctgaagatgcggcagccgtaattgtaattgatttgtcgaacagcatgactgaacaaaggcttgcaaacgcaaaatcggcagcattggcgtttgctggaaaatttgctgaaacggagaatacggacgcaattcgtaagattgcgattgtagggttcagcggtgcaaaaatgaaaaagggaggtcattttgatgagggaaacaatggaataacggcagcaaggacatatcaagcctggacgaatgcttctgatgcttctatttcgtctgctataaacagaatgcaggctgatgggggaacttgcctgcaagccgggttgatacttgcaaaaaacctgttaaatagtgatgaagtttccggcatcgccaataaaaatatcattgttttaacggatggaaaaccgacataccatctcagcagtacagcacaagccagcacttcaacagcagctgtcggcgaaccggatcagattttaggttcaggcagcgaaaccaatcacgatacgcatacaagtacagaaaatacagctaaatcaatactgaaaacgggaatcaatgtctatggcgtttatttaggagcagatcgtgtacagtgcagtaatggtgatagcaattgtaaacttcacgagcaatcaaagacaggagtcaattggctgcgggaaaattgcggttttatcacttatgctgccagcgaggtggataacttatcgttgatattccaaagcatttccgaattgattgagctgcaagcaaaggcgtggatagccgatgatcctataggtgaaatgtttgcatttgacggatttgtgaacactcctgcggatgcaaacgaatatttttacaattcaacggatgacaaggtgatatggaatttgcgtatggcaactccagtttataagacagaagatggatacagtatatatcaattaacttacaaagtaaaattgaatacgctggattccggatatacggagggaacctattatccggctaatggaattacatctgttagctatttgattgaacaaactacgcaagacgaaacttctgcaattgaaagcggaactgcatatttcaatgtaccatcagcaaaaggctacgcagctgatattacctttaataaggtggatgaacagaatagccctcttgcgggcgcggagtttattctgacaactgcagacgattctaattggagtatgactgctacatcaggcagcgacggagttgtgttatttgaagacgtcccatcaggtcacacctatatgcttaaggaaaacagcgcaccgagagattttattaagagtgatacaacgtatacgcttattgtttcctatggtgaattatcgggtagtattgggacaaataatacagttgtgaattctcctgaaccccaaaacggcagtctgaccgtatctaaaacagtttccggcagtggagctgacagcacgaaagactttacctttactgtagatgcagagattggcggtgaagctctcactggcacttacggcgatatggcctttaacaatggcagtgctgtctttaccctgaaagcgggtgaaaataagacggcttctaacctgcctgctggcacggaatataccgtaaccgagagcgataacgacggttataccgttacggttaacggaacgagaagtaccatagcaaaaggtacggttgcagctaatacaaacgcagaggcggcttttaacaattataaggatggaggaaacatttctgatcctgaatacggcagcctgactgtatctaaaacggtttccggcagtggagccgac

SEQ ID NO: 1046 - DNA, 1653 bp, Unknown
  Unknown gut bacteria
atgaatgaaataaatccgataataattgaattactgaaaaaaagaggcgtgacgtctgaagaagatatcggggaatttttatcggataaaccaaagagaacttatgatccattcctgcttgccgatatggaggcgggagtggatttaatattggcaaaaataaaagcaggcgagaaaatctgtatatacggtgattacgatgctgacggtatcacagcgataagcttgctttatcaggtgctttcgcatctgacagataatctttcatattatataccatcgcgctttgacgaaggctatggtctcaacaatgaagccatagatgcaatcaaggcggatggtgcgggactcatagttaccgttgactgcggcagtgtctcgtatgctgaagctgagcatgccaaagcgattggtatgccgctcatggtaacggatcatcacagcattacagacagaagagcagactgtatacttataaatccgaaaaggcaggactgtccgtatccgtttaaacatcttgccggagttggcgtggcatttaagctggcgcaggcgctgcagcaaaaagcaggacttcccaaatcagtactcacggaagtgctcgaccttgtggcaatagggactataggggatatcgtgccgctgctcgatgaaaacaggactatggtaaaattcggcatgaaagtgctgaatgagggaagaagaccggggcttaggcggcttgcggagcggatatcgctgacgcttgggagcataacatcggagaatgtggcctttgcgatagtaccgcatataaacgctgccggcagaatgggaagcgcctatgctgcggcagaacttttgatatctcatgatattggaataatatcgcgctgtacagaaacgcttgtgcaaaacaacagggatagaaaagctgtacaggaaagtacatataaggatttagtaagtgaacttgaaaagacatatgataatgataatataattatactgtcatcggagaatgctcatgagggcataacgggtatagtagcagggaagatacgggaaagatacgaaaggcctgttattatagtcacgccttcgggcgaaaatggggaatatttaaaaggtacgggcaggagcatagagaaaataaatctttacgagctgctcaaaacatgcgataatttgtttgaaaaattcggcggacacgcaggagcgtgcggatttttaatgaaaaaagaatattttggagaatttaggcaaacgcttgggaaaaggatggagcagcttttatcggcggatgagagcttatttgactcagaacttaatgcagattttgatatcccgctggcgatgattacggaggatttcgccgatatgatagatttgatgcagccgtttggagctaaaaatccgaagccgcttttcagaatatatggaacaacggccttaaatacatcgtttatgggctctgaaaaccggcatatgcgctttacgctgcgggacgatacgggatttagcataaactgtgtgcttttcaacagggcggaggattatgcggatattctgctttgcgggaaggcgtttgaaacttttggtaccatagaagcgcagtattggaacggcagtaggcgcatacagatgatagtgtcgcatgtggaaagactgtaa

SEQ ID NO: 1047 - DNA, 2064 bp, Unknown
  Unknown gut bacteria
atgaaaaaggcgggaattattttatttacgcttgtgctgtgcgcgggcacggtgttttcttttgcatacaccgcatcgccaaaagaaaaaattgacagcgatataattgcaagggcagcgagtcttgacgatattaaaaacgcgctgcgcaaaacaggaaggtttgacaacagcaattcttcgcagaaaaaatacggagcgttagcaggcggcggagatatgagcaaggcgccttcagctatgctggaagcaatggaagactttgcacaagcctcaggcaatgcaatggatgcgagcgcggcttttgatgaggaaacaggagctgcggcaaatgcagggtattcagagaccaatgttcaaattgaaggtatagatgaggcagatatcgtaaagactgacggcgagtacctttacattgcggcggataagtgcgtgtatatcgtttctgtggataaggataaaatgggagtggctgcaaaattggaggaagaattttttataagaaatatatttatagatgaagacaggctcgttgtatttggcagtcatacaatggaggagaaagcgcctgtgctttatgataaaaacgaggacttagaaatagtaaacgaaagcgagacagcagatctgtcgatgccggtttacgcggcaatgaaaacagatgcaaattttactgtcgatcccgcatttggctggtatgaatgcaaaacatttacagatgtaaatatatatgacacagcaaataaagaaaagccagagcttttacaggaattttcgcttgaaggtgattttgttacggcccgtaaatccggagagatcgtataccttgcggccagcaagtatatttacggtatcaatgatcttgagaaagcaagcggcagcgatatattaccgctctactcagatacgagagcaaagcttgatggcaaagatacttttaatttcggcggcgaggaaatgatagtagcagaaccttcatgcgtatatatttgctcaataaaggaaagtacggcgttcacgactttggcagtgctcaatattgcaggggacgaagaggcggatatcaagagttatatgggatctgtcagagatttttatatgaataaagattcgatattcttgacatttgataattatgagtatgatgaaaaaacaggtacaggaagagaatatacggatataatagcgctcgatgttgatggtaaaaaagtgacatacagagccgacggcacagtgggaggcagcctgctgaaccagttctctatggacgaatacggcggatatctccgcgtagcaactaccgagtgggaatggggaagcggagagcagtcctcaagcctctttgtgcttgataaaaatctcaatatagttggcagcatcaaggatatagctacaggcgaacaaatttattccgtaagatttatgggagataaaggatatatagttacatttgagacaatggatccgttttttacagtagatttatctgatcctgaaaatccgaaaattgcgggggaactcaagcttcctggctacagcaattatctgcatcagatagatgaaaatacagtgctcggtgtgggacgtcagacaaaagagcttattacgagagatgagtttggcaatgaagaggttgtcggttttagagagggaggaattaaactttcgctgtttgatataagcgattttacagacccgaaagaactggacagctatattcttggcggcgactcgacttggtcggatgcgctctatgaccataaagcgataatggtaaatagggataaaaacttcatcggcatctgtgcatcttcttacgagagcggtaaagatacaaacggtgcatatatatttgatatttcaggagaaaatatcagcctcgaaggcagcatagaaaatacgaatgtcaataattatatgatcgatgaaggcgatgaaaatgcattttatttcagcagactctgttatgttggagatacatattactaccttgataacggtacggtatatgctatacaaatgacagacggcagctttggaacaactgctcagctaagattataa

SEQ ID NO: 1048 - DNA, 1929 bp, Unknown
  Unknown gut bacteria
atgaaaggctatacaggtgatactataagaaatgtcgcacttctcggccacggcggctgcggaaaaacaacattccttgaggcagcactcctcgcaacaggcgttataaacagactcggaaaggttgaagacggtaataccgtatctgactatgacaaaatggagattgaaaagggatattcgatttcactttcgattgttcccgttgaatataacaaagtaaaaatcaatttccttgacacaccgggatttttcgattttataggtgaagttgattctgctatgagagcagtagacgcggcaatgatacttgtagatgcatcgtcagggattcaggtaggtactgaaaaagcctggaattcttgcaagcagtacaatatgcctaaaatgtttgtaatcactaagactgataaggaaaatgtgaatgtggatcagacaatagctgatcttaaaaataaatttggaacatcggttgttactcttgatgacagagaagcattaaatgaagctattgccgagactgacgaagagcttatggaaaagtatttcggcggcgaagaatttactgacgaagaattttcaaagggtcttttaaacggcattgcagaaggttcaatagtacctgttctcacttgctgctcgctgaaaaatgaaggcgtaaccgaagttctcgatgcagccgttaaatatctgccaaaggcaagcagccacgcgccgtacacgacggttgacggtaaggaaattgcagcggatccaaacggcaagccagttggatatgtattcaagactatcgcggatcctttcctcggcaaaataagcttggtgaaagtgatttccggtaaacttacaaacggtatggagctttacaattccagagccgagaaatcagaaaaaatcgcctcgatgttctttatgagaggcaagagccagggagaatgcccgtcggcggaagcgggcgatatcgtagctatcgcaaaacttcagtttgcacagacaggcgatactctttcggataaggcaacagcggcagagctgccgagagtagactttccgtcgccttcgctctatatcgcagtagagcctaagacaaagggagatgatgaaaaggtcggcacaggactcaataagctgatggaagaagatccgtcattcaagctcgagagaaattcggagaccaaacaaacccttctcggagggcagggagaaattcagcttggcataatcacagcaaagctcaaggataaattcggtgttgaagtgcagacagtcccgcagaaaattgcttacagggaaacaataaaaggttcgtccgatgtacagggtaaacataaaaagcagtcgggcggtgcaggccagtatggagatgtacatatcagattttcgccgtcacagcaagaatttgaattttcggaagaacttttcggaggctcaattcctaagaattatgttcctgctgttgaaaagggattgctcgaatgtatgaacaagggtcctctggcaggttgcaaggtagtaaatgtaaaagcagtgctttacgacggatcctaccatgatgttgattccaacgaaatggcatttaagattgcggcttcgcttgcctttaagaaaggtatcgtggaagctaagccttgcttgcttgaacctgtaatgcaccttgagatactcattccggatgagtatatgggcgacgtaatgggtgatatgaacaagcgccgcggcaagatcctcggtatggagccgcagctcggaggcggacagaagctgatcgctgaagcaccgcaggcagagctcttcgactatgccatcgtgctccgctctatgactcaggcaagaggaagttttacaatggcttttgaaagatacgaagaagtgccggcacagcttgcggaaaagatcatagcagcgcataaggaagaggaagaagcatag

SEQ ID NO: 1049 - DNA, 1911 bp, Unknown
  Unknown gut bacteria
atgcttgattttgaatttgacaggatgcttttcaacattccggtaaacgaacacaaacctgaaaaaatcacagagattttaacaaatcacccggaagtcaagtttgtatctttagtaggtattgatataggcggccacgacacggacgaaaaaattcccgtggaattattcctcggaagccttgaaaaaatactggctcatggagtacagaccgatggaagctcagtagtgcttccgaagatagcggatcttaataatgccaaagtcgatataataccggaccttagtgtaaattggtatgtagactataattacaatcacaaagacaagaagacggagctcccggtagggacgctccggattcctgcttttcttcttcataacgatactaatgaagtgggctcgcgggtgatactgcgcgatgcggtgagaaattttaagacggatcttatcgaggttttaaagaataatccatatgtatttgaatatttgccgatagaaagtgtagacgagattgaagatttaagtcttacatgtgcaactgagcttgagttttgggtaaagacgcccgatgatgaagcggacagagaacagctttcgacggcacagagcctcaaagagcagtattggaagagaacgataggacctgtaagaacagcgctcgaaaaatcgcttatggtgttgcagcagtatggctttgagccggagatgggacataaggaagttggcggagtaaaggccaagatgggacattccggagactacgatcacattatggagcagctggagatagattggaaatatgcggaggctttgcaggctgctgataacgaaaatatgataaagtacatagtaaaagatgtatttcgtgcgcacggtcttgatgtaacatttatggccaaaccgatgacgggcattgccggaagcggagagcatacgcatctcggagttgcggcaaagcttaaggacggaagaaagataaatcttttctccggtaaggataatgagtttatggggcctatcggttttggagcgctgcttggaatactcaagaactatgaagttataaatccttttgtaagcgcgtcaaacgacagccttaacagattaaagccgggttatgaggcgcctgtctgtactgtaacttcacttggacacacagttgaaaaaccatccagaaacaggacggtgctcatcggccttgtgagagagctcggaaacccgctggcgactcgttttgagctgcgggcgccgaatccaaagagcaatacatatcttgtaatagctgcaagctatatggcgatgctcgacggtatcaaggcttcacttgcggcaaagaagagctcggatgatcttcttgcttcgctctcaaagaagtggggagatgaggacttttaccttgaaaaggacagagaatacaggagcgagcgagaggtatttgaggaatttactgaggaagagagaaataagctctttggcagagctcctgctaccgtgtgggaaaatatcaatgcttttgatatttatcccgaaaagctcgaagtatttaaggcggacggtgtaatgaatgacctgacgcttgagtcatataaggaagcgataatatcgcagtgggctacggagcttcatgacaggattattccgaatagcatggaaaccgtaaggcgctgtgtaaagctgcacgatgatgatgactgtactaaccttgatatttcaagatggctgcagatagatataaagagaaaagcgataggcaaagacagtataggtaacaaatgtcttttgacgagaataaaagaggccctcgacataggagattatgagacagcgtctgatcttcagatagaaatgcagaaagctgtggaagatcttgcggagctttatataacctacagaaaaaatcttttttaa

SEQ ID NO: 1050 - DNA, 2181 bp, Unknown
  Unknown gut bacteria
atgaacagctttgttaaggcacacaaaacggtgagcgtgattgcggcaatcgtccttgtaacggttattgcagcgggagccgtactcggaaacagaatcgggattgaaaagaaaaataagacttatgatatcgttcttgactacgctgaaatagaaaagatggcagaacagagcgagcttgacacgagagaatggctttcggaatttaaggatatgggtataacgaaagtcggacttcaggaagagaatataatgacgcttatggaagagtcgtggatgcccgtaactggagaagttatgggtaatgtaatggagaatgcttcgtggcagagcgagcttccagaggcgtttatgcaggcggtcagcgcaaagggcggatttgaccgttttgatgtgcttgtaactactggaaacagcgaagcaacagaatttttaagacacggaattactgagagatttcagcctgaaagatatgaagtgtatacggaaggcgacacaggatatttttggatagacggaacatccgatacgactttgtattcgcagcaatacaaatatatgaattcacaggcgggaggatttatcgagaggatagatcttgaaggctcgaagataatgtacataagccttggtcttatgccggaaaaggtagagacgatacagagctgcggaatggatataattccaagaacactttcatacaacggttggaatgatacaaagtatgcgcaggcagtggtagcggaatacgaaagatacggcataacaccggagtatataatagtaggcggtgaatcggtaatcggttacgatgatggcattgattttgccaaggactatatactcgataatggtgtgacgataggacttatcgaaaacacaacgcagcttcagaatataatgcagtacggtgtgtcagaggttgcgcaggcgtcgggatatgatacggtgagagttttctccgtatggaattatatacaatacaggtatcagtattacggatatgagggcgcaaaagaaatagagaatacgctcttcagggcggtgacggaaagaaatataagggtaatatactttaagcctttcctgcatcttaaagatcttcatacgtatgtgaccaatgttgatgaatatagagaaatgttcgacaatctcgaagcgagactcgcaagacacggatttagcagaggatctgcttcggtaatggatgattacagtgtacctgtacttgctaaggcggcctgcggcataggggctgcactcggagcagtgctgctgctcaggagtatattgagaatgaaagataagtggctgcttgttctttctgtgctcggagtgctcgcagtagcggtagcgtattttgtgatgccgaacacggcggtgcttttgacttcttttgcatcggccgtggtatttggatgtcttgctataacattttatactatgcgggcgcggctggcagcggaaaagctcagttccgatacgggcgcagttaaaattatggtttacgccgtagtaactcttgtcatttccgtaataatttctttaatcggcggcattatgacggcggcacctataagcagtacaagctatatgctcgaaatagatatttacagaggcgtaaagcttgcacagttgattccgattgcatactttgtagtcgcattccttgcttattacggctatggcgcgagaaagcagcatattgggcatcttgaatggagcgatatcaaggatcttttcaatatggaaataaaggcgtggatgatgattgtggcggcttttgtctgcggtatcggtgtttactatataatgcgtaccggtcacgattcgtcgatagaggtttcaagtatagaaatgctttttagaaacaaacttgaagaggtgcttatagcaaggccgagaaacaaagaattcttattcgcttttcctgctgttatgatggcggtttactgttcggtgagaaagcttaagctgtggacactcgttttcggtctcggcggctcaataggaatggtatctgtgataaatacatttatgcatataagaactcctctttatctcggatttacgaggacggcttattcgcttcttttcggatctgtgctcggactcatcgcgattgcagtgttcgatgcactttataaactttatttgaggtatttgaagaaatatgtatag

SEQ ID NO: 1051 - DNA, 5307 bp, Unknown
  Unknown gut bacteria
atgcagaaaatgaaggttttcagacgcctgacggttttgctgctgatcgtgtgcctgttggccgggatcgcggtgcaggccgtcgatgtgtcggagcgtgataccaccgcttccgtgcaggaggagcagaacggctccatcgacacggctgcggcgcagaaggctctgacggaaagacgtgcgcaggccgggctgatccgcgcgtcggcggatgaactcgacccggatcaggagatccgtgtgatcgtggaaatggaggcgcagcctgctgtgcagagcgccgccgtccagagcatgggcgcggagctgaacgcgcagctccagtctgcggaggcgcaggctctgcgcgcacagcagaccgtgatccgcagcgcgaaggcgatcaccggcaacgacgccatccagcagacggcgtatcttgtcaacacgttctcgatgaacatgacgcccgccgagatggcggaggtcgcggagcttcccggcgtcaagtcggtctctccggtcacgacctttgaaatgaagatgaattacgcttcccacatgacgacggtctataagatgtgggaggagatgggctacaccggcgagggcacggtgatcgctgtgctcgacagcggcgtcaactgcagccatcccgatatgaagctttccgacggcgcgaagatccgcatcacggagagcgacgccaaggctctgatccagaagctcggctacggcacctattattccgataaggtcccgttcgcctacagctattccggctactatgagatggacaaccattccaacacgcacggcctgcacgtatccggcatcgctgccggcaacggcggtgaggacggcatcacgggcgttgcgcccaatgcgcagatccttggccttcaggtgttcggcatgggcagcagcgccttcacggatgacatcatccgtggaatcgaggacgccgtcaagctgggggcggacatcatgaatctgtccctcggcagcaccgcgggcttctatgacgacgtggcttacctccagacagcgctccagtgcgcgaccaacgacggcgtgctctgctgcgtagcggcaggcaacgacggctcgagcgcttcgctgctcggcatcaacacaaacgatttcggtgttgtggattccggcgcggtctccgctccgagtactgcacccggcgttctgtcggttgcttcggtcaacaacacctatctcaagggcaacaccatctccatgacggatgctgccggcgctttgcatgaggcgacagttttcaatttctcgcagctttacaacacagtgcgcgaggagaatccgggccgctacggctgggaaacgctcaaggacgttctgctgatcgactgcggctacggcacgctcgacgagctgtttggcagcgttcagcttccgagcgacgactccaagtgggtcgcggtggtacagcgcggcgatatttctttcgaggataagatcaatttctgctttatgctcggcgcatccggtgttgtgatttacaacaacgagccaggcagcgaggtaccgttcaatgttggcagcggcgacgcagctacctcctggagcaagatttgtcagatcatggtcagcaacgacttcggcaaggagctgctggcgtttgcagccaaaggcgagcgcgtgacattccacgaactggagaccaagttccttgctgccgcagacggcggggaaatgagtaccttctccagctggggccccaccccgtcgctggacatcaagcccgagatctccgcgcccggcggaaacatctattcgatctcttccggcagcggctatgaggtcatgagcggcaccagcatggcgacgccctatgtctccggcgcttccgcgctgacactccaagcggtcaaggccgcgcaggaggcaggcgagctgtcgctgaatggcatccagatcaatgactatctgaagcttgcgctgatgaacacggcggatatcatttatcagcccgacggcgcgacaccgtattccgtccgtcagcagggcgccggcatggtcgatccggtcggcgcggccaagacccgcgttctggcgactgtggacggcctcggcggcgctgccctcaaggagatcggtaccgcggccagcttcatggtgaccctgacgaactatggcactcagccgcagacctacacgatgactcccgatgcgctcttcaccgactgcacggcggagaacggcgactataccgtcaagcagatctccggtgcgcagatcacctacagcgcctccagcgtgaccgttcctgcgggcggcaaggcgactgtgaacgcgacggtgagagtcggctctgcggaatacaaccactatggcgaaggcttcgccgtgctgcacggcgacggctgcgaggatctgagcctgccggtactggcgttctacggcgactggtacggctgcgagcggatcattgacgagccaagctacaccggcgagagcatctactttgagactaccggctatccctcgaccggcgtcggctccggacagttcgtttccggcgtcacggcggagggcgagatcgatcccgagtacatttccttctctccgaacggcgaccgcgatatggagcaggcgttcccgctgctgggtatgctccgttccgcgcagacgctgaccgtcgaggtgacggatgaaaacggcaccccgctgcgtaccaacatttccgcaacgcagatcccgaagctgctcggcgtcgatatttcgagcgcacaggctggctatacgatgctgtcgatcagcgatttctatgcgctgacctacggcgagtgggacggaaccgtctacaacacccgcaccggaaaatacgagctttgccccgagggacagtattacttcctcgtgacggcgaccatgcccggcagcgatcacgaagagacgactaagcttcccgtcaagctcgacatcaccgcgccggagatcgacgttgtgtccgctgactatgaaaacggcgcgctgacggtgactttcagcgtgaaagacaatgtcggcgtttacggtgagatcgaggtctatgtcaatggcgagagccagtacgtcctgctttccgactgcgtctatgacgaggcgaccggcctgtacgcatgcacgctcgaagatccgtacagctatcgcacgggcgagatgaacgagatcggcgtgttcgcgcaggactacgcgatgaacagaaccgcagcctacctctacaccggtgtggacgagtcagcggacatagtttattccactctgacgaacaccaaggacagctggttcgacagcttccagctctatgaccgcagcgacctcggtgaaatgtactccgagagtgagattgcggagctggtgttcgattgggatatccgcggcagcgtcagtgagcgtgttgcgtctctgaccattgacggcgaaaatgtcgccatcaccgcaaagcacagcttcgccgtcaagaagtccgttgagccgggcgagaatgcttttgaggtcgttgcaaaggatgcctccggcaatgtcctcgttcaggaaacgaagctgctctatctttcgaccaaatccggcgttgcggcacgtatctatccggaatgctatcccgaccgtatgtcggagctttgcccggagaccaatcgtcccgcgaacgcgtggctcgatcaggcgggcttcggaaccggctggagaaacgctttcggctatctgacgcactataagacggtcgcaccactggtgttcgagtgcagcgacccgatcaaggaagtctccatcatttattacgatccggatcagacgctcgccggcgacgcgctgatgcgctcttatgacgagacgatctacatggaggacgtgaagtacaagaccatgacgctcacgcaggatgactttgtggacggcaaggctgcgttcgacatgccgatggtcccgtgggatctggatatgtcggattacatcaacatcgacccggcgaattacccggatactcgtgtcaacgagtgctacatcacggtaacggacgttctgggtgtcaagtctttttactttgtgcgcgtcgaaaacgacgatgtctgccgcctgtatgaggaccgtggccagatcgaggatatgaacattcttgacgatccggacagcatcgtaagcctcatgggctttgaatggatcaagccgatggatgacatggagttcccgttcgtgttcacgccggaggatctcgattccaatggatgcatccatgtgaccggcaaggctgcggacgacgcagttctggaggtctacgcaaacggcgaatatgtgagtctggacgatccgatggaatttgcgtttgacttcaagctgaatgtcggcgtcaactatatgtccatcttcacggtcgaggaattcggcaccactagcagcaccacctatcgcctgttctatctgccggagccgacgacggtcacgtttgaccagcctgaggttgccgacggcgcgaccatctacaccacggacgacagcttctatctgagcggcagcgttgccagctacttcgacggcagagagcttgccatcaacggagacaacgtgatctttgaggacggcgcgatctcgacgccagcaggcaagcgccacacggccggcttcgaaaaggagatcgcgctggatcttggcgtgaacgtcgtcacggtcgagatggtggacgcggccggcctgaaggtcaaggtcacgtttacgatcatccgtctgaacgaggattatgagactaccatcgtgatcccggcccgtccgggcgcaggcggctcggagttcccgttcacggatgtgggcagaaacgacgattgctatgacgcggtcaagtatctgtacgagaatgagatcatgaacggcacgagcgatacgctgttcagcccgaacgcggagctgacgcgcggcatggtcgtcaccatcctctacagaatggagggcgagccattcacgctgggcagcaagagcttctccgacgtcaaggccggacgctactacagcgaggctgtggaatgggcggctgagaacggcatcgtcaacggcttcaccgacggaaccttcaagccggatcaggctgtgacccgcgagcagctggcgtctatcctccgccgctatgcaagcttcagcggcattgcgacctatgatgcagagctccccgcgaacgcgtccgtctccaactgggcaaagaaggatgttgcatgggcttacgccgaaggcatcctgacctccgcacagatggcggcagctgcgaagaatgcgaaccgcgccgaggtcgccatggcgatctacgcttacctgaccggcacggccagataa

SEQ ID NO: 1052 - DNA, 1938 bp, Unknown
  Unknown gut bacteria
atgacgcaaaatttgacgaaaaagcaattattggacaggctgaaggagatctgcctcaacaccttcggctgcacgctcgaggatgcgacggaaaagcagatgtaccgtgtggtctgcctctatacgcgcgtgctgatggaggagaagcgccgcgcgttccgcaacgaggtgcgcgaaaaggagggcaagcaggtctattacatgtcgatggagttccttgtcggcacgtcgctgcgaaacaatctctacaatctcggcctgctccggctgacggacgaggtcttgcaggagcagggcttctcgctggagcgcctgtgcggcatggaccccgacgcgggcctcggaaacggcgggctcgggcggctggcgtcgtgctatatggatgcggcgtccgggcttcgctacccggtcacgggcttctccatccgctatgagttcggcatcttcaagcagaagatcattgacggctggcagatggaattcccggacgactggctggaaatgggcgacgtgtggctgcatacccgcaaggatgaggccgtcgaggtgcgcttcggcggacatgtccacgagtgggtggacgaaaacgggaaattccgcgccgcgcagagcgattatcaggccgtgacggcggtgccgcacgacatgttcatctccggctaccacagcgacgcggtcaacacgcttgtgctttggagcgcaagcgtgccggatagctttgacatggcagcgttctcgcgcggggattacgtccgcgcgctcgagcgcaacacgatggccgagaccatctccaaggtgctctatccggccgacgatcacatcgagggcaagcgcctgcggctgcggcagcagtatctgctggtttccgcgtcgctccagagcatcctgaatcagcatttcaagcagtatcatacctaccggaacctcccggataaggtcgccatccacatcaatgacacccatccggcgctgtgcgtgccggagctgatgcggctgctggtcgatgagcacgactattcgtgggaggaggcgtgggacatcacctgccggacgctctcctacacgaaccacaccgttatgcaggaggcacttgagcgctggagcatcgatctgttccgcgagcagctgccgcgcattttcggcatcgtgcaggagatcaaccgccgcttgatgctgcatctggcgcaggtctatcccaacgaccccggaaagtgggagtatatggccgttgtgtcgaacggcgaggtgcgcatggcaaacctctgcctggcctgctgccatatggtcaacggcgtttcgaagctccatacggagattttggagacgaccattttccgcgactactataacctgaatccgcagggctttacgaacgtgaccaacggcattgcctaccggcgctggctgtgtcaggcaaacccggagcttacggcctatttgcaggagctgatcggagacggcttcctggacgacgcgaacgcgctggaagcgctgctgaaatatcagggcgacccggcggtgctggcgggattgcggcggatcaagcacacgaagaaggagcagcttgccgattatgtcgcgcggacgagcggcgtcctgctcgaccccgacagcctgttcgatgtgcaggtcaagcgcctgcacgagtacaagcggcagcttctgaacgtgctgcacatcctgcacctgtatctacagatcaaggatcatccctatgagccgtttgtgccgcgcagctttgtctttgcggcaaaggcttctgcgggctatgtccgggccaagcagatcatcagcctgatcgtcgcggtctcgaagctcgtcaactccgacccgcagacgcgcggcaagctcaaggtcgtttttgtggaggactacaaggtctcgctggcggagatcatcattccggcggcggagctttccgagcagatctccattgcc

SEQ ID NO: 1053 - DNA, 2850 bp, Unknown
  Unknown gut bacteria
atgatcccggctgcgctggctgcacccgtaagcggagtcacgctgaaccagaacagcctgaatttgaagcccggcgataccgcgacgctcgtcgcgacggtcgctccggacgatgcagacgacaagacgctcacatgggaatccaatgataccaatgttgtgaccgtttcgaacggcgctgtctccgctgtcggtgcaggctccgcgaccatcacggttaccagcgcggctgacaacaccaagactgcgacctgtgctgtcacggttgccaaggccagcctgaccatcgagaacccgaattacaccgttcccgcagttgccatcggcactgacctgccccagcttcctgcgactatgcaggcaaagggcgagggcgccaacgccgcgatctgcaacatcgcatggaacgaagcagacgtgcttgcgtacaacaagaacgttgctggtacctatgtgatcaatggtattgcatccctgagtgctgaggacgacgccaagtacaccctgaccagcaatgccgtcaccgccaccatcgtggtcggcaataccccggtcatcaccatcggtcagcccgtcccgcaggacatgaagatcaagaagggtgcgaccaacaagacgcttcaggtcgtcgctaccgctgcggcaggcgacaagaacctgacctccgccatcacctatcagtggtataagtccaacggtatcggctcctatgtgcccatcaccggcgctaccagctccgtcctgaccatcacggacacggcgacggcaggcaagactacctactactgcaccatgaatgtcaccgaccccgacacgcagctgaaggccgcctccgtcagcacgacgccggtcaccgttgaggtctgcgacgcctataaggtcacgctgaccaccacgtctattacgccgctgaacaccagcgtcaccgtcggcacgaaccccgtcatcaccgcgaccgttcaggaattcgacgaggcgaagagcgactacaagcaggctctgaactacaacaccctcgtgtggtccacggacgcttccgcctattacgcaacgatcgctgcgtctctggcgaacaacaccgcgaccctgacgacgaacgccgtcaacaacaccgccggtatgaccgtcaaggtcaccgcgacgatcaaggacaccacctgtgccggtacgctggatatccgcgttgttccgggcgctgcctctgacatcaccttcgcgctcaacggcgccagcgcgtccttcacaaaggatccgtttgcgaacgctgtcagcgccgttaccggcggcacgcagatgaagttcaacgactacatctactacaccggcggcaagacgctttcctatgtcgtgttcaacacgccttacggcggcgcactgtatgctgccggcaccactacgctgctgccctccggcacgaagtgctactacacgccttcgaccgcgctccggcagtatgctctggaaggcgtctactttgttccgacgacctcttccagcactccgtacgttacctacactgcttatgacgccaacggcggcatcatcgccaccggcaaggtcgttatccagggcgccagcgcggacattgaatacgatgtcgcagccggtcagagtgtccgcttcgacgaggacgacttccagaagttcttcagcgaagcctacaaccgcggcacgctgagctatgtcaagttcgacacgagctatgacaagaacctgaacaccagaacctacggctatctgtacgagagcagcgacagaaacgcggatacggtcgacagccgcaccgagtactgctacaacgcgacctcccgtcagtatgatctggacaccatcgtctttacggcaggctccagaaccagcaaatacaccatcaacatcccgtttgttgcctacggcaccaagtccaacggcacgagcgctcaggtcgagggcaacgtagccatcaccgtcaacgacggtaaggtctcctccatctactccatcggcaccagcttcaagggcgatctggtcaaggccatgactcccgagaacgtcaccaacagccagctggccagctactatgtggtctttggcgatgtgaccaacggcagactgtactacgcctatgacaccattgcctccgcgaaggaagtcaccaacaagctgagcttcttcttcagcgccggcagaaacgatctggctctgtccgacgtctactttgtaccggcagccggtgcgcagaccgcaaaggtcacctacaccatctatgacggcaagagcaagatcgaaagcggctccctgtccttcaacattgttcagcagacgaagtccaactacttcaatgacgttactgagagcaacaccggcaagtggtccgcaaacgcgatcgacttcatgtcctacaactctctggtcaacggcactgccaacaagagtttcagcccgagccagaccatgacccgcggtatgctcgttacgatcctgtaccgtatcgagggcaagccgtccgtcaacgtctccaacccgttcaaggatgtggacaagaacagctattactacgacgccgttctgtgggcttataagaatgacatcgtcaccggcacctccaagtccaccttcaacccgaacggcgcggtcacccgtgagcagatcgcggcgatcctgtatcgctacgccggtaagcccagaacgaccggcactctgagcggctactccgacagaagcaaggtcagctcttacgccgagacggccatggcatgggccgtcaaggaaggcatcatcaccggcaagtccgctaccacgctggatccggccggtaagggcacccgtgcggaggtcgcggtcatgctgtaccgctacctgaccaagtaa

SEQ ID NO: 1054 - DNA, 1362 bp, Unknown
  Unknown gut bacteria
atggactatcgttttgaaaatgtaaatgaaagtgaaaatgaaaaccagggctatcagccgcagtatagctatcagccgcagccggacaccgctccggaagcaccgcaaaagccgaagaagaaccgcaccggcgcaaaggtcacggcacttgttctgagctgcgcactggtcggcggcgcgatgggcttcggcggaagcgcgctccagaatcatctggccgcgaagaacgcagacaccgaggaagcgcagcaggcctccgtcgtctatgagggaagccgcgaaaccagcgtcatcaacatcgcgcagatcgacaccagcaaggaaatgacgcccgccgaggtttacgcacagaacgtgaattcgaccgtcggcatccgcacctcaatcaccacgaactactggggctatcagacccaggccgctgcggcaggctccggcttcatcctgagcgccgacggctacatcctgacgaactaccacgttgtggaggattccaactccatcaccgtttcgctttacgacggcacggaatatgacgccacgctcgtcggctgcgacgagtcgaacgacatcgccgttttgaagatcgacgcggagggcctgacgcccgtcgtgctcggcgactccgacaatctgaacgtcggcgatcaggtcgtcgccatcggcaatccgctcggtgagctgaccttctcgctcacgaccggcgttgtcagcgccctgaaccgtgaggtcacgctttccagcaatgtcacgatgaacctcatccagacggactgtgccatcaactccggcaactccggcggtgcgctcttcaacctctacggcgaggtcatcggtattacgaacgccaagtattccagctcctcctcgagcagcgaggcttccatcgataacatcggctttgccatcccgctgaaccatgtcaagaacatcgtcaaaagtatcatcgagaccggcagcatcaccaagccctacatcggcgtgacagtcagcagcgtcagctcggaggctcagggctacggcctgcccaccggcgcagccgtccgttcggtcgaggcagattctccggcagccaaggcgggactggaagaaaatgatatcatcacagaggttgacggcactgccatcaactccagcacagagcttgtcaactacgtcggcgaaaagacgcccggcgacgagctgaccttcaaggtctatcgtcagggcgaagagctggagctcaccgtgaccatcggtgaaaagacgcagtcggcaatgcccaccacgacaacagacgacgcccagcagtcccagcagtcgcagggccagagccagcagggcggacagttgttcccgtggggcttcggcttcggatattga

SEQ ID NO: 1055 - DNA, 2055 bp, Unknown
  Unknown gut bacteria
atggcttcttataatctgaatgaggtcctgaaaaagaaaaatgctgagaaaaagcagcagagcggcaatcaggaaatccatctggacgacgtatcccgcgtcaaggtcctttctccgggccgtcaggtcctgaagcgcttcgcccgcaaccgcctcgcggttttcggaacgatccttctgctggccatgttcgtgttctccttcctcggcccgattttctatccgtatggacagaagcaaattttctataagtacgacgcgatgaacgtcgattacgcgcaggccaaggacaatacgacctacaacggctatgttttcgacgattccgtggagattgcgactcacgcgaagaacaatatgaactccagcatcaaggtcatgcaggccaacgatctgagcgattatctcttccgcagcggcgatgagttctacaagatcaccaagctcggtgacaacatctatacgcttggcagcgtcgatacgcagaaggtctgcgaattcggcgatacctcgacattcatcggcacctactccatgcttgaaaagagtatgagctacgccggcgaggcccttggcgatgcctttgaggcggagcttggcccggccagccgcagcaaggaagcgacctttgagcttgacggcgtgacctacacgctcgaaaagagcagcaagggcaccaagaccttcgatgtctacgcgcaggcctccgatgccttccagttcactggcgaggatctcggcgacgacttcaaggccgaggctgaaaaggcggtcgagggcgacagcacctttacctacaacggaaagaattatattgttcataccgacggcaccctcagcaccggttatgagctgggcgaggcccacgacgccatcgtctacacctgctatacgctggatatgtatgagaacggtgcgaaggcctccgattccttccgtaccaacgccctgctggcggcctactccaccggcgagttcgaggcggacggtgcgaagtgcaccgtcgtgcatgaggacgacggcgctctgatcgtttacgatgccaacggcgctgaatacgctgacttcaccaccttcgtcattcgccgctacaacggcgacgacacgatggattacagcctgaagaacgcgctccgcgaagcgatcgaggaaatgaccgcgcgcggtgaacatgaaaccacgctcacctacgctctgccgcagcagaacgaggccggtgaatactcctacgacgagaacggcgcgctccagtacaacgagacggaaatgaagatcacgcagaaggataccggcgattatctcatcaactgcgaccagatcatctaccagatcgatatgtatgcatcgccctcctgggagcacatcctcggtaccgatggcgacggcttcgacgttatgtcccgtatcatgtacggcggccgtatctccctgatggttggctttgtcgttgttttccttgagatcttcctgggcatcatcatgggcggccttgcaggctactacggcggctgggtcgataacctcatcatgcgtctggtcgatatcttctactgcctgccgtccatgccgatcatgattatcctcggcgccatgatggacgcgctgagaatgaacacctacgttcgtcttatgattatgatggcagcgcttggcatcatgggctgggccggtgtcgcgcgtatggtccgcggccagatcctcagcctgcgtgagcaggagttcatggtcgccaccgaagcgaccggcatccgcgtcaaggatcgcatcttccgccaccttgtcccgaacgtcatgccgcagctgatcgttattgcgaccatgggcatgggcagcgtcatcctgacggagtccacgctttcctacctcggcctcggcgtcaagcacccgctggctacctggggcacgatcatcaactcggtttcctcggcgtccgctatggcacactatgcattcatctggatccctgtaggcctgctcatctgcctgaccgttatcgcgttcaacttcgtcggcgacggtctgcgtgacgcctacgatcccaagtcgaagcgctaa

SEQ ID NO: 1056 - DNA, 2412 bp, Unknown
  Unknown gut bacteria
atgaagtcggataaattgcaggacgccatcggcgaggtgaaggacgagtatatcgccgacgcgcacccggaggccgccgcgccgcagaagaaaaaccgccgcatcgtatgggtcgcggctgccgccgcactggcgcttgtgtgcggactgggcatctacgcattggttggcggaaggaacgccggagagagcgtgaagccgggcttcgcgacgcttgaggagccgaatgtcaagccgtcgaagccggaaaagcagccggatacgccggaaaatgtacagggagcggacgatccggagcaggaggagatcgtccttccggcgccgcaggaaattgagctgcgcgaaggcccgaccgcaagcggcgaggcccccgcgcgtcaggtgcttctaagctttacatcgcccgcgcagccggtcacggcctcgctgccgcagtattctgtgtcggcggacttgagcagccttatgaatctcgatcagttcggcgggctttccgacgaagccaagcagaagctggcacagaacctctttgtcgtcacaggcaggtacggcaatgaatttttcgagctgtatgaggataaccgttacttccagatcccgaatttcgtgacggtcgattccctgatgcacacctatcacctgtatttcagcctgcttctcaaccggacggagaaaaatgagctggctccgaagctggcggagctgagccgcgcgatgcttgcggccagcgagaagcagtatgagcagctgaagggcacgcagtggaaggacgccgcgctgcgcaacgtggcctttttctccgttgcggcaagcttgcaggagccgtcgatccagctcccggactatgcggcggatatggccgcgcaggagtgcagcgccatctatgctgcctccggcattgacatttcggagctgacgggcgattatctggactacagccagttcaagccgcgcggctactatgagggcgacgagacgctcgagcgctacttccgcgccatgatgtggtacggccagatcaacttcacgcagaagaacgacagcctcaaccgcagcgcgctgctgatgacactggcgatgctggacacggacttcgatacctgggagaagatctacaccgtgacctccttctttgccggagccagtgacgaccttggctattatgagtatgagccggccatcgaggaggcctacggcggcattcccggcgcgtacacgctggcgaccgacgaaaaggcctatgcgcgctttgtcgagctggtcgggcagatggatccgcccgccatcaattccatcccggtctgggagggaacggaggacattccggagctgaaaaagggcttccgctttatgggccagcgcttcacgatcgacgcctccgttatgcagcagctggtctacagcgccgtcgatgaaaacagcagcggcgaaaagcgcctcctgccggatacactcgatatgcctgcggcgctcggctcggatacggctctggacatcctcacccagcagggcgagacggattatcagggctacagcgagaatatggcgcagctgcgccagtcgatccgcaatgcgcccgaagggctctggtcggcaagcctctatgccagctggctgtatacgctcaatccgcttctggaggagaagggcgcaggctatccgtcctttatgagaagcagcgagtggcagaaaaaatcgctcgagagctacgcgggcagctttacggagctgaagcacgacaccgtgctctattccaagcaggtcagggcggagaggggcggcggcccgcaggaaaagatcgacgaccggggctatgtggagccggagacggaggtctaccgccggttccaggagctggcgcagcagacgatggacggtctggagggctatggaatgctctctgcggacgagaaggaaaatctttcgcgtctggaggagctggcggcgagcctgctgaccatctcggagaaggagcttcgcggcgaggttctgacggacgaggaatatgagctgatccgcgcctatggcggcacgctggagcacctctgggacgaggcggtcaaggataaggcagacagcgaatggtacggaacgcaggaaatgccctccgcgctggtcacggacattgcgaccgacccgaacgggcgcgtccttcagatcgcaacgggccgtccgtccgtcatttatgtgattgtgccggtggacggaacgctccgtctggccaccggaacggtgttcgacttctatcagtttgagcagccgctctccgaccgtatgacggacaccgaatggcggcagaggatcggtgtctggatgtcagaggaaggcacctacaactggaacgctgttgtggaaaagccgtggtggacagccagctaccgcgtggagcaggacggctataacgcgtactga

SEQ ID NO: 1057 - DNA, 5412 bp, Unknown
  Unknown gut bacteria
aaggatgccgacctgtccgacgcctacggcgcgatctgcggcggctatcccgcgctcaggtggcagaagaacgtgaccttccacgaggcaaacggcgagggtacggtcgttgccgcgctctgcacggtgaagggctatacgcgctacacctgctccaagtgcggcgagagctaccgcacggcgtatgtcgcggcgcgcggccatgacttctgggaggacaccgagggctgcgcggactgcgtgctgaccccgccgacctgcaccgaagcgggcaagatcgtccgtacctgccgcagagacggctgcaccgagacgaaggaagacgttgttccggcgaagggccatacgcccaaggccggcagcgagcaggtattcccggcctataagacctatatctgcgacgtgtgcggcgcgagctacacggtttggaacgacgaccgtctcggccacatttccttcccggaatcggtcgtaacgacgatcaccgctgcggacgagggaagctatccctggatcttcaacagcgagaccaaccgttttgaaagcagcaatcaggatgtgaacagctccgtttccaagacctccttcagctttacgctgaatgcgtcctgcgcgctgcgctttgactacggcgtttcctccgaaaacggctacgacaagttcaccatcacattgacggcggacggctcggaggccgagacgctggcaaacggcatcagcggcgagaccaccggcagcgtcgataagacgctcgaggccggaagctatacgctgacccttgcctacagcaaggattccgcatccaagagcggctctgataccgcctatgtgagcggcctgacgctctccggcatggttcgcgtcattgtggaaaacacgaccttcccgaaggcgaacggcgctgcatgggacggtacgctggtcgataaatgggtcgcgctgaacagcgattcgaccatgatgaccagcatcgtcgcggcgctggacggccacacggtcgagggcgcggacagcggctacatttcctccattgatggcctttcccagagagacggcggcagcatgtccggctggatgggcacgctcaacgactggttcaccgacagcggcttctccgatgtgaccgctgcgtccggcgcgctggagaccggcgacgagatccgccttatgtacacctgcactgtcgtggatatcggcggcgactgggagagcaccgatacctccctgaaggcgctcaccttcagcgaaggcacgctgaagcctgccttcaccggtacgacctacgcctacaccctgaatgtccccgaagccacgaccgcgcttctggtcacgccgacggcggccaataagaactatcaggttcgtacttatctcggtacgcagaccaacggcaagcagtacaagcgcaccgcgatggtgcccgtgcaggacggcagcgtcattaccgtcgtctgcgccgatcccagctggcccaccatgaacgagggcagcgacggcaaaaagacctatacggtcacggttcgcgtcggtgcggtcaacacggctccggccatcaagagcggcgttgtcaacccggcggaggcgtctgtcacgctcggcacggcttggacgctcgacctgtccacgatctttgaggtcgcggacaatgacacgctgacctatcaggtcaagatcggcaagtacgactggccatctgcaagcgccggcttcacctatacgcccgctgcggccggtgtcacgacgcttacctttaaggcaaacgacggcacggaggattctccggagtacaccgtgacgctcaaggcccgcaccgaggcgactgcgcatgtgacgctttcgcttcaggcggagaacatgtttatccagaagcccgtgcgcgtcgaggtctcgagcggtcttgccgagagctacggctacgcggacgcggtgctgaacggcgtttctgcgctggacgtgcttgtccggctgcatgagctgaccttcggcgacgattttaccgccgagaccaaggagacctaccttgctgtgagcaacggcacgatcaccacggtcaacggcgaaaagacctctgcgttcagcttcgcagtggacggcgaatatccctgcgacaagaacggcgagtacaacacccagtacggctataccggctataccatcagtcaggcgccggtcggcgaggacggaaacgtcgaattcttcttctatcaggacaccagcatgtacatggactattacacatggttcgtggatgaagaaggaaaccgcctgaatatgctcaatgccacggcaggcgagagcttcacgctcggtatgcagggctatatgtacgcctacggcggcggcctcaagcccgaggaccgcgtgacgcacggcgcgtcctgggatcccgaggatacgcagatctgcacggtcgatgaatacggcgttctgactccggtcaccggtaagacggtcggcgcggacggcaaggtcacgctttccttcgcagcggccggcacctatgtgctctctgcaaagggcgacgaatacaccgacatcgtttccccgtggctcacggtgactgttgccgaagcgcctaaatcgagcgacgcaggcgtcacctccgtcacggtcgcaggtactgcggcgcaggccggtgaaaacaacagctactccgtgacgcttcctgccggaacgaatgtcacggcggcaagcttcgagatcgtactctccgatgaaaaggcgagcatcaccgcaggcccgacggccagcggcagcggctggagcttcaccgttaccgcagaggacggcacggccgtgaccaacacggtccatgtcacgctcgaggcggacgcggattatgcgcaggtcctgcgcgatctggtcgtctacatcaaggacgtcgcagtcctcaatccggcctatggctcccagaagggcgaatgggcggttctggcggaggccagaggcggcgtcgaggataccgcgtggtacaacacctatctcgcaaatatccgcgcgcatgtcgcggacgtggacggcgttctcacgaacgacggcacctacaccgaatactcccgcctgatccttgcgctttccgcgctgggtgaggatgcggcggcattccaggcaggcagcaagacctacgatctgacggccccgctgctggagctttcgagcagcagtgaggtcacctataaggtctccgagcagggtacgaacggcacggtcttcgcgctgatcgcgctcgattgcagaggctataagaagtctcagggcgcggcagtccgcgaagcgctcatcgcccagctgctcaagacgcagcagaacggcgcgtggtcgatctccaacgacggcactggcggccttgacaaggatatgaccgccatggcggtgcaggcgctggcgccctaccgcagccgcgcggacgttgccgccgcgatcaacagcgcgatgcgctggctgagcgagaagttccaggcgaccggcgattacggctcctccgagaccgccgcgcaggtgatcgttgcgctgagcgcgcttggacgcgacgcggccaccgatcccgactttgtcacggcaaatggcgtgagcctgctgtcgaacttcctgagctatgccgacagccggacggacggcttccgccacaaaaagaccggtacggtcaaccagatggcttccgagcaggcggcctatgcgctggtcgcatatgaccgcttcaagaaggcgcagaacagcctttacgacatgacggatgtggtcgagccgacgcctgcgacggtgcaggaggtcattgacaagatcaacgccatcggcacggtcacagagcgcagctactccgcgatctccgaggcacgcagtgcgtatgacgcgctttccgcagaggataaggcaaaggtcaccaactatgatgtgcttgtcgccgcggagacccgctatgaagagctcctgaaggcaaagaaggagcaggcgcttgccaagctggcaaaggcctatgcggacatcgacaagaacaagtacagcgaggctgcgcagaagaagctcctgagcatcttccagaacgcacagctcgacattacggcggcgaagtcctgtgagcaggtcgagctgctgctggaaaaggcgctccaggatcttaaggacgtcaaggagggcagcatccgcgtgaccttccgcctgatcggcgcggctgaggcgacgcaggacgtcaacctgacggacagcacctatctgcccgagtatgtgacctggatccccacgacgcgctacacgctcgacgaggacgcaacggtctacgacctgttcacagaggcgctcaatgaggcgggactttacagtgtcggcgcggagaacaattacgtccgcacgatctatgccccgaccatcctcggcggctatgcgctgagcgagttcaccaacggcaagcgctccggctggatgtacacggtcaacggcctgcatccggatgtcggcttgaaggacaagacgcttcaggacggcgatatcgttgtctggcactatgtcaacgactactcctatgaggtcgcggactggaagggcgacgcttctcatccttcgctcggcagcggcgcttactactacgcatggctccgcgcgcaggatatcacgccggaggagtatgtacggctccacattggcgagatcctgaccgtcggacgccacggctccgccaatccgtccagcgacaaggtctccaacctaggtaagtcaatcacctttaccttcaagccggacgcaggctaccgcgtcaaggacgtgaaggtggatggcaagtcggtcggcgcagtcacgagctacaccgcgaagaagctcacgatctttacccgcatcgtcgtggagttcacggacgacacgctgccgttcgaggacgtgacgacgaacgactggttctatgacgacgttgcgttcgtgtacggcgagggcctcttcgccggtacgagcagcacggccttcagcccgaacgcatccatgacccgcgcgatgctcgtcacggtgctctaccgcctggagggcaagcccacagtccgcggcagaagcggcttctcggatgtcgtcgtgaacagctactatgaggatgcagtgacgtgggctgcggacaatggcattgtcaacggcaccggcacgaccaccttcagcccggacaccaacgtgacccgtgagcagctggcggcgatcctctaccgctacgcgcagtataagaagtattccaccaaggcaagcgcgagcctgaatggcttcagcgatgcacagagcgtttccagctacgcaaaaacgccgctcgagtgggcggtcgccgaaaagctggtcaacggcgcgaacggcaagctcatgcccaagggcgatgcgagccgtgcgcaggtcgccgcgattttccacagatttgtggaaaatgtcgccaagaccgcaaaataa

SEQ ID NO: 1058 - DNA, 1746 bp, Unknown
  Unknown gut bacteria
atgcgttcgctccgtatgaagctggtcatgatccttgtgatcctgatcctggcgctcatgaccgtcattggcgcgttcctcatcaatggcgtcggaaacttctatatttcggaattctatgtccagatggagcagaccttctcgcaggacttcatctcgcagctccagcggatcgcggcgcagtcgccggatgcgccggacgagatgaaggagctgctgatggcacagtccgggcttggcatcgacatttccggacgcaacgtgtatatcctttcgccgaccggcgacgtgctgaccggctcgagccagacggagcacgtcgatatcacgtccaatatcctgacggccatgaacggcggagtggggcaggaaagctccattgccaatggctatatggatctggctgtgcccattcggacggacggggagagctatatcgtctacgtccgcgacaacaaggcgacggtggacaagctgaccggcgaggtgctcaacatcattttgcaggcgctggcgctgggccttgtgatctgcatcgtgctttcgttcctgctggcgcagatcctcatcacgcccatccgcgcgctgaccatcggcacccgtcaggtcgccgcgggcgacttctcgcagaagctggaggtcacgagccgcgacgagatcggcgttctgacgcggaacttcaactacatgtcgcaggtgcttcaggatacgctttccgaggtcgaaaacgagcgcaacaagctttcgacgctcttcctgcacatgaccgacggcgtggttgcgttctctgcaagcgggcaggtcatccacttcaaccccgcggcctcgcagatgctggcgcggtcgatggatccgacgacctgctttgccgatattttcgccggagacgcggacttcgagcagatcctttcgctcaagcggccgcagtatctcgaggcgcagaaaaccgtcggctcgcgcgaactggagctgttcatggcaccgtattccgccgatcaggcgcccggcggcgtgatggtcgtcattcacgacgtcaccgagcagcgccgcagcgaacaggcacggcgggaatttgtcgcaaacgtttcgcatgagctgcgcacaccgctcaccaacatcaaatcctacgccgagaccatcatttccgccggtgacgagctgccgccggagctgcacaacaactttatgggcgttattgtcagcgaggctgaccgcatgacccgcatcgtgcaggacctgctcacgctcagccgtatcgactacggcaagatggaaatgaacgtatcgcgcttttcgtttgcaaaggccgtccggagtgtatacgaggcggtcgcgctcaacgcggagagccatggccatacgctgagcttccagtgcgaggagaatatgccggatgtcaatggcgaccgtgagcgcatcgagcaggtcgtcatgaacatcgtctccaacgccatcaagtatacgccggatggcggcaggatcgagatccgcgccggacgcagcggcaaaaacgtctatgtccgcgtctctgacaacggcatcggcattccggaaaaggatctgccgcgcctctttgagcgcttctatcgtgtggacaaggcacgttcgcgcgaatccggcggcacgggcctcggcctatcgatcgccaaggagatcatcaaccagcacaagggcgacatccgcatcgagtcggtttacggcgagggcacggacgtgaccatcacgctgcctgccgcgaaggactga

SEQ ID NO: 1059 - DNA, 2334 bp, Unknown
  Unknown gut bacteria
atgagttatcacgttaaacgaatcgtccagcagaccgaggccatgctcaagctgcgccacgacgaaacgcttcaggagaccacgcccgagcgcctgcatgagtgcctcggcacggtgctgatgatggagtgcaacgagaactggacggagacgaagaagcgtcaggccgagggccgccgcgcgttctacttctccgccgagtatctggtcggacggctggtattcagcaatcttctgaacatgggcattctcgacgaggtcaaaaaggccttcctcgagaagggcgtggacatcggctgcatggaagagatcgaggacgccgcacttggcaacggcggtctcggacggcttgccgcctgcttcctcgacagtgccgcgacctgtgatctgccgctgacgggctacggcctgcgctaccgcttcggcctgttcaagcagtcgtttgagcacggcagccagcgcgagaacgccgacgactggacgaagtacggtgacccgtggagccaccggcgcgataagctcgcggtcaaggtggattttgccgaccagacggtcatcgccgtgccgtatgacatgccggtcatcggctacggaacggatacgatcgatacgctccgcctctggcagtgcgaggccgaaaaggagctggatttcgacgccttcaacgcgcagaattacgccaaggcgctggaaaagaagaacaaggccgaggacatcacccgcgtcctgtatccgaacgactcgacatgggagggcaagcgcctgcgcatcaagcagcagtacgtcctgtccagcgcgtcgcttcaggatattctacgcgacttccgcgctgcgcacggcaacgactactaccgtctgcatgagttcacggccatccagctcaacgatacgcatccggccatgtccatcccggagctgatccgcctgctgatgctcgaaggcatggactttgaggcggcgttcgaggtcgcttcgcatgtgttctcctacaccaaccacaccgtcatggtcgaggcgctggaaaagtgggatatggagctgctgcgctctgtcgtgccggagctttgcgaggtcatcgagaagatcgacgcccgcctcaagcacgaattccccggctccggccttgcgatcatcaaggacggcagcgccaatatggcgaatatgtccgtctatgtgtccaccgccgtcaacggcgtggcccgcatccacacggagatcctgaaaaacgacctgttcaaggactggtacgccgtctatcccgagcgcttccagaacaagaccaacggcatcacgccgcgccgctggctgggcctcagcaacccggagctttgcggcctgatcgaaagccggatcggcgaaggcttcctgaccgatctcgaccgtctggcgcagctcaagcccatgatcgacgatatgaccgtcaagcagttcaacgccatcaagcttgaaaagaagaagcagctctgcaaggtcatttccgagctggagggcgtcgagcttgacccgacgtttatctttgacgtgcaggtcaagcgcctgcacgagtacaagcggcagctgatgaatgcgctgtccataatggatatctacttcggtctcaaggacggcacgctcaaggacttcacgccgaccgtctgcattttcggcgcgaaggccgcgcccggataccgccgcgcaaaggccatcatccgctatatcaaccgcatcgccgagctgatcaacaacgatcccgacgtgagcggcaagctgaaggtcgtgttcgtgcagaactacaactgctcttacgccgagcacatcatcccggcggcagacatctccgagcagatctccccggccggaacggaggcctccggcaccggcaacatgaagctgatgctgaatggcgcggtgacgctgggcacgatggacggcgcgaacgtcgagatcgtcgagcaggcgggcatggagaacaattatatcttcggtgcaaaggtcgaggagctgaacgccatccgcgagacgtaccgttcgcgggatatctatgaaaagaacccgcgtatctgccgcgtggtcgatacgctgatcgacggcacggtcgagacggacgcggatcaggaggagctttacaccgcgctgctggacggcgcgagctggcaccggcccgatcactacttcgtcctgtacgatttcgagagctaccagaatgcgcgacttcaggcgaacgctgactaccgcgaccggctggccttcggcagaaagtgcctgatgaatacggcctcggcggggaaattctcatccgaccgtaccatccggcagtatgccgacgagatctggcacatcaagccggaaaggtaa

SEQ ID NO: 1060 - DNA, 1641 bp, Unknown
  Unknown gut bacteria
gtgcggggtctgcgcgccggtttacagcagatgcgcggccgcatccgggccgaccggagggcggaacgcgcgaaaaaaagcggcgcggtgcgccgcagaaagaggaacatcatggaagaaaatcagaacggcttccagccggagcagtccgaacaggacgtgaacgctattccggagcaggacgccgaggagaacgcacagccggctgaggtggaggcgcccgaggcggagaccgcggagcagagcacgcaggaagcctccgaggagaccgcgcagcccacagccgcgccggagaagcagccgaagaagaaggccgcgctcggcattgcgctggcggctgtcgtggccgtgctggccgtcgccgcgatctttatcacgcaggccatcaagaacaagagtgtcccggacgagatcgacccggacttctcccagtccgccgacgcggaaacgcccgcgcaggatccggagcagacgcccgaggagactcccgaggaaacgcccgccgagacgaagcccatcaccggcgtgatcgcgcaccggaatgcgcagggctatgcctcctacaccatgaccgccgagcaggcgacggaggaggtgctggaccttgtggtcgccaactgcggagactgggcgctcgataaccgcgggcttgcctactattattgggagcagtattattccttcgccggccagtacggccagtatctatcctatctgatggatacgagcctcggtctggacgagcagctctacaacgacaccgatacctggcaggagacgttcctgaacgcggccatccagcgcttcggcatggtctccgccgtctgccaggaggcggaggcgaacggctatacgctcgacgcagattccgaggaccaactcaccgccatccgcgagaatctggaatccagcgccgccaactacggctatgacgacgccgaccggatcgttcaggacgccttcggcgcgaacaccacgctggacgcctatatggagttcgtccgcaagagcatgatcgcctccggctatctcaactcgaaggtcgagcagatcgaatgcaccgacgagcagctcagcgactattatgacgagcacgccgacgactaccttgcgcagggcatcgagaaggacgacacgcacatgatcagcgtccgccacattctcatcaccccgtccgggcaggatgaaaacggcgaatacaccgaggaagcatgggccgctgcggaagaggaggctcagcgcatccttgccgagtgggaatccggcgaaaagaccgaggaatccttcgcggagatggccatgcagtattccaccgaccccggcagcaacaccaatggcggcctctatgaggatgtttatcccggcatgatggtcacggagttcaacgactggtgcttcgcggaggaccggaacgtcgctgactacggcatcgtcaagacctcctacggctatcacatcatgtatatgtccggtgtgtctgatgagctttactggaagtccgtcgtgaaggaggcctacctcaacgagcaggcgtccgcactgctcgacgagatctgcgcccgttatcccgtgacctccgacctgtcgaacgcaggcattctggagctgaagccctcagcctcggagaacgctgccgaataa

SEQ ID NO: 1061 - DNA, 4299 bp, Unknown
  Unknown gut bacteria
atgaaaaagcgaattctatccctctttcttgtgctggtgatggcgctgagcctgctgcccgcgcaggtattcgcagcaagctacaccttcgatcccaacgcgacgatctttacgcagaatttcacgacggaaacgccgcggcccaataacctcggcgagtatttcaccgtgacctcgacgccgctttccacggcggatcacaccacgacctggaacaccggcaagaacgggaccagcgtcaatgttttcaatcagaacggcagccagacgctcggcgacaagcacgccgtcctgacgttcaccttccagaaaagctgcaccttctggttcaagcatctgttctccatcaattcccgttctccctacagctacgccgagttgcgtcttaacgggactgcaatcgccaagggaaccagcagcaacaagctgaaaagcccgtacagtctggatgtaaaggcgggcgacgttttcaagattgatttctactctgaggacgatttcgggacgccctgccagatgacgctcaagaacatccgctgcaccgaccttgccgcgcaggacgtgaccgtctcctttgaccccaatcaatccagcacccgcggcactgtctccggcgcgatggctgcgcagactgttcccgccggtacggcgacggcgctgaacgccaacgcttttaccaacgtgtattccatgaagatctccggcacagagttcggcggaaacgtgaggtttctcggctggaatactgcggcggacggcagcggcgacagctatgccgacggcgcaggcatcgccgtctctgcggacaccacgctctatgcgcagtgggctggacagaatgtgacgacgcactttgaggcgggttatccggacgccccggccatcgccgacacgatcagcagcgtcggcagccagtacgtcattcccgagcagccgacccgcacgcaggacggcgtggaatacaaatttgtcggctggtatacgttccccgagggcggtgaggccatcacagagaagaatgccacctatggcaagccgtatatcgtgcgctccatggcccgtgccacgcaggaggaagcaaataacggctccgtcaccttctatgcccgctgggtcaagcgtcttagcgtcagttttgacggcaacggctataccggtgcctttggcacgaacaacacatggtatacctctcagatcgacaaccagctcaagagcgtgaccgagaatatgttcaagtcctggaacatcggcaaggtaccggtcggaaaggacttcgagggctggtacgtcaagaacgccgacggcagcttcggtgacaaggtctatccgctggaaacgccgtataacttcacggagaagatccccggcgacagcatgaccctcattgccaactgggtcgataagcccgtgcaggatgtcaccgtctcctttgacgcaaacggcggcgagggtacgatggccgcgcagacgctgaccgagggcaagggcactctgaatgccaacaccttcacgagagaaaacttccgcttcgccggatgggcgctttctgccgcaggcgaaaaggtctatgacgatggtgcggcagtcgaactgacggcggacaccacgctttacgcgctctgggaggccgtgcaggccgacttgcccgtccattttgacggaaacggctatcaggagtcgatcccgaacgccgccatcggcgccgacggtcatgtgacgctccccacactctcgagcgccaaattcccctccggtcagaaatattacgactggtacatcgtgctggccgacggcacgcttggcgaccgcgtgacggcctcctacgccttcagcgcctaccgtgaaagcggcgtgacgctcaaggcccagtggtacagccgcagctacatcatctgctaccacgcccgcaccgttgacagcggcgtgacgggaagcatggatgatcagcgcgcgcccttcgatcagaagatccacctttccgcctgcacgctgatgcgcgaaggctacacgttcgcgggctggtccaccagcgccagcatctatggcaaggtggaatatgccgacggcgcggagcttctccgcgcatggagcgacggcgagtgggacgattgggaagacgactatgtggacggcagcgaggacggagaacacttcgatctctacgcctgctggaccaagaacatgtccgatgcggaagcggctgcccgtgaaaagctggacgccgcaaagaagcttcttgagaagacctatcagcccagcttcaaaacggacaaaaaccttctgaccatggcgcaggcccgtctgaccgctggtaatgtggagggcgtcaccgtcgccatgaagagcgcggtcacgcagaaggatctgttcaccgacgcccgcgccggcatcgatctggacggcacgctgcattacaagtggaacgacaacggcagcacctccgcatccagcctctattgccgcgcgacgctgcttctgacctgcaacggctacaccgatgaggtgcaggacgccaccgtcattctcggtctggacgaggacaaggcgctcgaagcgctccgcacacagggccgccgcatcgtcattccgcaggagctgaacgacagcacaacgctcacctccgtccctcactacatggtgaaggagggtgtagacgagagcaccgtggattacaattcctccagtgacctgcatctatgggcagaggtcacatggaagtcctcgaatacctctatcatcggcatcagcaataacaattccaagctcttcgcaccctacaccgtgaaggtcagccgtccgaaaacggatacggacgtaacgcttaccgctgcgctgacctacagcggccgcgacgatttgaaggtctacttcacctacaccgtcaaggtcaagggcacacagaaggccatcgactatcaggaggctctggagctttggctggccggcggcaaggaagagcccttcggcgcgctctatgttcccgcgactggcgacccgatcgacgtagacagagtcgtcaccgacatccacttccccaccacctcggatatgcgcgagatttttgccgccaactatggtgcggactttgacggaaagtacacccccatcctcatcaccagcaataatgaatcggtcgtgcagtctctcgatgccaatgccgcccgcgcatgggtctaccgtcccctgcccggccagacagacgcaaaggtcacgctgaccgtcaagatcctttcccgccccagcggctccggcaaggactatgcgaatatgcaggtactcgccagcaaggatatccccatcaccgttccggcaatgagccagagcgacatcgacgcagccgcagccttcatgcgggaggtctgcaccgaggatgtctactgggagggtatccggaaggccaatacggaccacagcttcgtcaccggcaatctctggcccttcatggagatcgttccggacggcaatggctacaagttcatccgcacgtcggcagagtctcagtggacgggcgtgaaggtggacgacatcgacggctggtacgattcccagcagtaccgctgtttccgttcgagcgttccttccgtggtcgcgcacgagacgctgcttgtcaccaagccgcggtacaacacgcacgtcaagatcgacagcgttctcacctacgtcgagtacggcaagtactatgagaagttcggctctgatcctgcctatgcgcagttcaagcagttctacaagcagccagtgagcacggtcgtcaccgtcatcggcaccactggcattgaggatccgtccattcaggatatcaccgtcactgtcaatgttaccggcagcaccttcgcgccggacttcaccgacctgacggccgcctcctacacctgcaagagcaatgcctacaagaccgcttgggacgcgctggagtctgcactgaccgccagcagctacacctacgagggcagcggcagctatgtgaccgctgtgaccgacgccgctggctgccgtcttggcagcggcgatccggcgcacggcccctactccggctggatgttcaccgtcaacggcagcatgcccatgctggactccgagacctatgccacgcttgggaaataccttcttcaggcaaatgaccgcatcgacttctattatgtgaactgccccaccgagtccggtgaccatagctggacggaggataccgcgctgcgccacgagccgacctgtacactcgacggctctgcatcctataaatgcacgatgtgcggcgataccaagaccgaaacgctgcctgccatcggccacaagtacggc

SEQ ID NO: 1062 - DNA, 2214 bp, Unknown
  Unknown gut bacteria
atgctgacgctctgcgcttgcggccgggaagcgcagaagaaaagcgccgcagatgtaccgccggcacaggccgatcccgctccggggcaggcaagcaccgtctttgcacccagcaccgatttcataagcgcggagggcgcaggcgcctatgtctatgcacagctgccgcttgcgggataccgggtgcacgctgttctgcccgcagacggagatctcgtctatgcgatagcgacccgatgcgacgcaaacgggctgttcctgatcggcgaggacggcgtcattccgacgcagatcgtccaatatgatctggaagcacagcagaaaacagatttttgttatcagcccgcgcttgatggtgcgcgggacgccgcgatttccgccgccgcgcttggcgcagacggcagcctctggtgccttgcctgccgcttctggcgggacggcgaagcactcacaaagagcttcacgctggaaagcgtggacgcggacgggacggtctccgagtcgatcccgctggactgcccggaggtgcgctctgacccggagctttttgtgaacagcgacggaagcttcctgctccatacgccggaggacgggactctcaccgtctacgacgcttccgggcagcaaactgcgcagcagtctgtggagctgctgacagaccccatcgcagccgacgcggacggtcaggcgtggctctgcacggacacggaggacagagcggcgctgcaagccgtgggaagtgaaaaacagattcccatctccggcgtcacgaacggccttcccacgctctgctacggcacggacgcgccgggcgtgctttacgcagcggattctacggcgctttaccgcgtatcgttagagaacggagctacggaaaagcttgccgacctctccgttctcggcgtccggggcggtcagcgcttcagccgcacggcaaacggctgctttgtctttacggacacctccaccgacattcccgttcttgccgcgctctgccccagctcgtccggcagcaggcagaaaaccgttttgacgctggcgactgtgacccccgattcagaggtcctcgcgcaggtaaggagcttcaaccgcagcagcgccaactatcatgtagaactgctggacttttcctcgcttctcgactccggcagctatgcggatgtgttcaccgtctggaatacagccatcatggcgggcgatacgccggatatgatcgatctctcgaacctcccgtggcacagctttgccgaccgcgggctgctgctcgatctcaatacgctcttgccgcaggaggcgctgctgccgtggctctgggacgcgctctcctaccatggaggtaatttcacctttccgggctgcttcacggtcgaaacgctggtcgggaagcagtcgcggcttggaaataaatcgagctggagcgttgcggaatttctcaaactggccgaagcgtccgatatccccatgttttccggcatgagccgcgagctgttcctttcctatatggagcagtaccttctcgacgcattctgggacgaggaggcgggaacgtgcaacttcgattcggaggaatttcaggcgctgctggactatgccaatacgctgaccgcgccggaggagctgagctatgatctggaggataccatgatcctgatccggcgggatctggcgctgggggagccggtcaccctacgcagcgtgtcgcagctgcatcagattgaggcctataccgtcggggagccggtcgcgtggatcggttggcccggagaaagcggcacaaagcttcgccctgccgccgagcttgccgcattcaaagatacggcgcacccggacggcgtatcggaattcctgcaattcctgctctccgagccttgccagacagcgttcagccggtttgcgtttccaatgacggtatccgcatttgaaagcgaaatcaccgcagcgatggaaccgcgaaatacaaacgactcagatattgcgacggagttcacggtagacggcacggtctatccgatcgttccgctctctgcggaggatgccgcgcggtatgaggcgttcttcgagcgtatctccgcacaggtttattcctcgcagcaggtcgaggccattctggaagccgagtgcgccgcgctctgggcaggcgcaaaaacgccggaagagaccgccgcgcagattcagcgccgcgtggagctgtatcttgccgagaacgcgccgtaa

SEQ ID NO: 1063 - DNA, 1581 bp, Unknown
  Unknown gut bacteria
atgaaacgcacaaggtggattctggtgctgctgctgagcgccgttcttctgctgacgctgacggcctgcggcgaaccggagccggaggtgtcggtgtcggtcacgctggtcaaccgcagcggctgcgatatttcgtcgatcagcatcaccccttcgaccagcaccgaatgggacacggaatatgtggacggcgtctttgccgacggcgagagcatcgaggccggactcggcacctacaaggagtccgaggtcccggatacctacaacattctggtctacaacggcgagaactacatcctgtacgacaccagcgtggatgagctggacatcgagctgcacgacggtgactacatcgtattcctgccgcccgagggcgaggtgcccttcgacgtggtcagcgactacgacccctccgcctacgatacggaggacgagtggatcgaggagccggactacacgatcgacgaaacggccgatatcgcgccctatgcgggttgctggaaaattgacacggagccgttctacatcgtgatcaacgaggactatgaatggatcgccatcaacctttacggtcagcaggtcggccccggccatgtggtcatggaggaaggcggtgtctcactgtatcaggaggacggaagcttcctcgccacgctgacgcaggcggcggacggcagcctgagcgacgagaacgggaacgcgctttcctcgtgggactatatcatgctcctgccgacgccggaggacgagctgaaccagacggccagcttcccgggcggtttcacgaacgtcaccatcgactatcctatccagatggaggcgcatgagcagtcctccgtctccaattcgctgagcttcaacgcggtcatggaggacggcaccgacgactattactccaacatcatggtcgccttccagccaatctccggcttcgacgactacatgtcgcagggcgcggccgcggcgaaggcgtacatggtgaagatgctcgacgacttcatgaacagcatgtacggaagctatctgctgaagtccttcggctcgaatttccaggacaacggcgacaactacagcctgaccggctatatgtggctcgacggctcgatctttgccaacggccccgaccatcccgtgcgcggctgcatggaggtgcgctactacggcccgaccggatatgcgctggtcgcggtcacaattgccgaggaggcccgcatccgcaactatttcgacatctgcaacaacatgctgacgaccctttcctacaccgcgggctggagcaccgcgccgaagagccgtcccgcgcagcccgcctccgaccccggcgactacggcacggcgtactactggtatgacgaggacggcgatatctggtactggaacggctatgagaacgagttcatcggcttcggctccgacggctatatcgacgaggacaccggcgagtatatggaggccaacgacgcgggctgggactacagcgacggatactacgacgactatgacccatggtccgatcccggcgacggctggagcgaccccggcgacggctatgacgacggctggggcgattacttcgactga

SEQ ID NO: 1064 - DNA, 2409 bp, Unknown
  Unknown gut bacteria
atggcactcaaagtacttcgtccgaaggacggtcacaatcgaaaaaggaagcagacgcccgcgcaggacaagaaggaaggccgggcaagccgcacgatcctgacgcggatctggatcctgctgggcttcttcggcgtcgcgctgtttctgacgctggccggacggctgtataagctcatgatcgtggatcacgattattatgaggagcttgcgatcaacaaccagacccggtatacgaagctgacggcctcccgcggtgagatctacgaccggaacatgaacattcttgccggctccacgacggtggagacagtgttcatcgaccccaacgagatcgcggaggagatgaaaacgccggagaacagcgacctgctcgaccggatcgcagtgggcctgagcggcattctggacgtgacggaggatttcgtccgtcagcaggcggccgataaggcctaccgctacaagatcattcagaagaagatctccgaagagcttgcggacgaggtgcgcgcgttcatcaacgacggcaacatcaaaggcgtctatctggaaacggactccaagcgctattacccctattcctcgctgggtgcgcagctgctgggcttcgtcagcgacgacaacgtcggtacggagggactcgaggcctactacaactcctatctggagggtacggcgggcaaggtcgtgacgaccaagggaaactacggctcggaaatgccctttacctatgagaaatactacgacgccagcgacggcgacagccttgtgctgacgatggatacgacggtgcaggcgtatctggaaaagaatcttcaggcggccatcgaccgctacgagatccagaacggcgcattcggcatcgtcatggacgtgaacaccggcgcgatcgtcgcaatggcgacgctgggaggctacgacccgaacgaccatctgcaaatctatgacgacgttctgaacgagcgtctggaacagcagtatcagcagcttctccgcctgcaaaaggggacggaggagtttgaaaaggcaaaaacggaatacaatcaggctgtggctgcggcgcgcctgaagcagtggagaaaccgctgcgtctccgacggctatgagccgggctcgaccttcaaggtcgtctcgctggccgaggcgcttgactgcggcgcggcgacgctgaacgacacctattactgcggcggcgcggagaagatcgccgaccgccagcagatcgtccattgctggaaggcagccggtcacggcgcgcagacgactgcgcaggcgctgggcaattcctgcaacatcgccttcggccacatcggcgttcagctcggcggcacgcgcttttatgagtacgccaaggacttcggcgtcatggagcgcacgggcgtcgatcttccgggcgaatcgaagggctacttcttcggtctggacgtgctgagtcagggctatgcgtcggtcatttccggcgcgttcggccagaccttccgcgtcacgccgatccagcaggtgagagccatcgcggcggtcgtgaacggcggctatgtgctcgagccgtatatcgtcagtcaggttcttgacgccgacggaaacgtcgtgctggaaaacggacggacggtcctgcggcaggccatcagcgagagcacctcgatcacgatgcgcgacctgatggaaaaggtcgtcaccgagggcaccgccaagggcgccaagacgcccggctaccgcgtcggcggcaagaccggtacctccgaaaagatcgatacctatgatgaaaacggcaatcaggtcgaggacaagatcgtctcgttcgtgggcgtcgcgcccatcgacgatccgcagtacctcgttcttgtggcgctcgatacgccgaaataccaggaggacaacaccaaatacacgcccagcggctactacatgcccggcggcctgatggccgcgccgacggtgcgtgatattttcctcgacatcctgccgtatctcggcgtggagccggactattcctccgacgatatccgcggcatcaacgtgaagatgccggagctgacgggcatgacgctcgaggaagtgcaggcggcgctcaaggaaagaagcctgacgtgccggacgcttggaaacggcgcgatcgtcaccgatcagatcccggcggcaggtgcggagcttcccggcaattccgaggtcattttgtactttgactacgagaaatccaccgagcaggtggaggtcccggactttatcggccactcggtcgcggacgtcaactggctggcgaattacgcgggcgtctatgtgcaggcaaagggcacggactccacgagctatgcgaccgtgacgtaccagtctgtcgagccggggaccatggttgacagaggtactacaataacagtagaatttaccgaccacagctctcttgaggactga

SEQ ID NO: 1065 - DNA, 2310 bp, Unknown
  Unknown gut bacteria
atgaaacggatcctacatattcttccggcgctgcttctggcagtctgcctgctcgcgggaagcgtctttgctgcgttggatcagagcgtattcagcgagagcatcgaccttgccgacaccacacgcctctacagcggcacgcagctgatctctacgacgaagggcctttccggcgcgcaggaaaactatgtgcgctacacgaaggaccgcgacgtgcagccgatcatcgcctacggcaaggagatctacggcgcaagcaccatcagccagatcgccaaaaagctctcggaggacggtctgagcatcgtcgcgggcatcaacgcctccttctttgaaacagaggccggccttccctacggcctgctggtcacggacggcgtgctgcgcagcgccagcaccgacatgccctccgtcggcttctatgcggacgggagcgcgatcatcggcagccccgagctttccatcaacgtccgcctgtccgacggctatcagacctcgatcttctacaacaagcgtctgaacgattccaacggcatcggcctgtattcccgtgactatgacagcaagaccaagaacaaggtctctgcctacaacgtcctgctcgagccggtcaacggcgccgacgcggcgcttccgctgaacggctccatcgagctggaggtcgtcaagatggcctccgcgaccgcctcctgcaccattcccgacggctcgttcgtgctggccatctcggaggcgagcatctatcccaccgcgctggacaatgtgaaggcgctgaagtccggcgaccgcgtggtcgtcaccacctcctgtgcgccggaatggacgcgggtgcagtatgcctgctccggcagcgagctgctggttgaccgcggcattccgtgcgaggaattcacgctggactctgaaaagaagagcgccgcccgcaccgctgtcggcatcgaccagaacggcggcctcgtcctctacaccgtggacggcggcaaaagctcctccggcatgaatcttgcggagctggcagaccgcatggcggagcttggctgcgtcacggcgctgaatcttgacggcggcggctcgacctctcttggcgcgatctatccgggctacgcctccggcacgaccgtcaaccagcccgaggacggcgcgctgcgcgcctgcgcaaacttcatctttctcgtgcgggagacgacccgctccgaggatgcggatatgctctgcctgtatccctacggcgcgcaggctgtgcttcccggcgcaaagctcaatatgaccgtaaaggccgccgaccgtaactatatgcccgccgagcttcccgacgaggtcgccttcggcgcggacggcggcgagatcagcgcgaagggcgtgctgaccgtggacgacgacgccagcggctacgtcaccgtctccgccgtctccggcgatctgagcgcccgcgtccagcttccggtcctcgatacgatcacggagctttcgctcaagaaggccgattccaacgtctccttcacggaggcgaccgtacccggcggcagctcgaccagccttgcggccgtcgccagctactatgggcgcaccgtcgcctcgcagaacagcagctttgaatggactgtctccggcggcatcggcgccatcgacaaaaacggcgttttcaaggctgccgataccgcgcagcgcatcgagggtaccatcaccgtctcctatggcgatgtgacggcggaggcaaagatcaccgtcgcacccgccaaccccttcgcggacatgagcaagcattgggcaaaggactacgtcaacgagctgtacttcgacggcgttctgaccggctccaccgggtccgacggcaagctctactaccgcccgaacgactccatgacccgtcaggagttcgtcgttgcgctgatgcgcttcctcgacgtggacgtcacgctttatacgaagtccgatctgccctatgccgacaacgataagatcgcaaaatgggcgcaggacgccatgaaggccgcctatcagctcggctacatgagcggctcctcctcgaacggcaagctctacgccaagcccaccgccaccatctcccgtcaggaggcgatggtcattctcgcccggagccaaaagctccagcaggaggatgaaagcgtcctgaacaagttcactgacgcgggccgcatcgcctcctgggcgcggccggagcttgcggccatggtggagcgcggcatcatcagcggctccaagggcaagctcaacccgaccggcaacgtcacgcgcggcgaggtcgcaaagatgctctacgccctgcgctattccgacagcgattcctga

SEQ ID NO: 1066 - DNA, 1197 bp, Unknown
  Unknown gut bacteria
atgagaccgcaaaaaaagcgcaagcccgacccggaaaggcagcagctgctccttcagcgcaaccgccagctgcacggcgtccttcttgccgcgctgcttgccgtgcttctgcttgtctttggtcttgtcaatctgcttcatacaaagagtgatttttcagaaaacgaaaaccgaaagctgcaggcctatcctgcaccgacagccgcctccattctggatgggagcttcatgtcaaagctgcaagccgccttttccgatcaattctttgcgcgcgaccgctggatctccacgaagctgcggatcgacgagctgcttggccagaaggagtccaacggcgtctatctctgtcaggacgattatctgatcgaggtcccggaagcacccgatcaggcagttcttggccggacgctgaccgcaatgaagaatttcgccgtgcagcacgacgacctccgtatgaccgcgatgatcgtgccgaacgcttcctccgtcatgcgcgactacctgccaaagaacgctcccgcgcacaaccagcaggaggatctgttcgcggtcaatcagacgctctcgccctttatgcagtacgcagacgtgacgcaggccctgaaggaccacgtcaaggacggtgttttcttccgtaccgatcaccattggacgagcctcggcgcgcactgcgcgtttgacgcctcggcggaactgctcgggatcgaaacgccgatcacggactatagcgtccacgtcctgaccaactcctttgaggggacgcttgcctccaagagcggcaagcataccgccgtggacgccatcacggcctatgagccgcttggcaccgacgtgagctactacgtcgtctatgacagcacgcaggagaaggccggctctgtctatgtcgattccgcgctggataccaaggacaaatacacggtctttttcggcggcaaccatccgctcgtcaccgtcaagacgaccgcaaacaatggaagggtcctgctgattttcaaggactcctatgcgaactgcttcgtgccgttcctcattccctattatcagcagatcgtcatggtcgatccgcgctattattacgacaacgtggagcagctcatgacgcagcgcggcgttacggacgtccttttcctttacaatttcagcaccttttccgccgacaccgcgcttgcggatacgctgggtgcgtcgagctga

SEQ ID NO: 1067 - DNA, 1377 bp, Unknown
  Unknown gut bacteria
ttggatatgaacggcgaaaacgcagaccaaatggatccgcagcagccttaccatttgccatacgactatgatatcggagaagaaaggaagccccgctccaaaaaacgcttgatcggatggatactggccgttctgatcctggccctgctctgcgggcgcattctgttctgctcttctgaggacgaaacgccgcctgccgaacagtctgccgcatcgacagcatctgatgcagagatcgctgccatgatacagaaaattcagcaggatatcgtcagaccccattttgcggataccgagcgtaacgccattgcggaaaatgcggtctcctatatcccgcagttctcacggcgctactatctttctcagctgtccgacgatccggaaaaagcatctgtccttgctgccgcgtgtaagatctatacgtcggcaagagatttcagtgagacgtgccagtttccatacggcgtcactcccgaggaggctttccaggcgcttgacctgctggaatatgactgcccggagctttttcagctggacttctttcacacagacacctattattccgattcgcagacggactatatttcttcgatggagctttcttaccagatgacgaaggaggaatacagacttcacctcgaggactgtaaaaaagtgatcgcgtccgtctgtgaacaggccgatggcctgtccgattacgaaaaagagcttctggtctttgacacgctgacctccatctgccattacgacgaccagtcccagttctccgccactgcttacggcgcgctttgtgaaggccgtgccaagtgcgacggcatcgcctatgccgcaacatggcttcttcgggagcttggcctcacctgcatgagcgtcgggggatactccgatcgggaagagtttggacacgcatggaatctggtcgaggtcgatgacaattactacgcgctcgacctgacgcaggacgttcctctcctcgacagcgacgacccgatccttcatacgggcttcaatgtccccaacagtctcgccctctacagcgacggtatcaactacacgctcgataccagcatttcagacttcttcgagctgccgacgacagactgcatcgacgacgactattacgtccgaaatgagctatacatccccgcaggctccgattataccgagcttttctaccgtcttatggatgaagcagccgcagagggcggtctcttctccgtccgcttcgcctccagcgacgaactggcgcagtgctaccacgattttgacacatttgtagacgactggtatgagagccgggacattccctcgctcgaatattcctattccgtcgcaaacttcaacgtcttttacgccgaattgcagcccggacaataa

SEQ ID NO: 1068 - DNA, 3879 bp, Unknown
  Unknown gut bacteria
atgaacagtaagcataagcgtctgctggcgggcattctggcctgcctgatgctctgcatgtttgccgccccggcgcgtgtctgggccgacgaggcggaggatacgtccgctgcggagcagacggtcgaagagaacacctccgaacaggaggaaacggctgagacgctcccggaggagaccatccatatcgcaagtgcggaggagcttcttaattttgcggagtcctgcacgctcgatacatggtcgcagaacaagcgcgtcgttcttgactgcgatatttcgctggagggtgtggactttgagccgatcccgagcttcggcggcacgtttgccggcggcggccacacgatccgcggcctccgcgtcagcgggagcttctctccggcgggactgtttgccgtggtgcaggagggcggtatcctccgcaatctgaacgtggagggcagcgtggctccggatgtcgattcggactgcgtcggcggcattgccggtgagaaccggggccttatttccaattgcagcttcaccggctcggtctccggcacgagaagtgtcggcggcgtagccggtaagaacgcggcctccgcgatcatccgctcctccggtgcaagcgggacggttttcggcgagaacatgaccggcggcgttgcgggctacaatctcggctatatcggctcctgccggaatagcgccttcgtgaacattgaaagcaccgatccgggcgtggatatcaccagcatcgatctggacttttccatggatctcacgcgcctgtcgcaggccgatacggcgaacattgcgacggataccggcggtattgccgggtattcctccggcacgatcatggactgcgcgaatctcgcggccatcggccaccagcacatcggctacaacgtcggcggcattgccggacgcagctgcggccagatccggggctgcacgaatgaaggcagcgcctgcggacgaaaggacgtcggcggcattgtcggccagctcgagccttatatccgcgtggagctgagcgagagcaccagaagtcaggtcgagcagcagcttcaggagctgaacgaccttgtggataaggcggcggacgacgcggagggcggctccggcggcatttccgcacggctgaacagcctttccggcagcgtcggaaacgcagtggatcgtgtgaacgacgtcaaggtgacggcaggaatcgatacgaccgtccgtggagacggctcgctggattccggcacgcagatcggcggcgaggtgaatcccatcgacgccgatgcgtcgcacggttccggcggcggccttacgatcacaacggagcctggctccgtcagtgtcggcattggccacggcggcagcggcagtctggagatcggctcgtccgccagcgcggggatcgatcacagcgggacggcctccggtgcgctggatgccagcacgcagatcgtcgctgcgcccgacctcggcggactgacctccgcggtgaacggtatcggcagtcagctgacgatgctcaatcaggcggtgaccggcacagtcggtacactggccgaggacgtgcggcagatcaacgacaaattcgccgaggtctccgaaacgcttttcaatgcggtcgatgagctgcaaaacggaacgaacgacctgattaccgatgtttcgacggtggacgtcgatcagatcacgcttggcaagacctcctgcagcagcaacagcggcacggtctacggcgacatcaattccggcggcattgcaggctccatggccattgaatatgagctggacccggaggacgatgcgtccaacgagctttccgacgacgcgcggcggcagtatgagtaccgcgcggtcattcagaactgcaccaataccggcgaggtcaccagtaagcgcagctatgcgggcggtatctgcggccggatggatctcggcctcatcaccgactgcaagggctacggaacgatccgcagcgaagacggcaattatgtcggcggcattgcgggcgtgacgggcgcgacggtgcgcacctcctacgcaaaatgcaccctcagcggccagaaatatgtcggcggcattgtcggctccggcgtgacgcagaaggtgagcggcagcggaagcaccgttgcgggctgctattcgatggtcgagatcgaggactgcacgcagtattccggcgcgatctccggcgcggacgcgggcacgttcctggaaaactattatgtcagcgatacgctggcgggcatcaaccgtcagagctattccgggcaggcggagccgtccacctacaaggaaatgctgaaaacgcaggctctaccggaggaaatgcgtcagctgacgcttcgcttcgtcgcagacggcgaggagatcttctccacgcatttcagctacggcgcgagcttcgacgcggagaatttcccgtcgatcccggaaaaagagggctatcttgccagctgggatcacgagacacttgaaaatctgcactttgacacgacggtcacggcgctctacacgtcctatacgccgagccttgcgtcctccgcagcgcgcgaggatggacgtgcgatcatgctggtcgagggcgattattcagatgacgatgtcatcacaatcacggcggagccgctgacacccggtgccttccacatccgtgcgggcagtctccagagccgcatcgacggttatttctccacgttcggaacgagcgaattctcgctgctgaaaacgaactgggaggtcgtggagcagtggagcatcgaggtgcccggcggagactccggtgaacatcggctgcgctatctggccccggacggcgggacgaagtttctgcgcgtctatatggagaacaacggaagctgggagcgtgtggagtatgagacggcgggcagctatcttgtgatcccggtgcgcggcagcagtgtgcgcatcgccgtggtgtccacggtcgagatctggtgggtatgggcagcggctgttctgctgctggctctgatcgtattcctgatcgtccactttacacgcagggctgcgcgaaaggtacggcagcgcaaggaaggcgcgccggaggagacggctgcgccggcagcagagccgaatacgcctgcacaggcggcagctcccgcggagcctgacccggagctgctggcccgggcgctttccgcagaggaacgccttgcccgcgcggaggaggagctgcggatgctccgggagagcagcgcgtccggcgcggtcgccgttgcggaacgcccgaaaaagcgtgtccgcgggtggatcccggtgatcgttgttgttgtcctgcttgccatcgcggcgggcgtgttcttcgtgagccggaatttcggcacggagctggaggcctaccgcatcctcaatgcctatgcgcagaaggatccgcttgcgatgacgctgcgcgtagacgcggagctggacgggcagatgatcggtctggacgcggagatctgcaaaacaaaggtcgaagggaaaacagtgacctgcctgcaaagagacggcgtgcagctgttctacgcgggcgagaccgtctatcttgaaaacgggagggccttttccgtcggcggcgattacccggattatgcggagctgctgccgcaggcggcggagctttaccggcttgtgaacgtgtctgcgtccacgagcggtacacagaaaacctaccgcctgacggcgaaggatgaaaacgcggatgcgctcgtgcgcattcttctgccggagcttccggcagacagcacggtgcgcacactcgaagcggcactgacggcggacggtcagaagcccatccgcctgacattctccgcagagctgacgggagttacgtcggccacgctgaatgcggagctgagcttctcggagggcgtgacgaccgcaccg

SEQ ID NO: 1069 - DNA, 2442 bp, Unknown
  Unknown gut bacteria
acggagcacggcgagatccagagcgagctgatctggtccgacgcggcggagtcccccaaggcggacgacggcacgctcggcaatatggtcggcctgtgcagcaacggcgactatctgatgcagctgaatctggacgacaacacggccatctaccgtcagctcaccggctattctccgctgtggggtcagcagatggcggccatcgcctacatcggctccggcacgcagagacatatctacagcgacagcatcaccggcgaacgtgtggacgccatgcttccggcgaactactactacatcctgacggagaccggcaagctcgtcaagctgaccatcgtcagctttgaccgcaacacgcagcactacgaattcctgagcgaggtcggccagaccgatcttgacctcaccggcgtttcgctggtcacggacggcaagtacgcctccatggtctacgaccagaagaacgagctccttctcgtttctgtctacaccgatggcaatgagaccaagctctacgccatttctcccgatgactgcctggcggcttatgtcggatccttcggcgagaagaactgcccggtcgtttcgctgtatcagtatcagcgttcgaccgacctgacgctgaagatcaagcccacgtccgcagagctttatgcgggcgacgagcagaagatcaccgcaaaggtcattctcggcaagaccaatgaggtcacatggagcagcagcaacgaggctgttgcgacggtctccgccgacggcatcatcaccggcgtttccgcaggcaatgccgtcatcaccgcgacgacggtcgatacgaacgcggcaggcgagcatatctccgccagcgtcaacgtgacggtcaagccgctgatgaagatcgacggcgtcgtcagcgcacagatcacgaaggacggcgtgagctcctgggtcgatctcgaccttgcaaaggagcttgaggtcgcagtcgccaaggagggcgcgacacagctcagcggcggcggccgtcatggcgaaaacctctacggctccgatttgaacctcaatgcaagcggcaccaccggcagactctacaagatcgatgcaaagacctttgaagagaccgtcggcccggcctgctatgtatccttcgctccgcgcgatgtggcggatgctcccgcaacgacctttacttacacctctggcggccagaagctgacgcttcctgcgtttgacatgccggtattcctcggcaacgacggcggaacctacatgatcaccgactttgtggctggtaatctggcgggctggccgacgcagaagctgttcaccgatttggcagccatcacctatgtgggcgatacgacggtcggcgagatcaacaagacgcttgaggacggccagcttgaaggcgcggacagcgattcgcttgcacacagctactacgcactcggtgcggacggcaagctccatgagctgatcattgcgccgagctacagcaccgatgccaagacggtttcctacaacctcgtttccggcaccattgccgacatcggtatgcgctttgatcgcaccgcgctcagcatgcaatatgtcgaggtcagcgcggacagctacggcctgctgatctccgattccaccgattgcagcatctattatgtggatctggctccggagaagcccacgatcggcaagctcggccgcgttgacggcgcgaccaacctgaccgcgctgtataacgcgacggccatcggcatcattgacggcgcacagagcacgcagacgctcagccggatgcaggatgtgcagcttcaggctgcggaggcgatgaatgcttccgacgcagcggcggctgcaaagaccggcttcacaattgtggagacctatacggcagagcagcagaccgagaccgagaaaacgacggaagaaacgatggatgcgatccctgagggcacgctgaacgccatcgccgtcagcacgaagcaggcggatctgcccaatgccgccggcggtacgggcgatgcggatacgcatgttctgacggtgcgcgtcaccgacaccgaggacgcgacgaacggcctctatgaggtgacctacgacccgacaaaggtcagcctcgtcagcaagacctcctccgcgacgctcaagagcttccgcgtcgatgaagaggcgggcaagatcctcttcgccttcgcctccaagaacgccatttccgcaggctccgcgcttgcaatgctcaccttctcctacggcgattacgtcaacaccgagatcaccattgaggccaagcagcgcaacgacgcttccgatctgaaggaagagccggcggtgatcgcgatcgaggacgaggtcggcggccatgagtggaccgagacggaccgcaaggacgcgacctgcaccgaggacggctatgtcgattactactgcccgaagtgcgaaaagacgcgccatgatgtgctgcctgcg

SEQ ID NO: 1070 - DNA, 1740 bp, Unknown
  Unknown gut bacteria
ttcctcagcatggtgctgttcggcctgcttgccagcggaatggacgtggtgatcccgctgttccagcagtacgccatcaaccacttcatcgcggacagcaccatgcagggcatctggccctttgtagcgctgtatctgctggtcatggctgtgcagacggcctccaactacatttcggcctacggcgcgtgtaaggcggagctttatatcggccgcgacctgcgccgcgaggcgttcgaccatgtgcagaagctgttcctctcctatttcaatcagaacagcgccggcgatatccacgcgcgcgtgatctccgataccgaccgcatcgcgggcacgctggcgtggggcattatggagggcgtgtgggagatcgcctatctgctgtttgccattgtcatgatgttcgcgctgacctggaagctggcgctgtgcgtaatggggatcctcccgatcctggtcgtttccagcatcttcttccagaaaaagcttgtgttctaccacagaaaggtgcgcgagcacaactctcagatcacgtcggccttcaacgagggcattacgggcgcgaaaacgaccaagacgctcgtgatcgaggacaaggtcgaaaaggagttcgaccagctgaccggcgagatgaagcgcgtcagcgtccgggccatgcatttccgcagcgtgttcatgtccacgaccgcgtttgcggcctccatcgcgctggcaatcgtgctctggcgcggcggcatcatcacccgtgagggcgtgatgctggtcggtacgctttcggtgttcatgaactacgcacagggcatgatggagccgatccagtggctggtgcaggtgctttcgtcccttgtgaacgtgcaggtgaacgttgagcgcttcacaaagctcatggagacagagtccgacgtgcgcgatacgccggaggtcacggcgaagtacggcgacgccttccatccgaagaaggagaactgggagccgctgcacggcgatatcgagttccgcgacgtgaccttccgctatccggacggagaagaaaacattcgggagcatttcaacctcaaggtgccgcagggcaccaacgtcgccctcgtcggcgagaccggcgcgggcaaatcgacgctggtgaatctggtctgccgcttctttgagccgacggagggtcaggtgctgatcgacgggcgggacgcccgcgaacgcagccagctctggctgcactccaacatcggctatgtccttcagacgccgcatctgttctcgggcaccgttctggaaaacctgcgctacggccgggaggacgcgacaatggagcagatcgaggcggcggtcaaggcggtctcggcggattcgatcattgcgcgtctgccggacggctatgagtccgacgtcggcgagggcggcgacagcctctcccccggcgaaaagcatctgctgtcgtttgcgcgcgcgctgctggccgacccgcgtattttcgtccttgacgaagcgaccagctcggtcgatacggtcacagagcggctgatccagaacgccatcgaaaaggtgatgtccggacgcacgtccttcatcattgcgcaccgcctgtccaccatccgccgtgcggatgtgatcctggtcgttcacgacggaaagatcgtcgagagcggcacgcacgcggagctgatgcaggcaaagggtgcctactggcagctctatacccgccagtatcgcgaggaacagctgcgcaccatcatggaagaggcgtaa

SEQ ID NO: 1071 - DNA, 3234 bp, Unknown
  Unknown gut bacteria
atgggatttgtccatctgcacgtccactcggaatacagcctgcttgacggcgcgtgccgcatcaaggacatgatggcccgtgtcaaggagcttgggcaggaggccatcgccctgacggatcacggcgtaatgtacggcgtcattgatttctacaaggccgcgaaggctgccgggatcaagccgatcatcggctgcgaggtctatgtcgcgccgagaacgcgctttgacaaggtgtattcgctcgaccgcgaggcctatcatctgattctgctgtgcgagaatatgacgggctatcagaatctcatctatatggtctcgcgcggcttcatcgacggcttctacaaccgcccgcgcgtggacatggaccttctgcgggagcaccacgagggccttatctgcctttctgcctgcctcgcgggacgggtcgcgcagaatctgcatcaggacgactataacgctgccaaggctgcggcgctggaatacagcgaaatcttcgggccggggaatttcttcctcgagctccaggatcagagccttcccgaggaacggaaggtcaatcaggggctgctgcgcatggcgcgcgagacggggcttccgctcgttgtgacgaacgacgcgcactatctccgcccggaggacgccgacacgcaggacgtgctgatgtgcatccagatgggcaagaccgtggacgatcccgaccggatgcgcttcggcagcaaggagtattacctcaaatccgaggaggagatgcgcagcctctttccgaacgtgccggaggcgtatgagaatacgctccgcatcgcggagcgctgcaacgtcgaattcacattcggcaagtatcacctgccggaattcaagctcccggcgggctatgattcgctgacctatctgcgggagctttgcgagaagggctttgccgagcgctacggcgacgagcatcccgaataccgccagcagatggaatacgagatcaatatgatcgagaaaatgggctttaccgactattttctaatcgtatgggatttcgtgaactttgcaaagagtgccgggatcccggtcggccccggacgcggcagcgcggcaggctcgatggtcacctatgcgctgcacatcaccgagatcgacccgatgaaatacggcctcttcttcgaacgcttcctgaacccggagcgcgtgacgatgcccgatatcgatatggacttcggcgacacgcgccggggcgaggtcgtggactatgtgcgccggaaatacggcgacgatcatgtggcgcagatcgcgaccttcggtacgatggcggcacgcggcgccatccgcgacgtcggccgggcgctgagcttcacctatgccgagacggatgtggtcgcaaagctcgttccgtccacgctgcatatgacgctggacgaggcgctgaaggtttcgccgcagctgaaggagatgtacgagcaggacgtgcgcgtgaagaagctcatcgacacggcgcgtgcgctcgagggaatgccgcgcaacacctcgacccacgccgcaggtgtggtcatcacgcgcctgccggtctgcgattacgtcccgctctccacaaacgacgacacgatcgtgacgcagtataccatgaccacgctggaggaattgggcctgctgaaaatggacttcctcggccttcgcaacatcacggtcattgacgacgcgatccaggagatccgcaaaaaggacccggatttctccatggaccgtgtgaaggacaacgacccgaaggtcatggagatgctgacgcagggccggacggcgggcgtattccagatggagtccgcaggcatgaccggcgtctgcgtcggcctcaagccgcagtccattgaagatctttccatcatcgtcgcggcctaccgccccggcccgatggattccatcccgcgcctcatcgcctgcaagcacgacccatcgctcgtcaagtacaagcatccgctgctcaagccaatcctgtccgtcacctacggctgcatcctctatcaggagcaggtcattgagatcttccgccgtctcggcggatactcgctgggacaggcggacatggtgcgccgcgctatgtccaagaaaaaggtcaaggacatcgaaaaggagcgcggcgcgttcatccacggcgacccgtcgcgcggcatctgcggctgcgaggccaacggcgtcccggtggatgtggcgcagagcatctatgacgaaatgtacgatttcgccaactatgccttcaacaaggcgcactccgttggctatgcggtgatcgcgtatcagacggcatggttcaagtgctattatccgggcgagtacatggcggcgctgatgacctcggtgctcgacagctcagtcaaaatttcggagtacatcgccgagtgcaaatccatcggcattgccgtcctgccgccggatcttaacgaatcctatgaccatttttccgtctcggaaaagggcatccgcttcggccttgccgccgtcaagaacatcggacgcggctttatccagcgggtcgttcaggagcggacggaaaacggcctgttttccgaccttgaggatttctgtgcgcggatgtacggagcagatctcaacaagcgtgcgctggagaatctcatcaagtgcggcgcttgcgactgcttcggtctgcaccggtcgcagatgctccagatctacgacaccgtactcgattccgtggcaaacagccgccggaagaacgtggacgggcagatgggcctgtttgacagctttgcggacgacgcagagccggtcgttcccgctgtccgcgtgccggggctgccggagctgagccgccgggaaatgatggcgatggaaaaggagacgaccggtctctacttatccggccacccgatggacgattaccgcgccatgctgcggaagatgaataccgtgcccatcggcgcgatccaggagagcttctccgagcataccgacgaattccgcgacgatcagatcgtgacggtcgcgggcattgtccagaacgtcaagatgaaaacgacgaaaaaccagtccatgatggcctatgtgacgctcgaggacgataccggcacgatggagctgctgacgttctccaatgcgcttgggcagtacggaagctatctgcacgaaaattcagccgtgatgattaccggccgcatctctgtccgcgaggacaaggacccgcagatggtcgtcaactgcgtccagccgctggcggattacacggacgcggaggtcgca

SEQ ID NO: 1072 - DNA, 1500 bp, Unknown
  Unknown gut bacteria
atgcataaaacgtgtgagaccgtaattttcgaccctagaaattggattgaaattccggaaaaactaggctatactgaacataataagggcgtatctgaaaaccggaaagtgacgagcagtgagaagcgcctgtgcagagcaggctgtttttccgcaggaacacttgccgttttcaaggaaaaatggcgcggcgcggtgcaaaaggcccgctctctggggcgtctggagttttcagatacactcaaggaaacacagcaaggaggatcgcctatgccggtctgtgtaacaagtgaaatcggctcgctgaaaagggtgcttttgcagcgacccggacgggagctggagcatctcagtcccaacaccatggagcagctgcttttcgacgatattccctatctctacggcgcacagcaggagcatgactgcttcgcggagatcctgcgcggctgcggcgcggaggtcgtctatctggaggatctgacggcggatgtgctgcggcagcggccggagctgcgcgagccgttcattcacgacgtgatcgagcacgccggaggcagcgcccggggctaccgcgcggcgctggaagaatatctgaccgccatccgcgatccgaagctgctggtgcagcggacgatggagggcgtgacctatcaggagatcttccccagccggagcggacggctctcaagcatggtcgggacgaaggcgcgcttcctgatgccgccgatcccgaacctctattttacgcgcgaccccttcgcatgcatcggccgcggcgtgagcctcaaccatatgtattccgccacgcgcagccgcgaaacgctttacgggaaatacgtcctgacctaccacccggattttgccggtcaggtgccgctctactacaccccggaggagcatttcagcatcgagggcggcgatatcctgaatctcagcccgaccgttctggccgtcggcatttcccagcgcacccagccggaggccgtcgagcgtctggcggagcgcatctttgccgacgaggccgcgacgatcgacaccgtccttgcttttgagatcccgcgcacacgcgcgttcatgcatctggataccgtgttcacgcaggtggatcgggacaagttctccgttcatcccggcattctggaaatgctttcgatctacgagctgaccggcagagggacgagccgcattacgacgcgcgcgctgcggatgccgctggaggacgttttaaaggaatacctccatctcgaccatgtgcagctcatccgctgcggcggcggctgcgagatcgcggcggagcgtgagcagtggaacgacggctccaacacgctctgcgtcagccccggcgtcgcggtcgtctacgagcgcaattatgtgaccaatcagatcctcgaggactgcggcgtgaagatcctgaaaatgcccagctccgagctttcacgcggacgcggaggtccgcgctgcatgagtatgcctctgctccgggaatccatttcgttctga

SEQ ID NO: 1073 - DNA, 1536 bp, Unknown
  Unknown gut bacteria
atgcaattgccgaagagaaatgtaattatcgagaaaatgcgcgagtccattgcctctgtgctgccgatcacgctgatcgtcgcggcgctgtgtctgtttctgatcccggtcagcagcggcctgatgctgtcatttttgatcgggtcggtcatgattattctgggcatggggctgtttaccgtcgggtcggatctgtccatgacacagatcggcacccacatcggcgcacagatgacgcgctcaaaaaagctgggcgtgatcctgatcctgagctttgtgctcggcgtaatcattaccattgcggagccggacctgcaggtgctggccaaaaacgttccggagatcgacacgaccgttctgatcgtcaccgtctccgtcggcgtcggactgttcctgacgatcagtatgctgcgcattttgttccggatcccactgaagtggcttctggttttcttttatgctgtgatcttcgctctggccgccttttccgaccagaactttctttctgtcgcatttgactccggcggcgtcacgaccggcccgatgacggtgccgttcatcatggcgctcggcgtcggcgtggcctccatccgaagcgacgagaacgcgaaatccgacagcttcggtctggtcgcgctctgctccatcgggccgatcctttcggtgctgatcctcggctttgtctacgacaacagcggaagcactgcctcggagatccttgtcagcgattttgagacgacccgggagatcggtacggagtacatcgcgcagcttccgacctacctcgcggaggtcgcggtcgcactgctgccgatcttcgtctttttcctgctgttccagttctttgcgctccgcatcaaaaagcgcccgttccagcggatcctggtcggtatcgcgctgacttatgtgggcctggtgctattcctgaccggcgtgaacgtcggcttctcgtccctcggctatgtgctcggcggcgctctggcggatgggtggacaaagtatctgctcattccgctggccatgctgatgggctggtttatcatcaatgccgagcctgccgtccatgtgctcaacaagcaggtcgaggagctgagcgcaggcgccatctccgcgaaggcgatgggcctgagtctttcgatcgccgtctcggcggcaaacggccttgcgatgctgcgtgtgctgacgggcattcccattctgtatttcatggtgcccggctatatcatcgcgctggtcatggcgttcttcgtcccgccgacctttacggccatcgcgtttgactccggcggcgtggcctccggcccgctgaccgcgaccttcatgctgcccttcgcaatgggcgcgagcgtcgccgtcggcggaaacgtcatgaccgacgccttcggtctggtcgccatggtcgccatgatgccgctcattaccgtgcagatcatgggcgtgatctacgtcgtcaagagccgccgcagcacggccggtgagacgctcatggagccgtatgcggacgacgacgtgatcgagctttgggaggtcgcataa

SEQ ID NO: 1074 - DNA, 1410 bp, Unknown
  Unknown gut bacteria
atggagaaaaatcgcacaaagtcaggagtgtatgacatgaagatcgtcattgtcggagacggcaaggtcggcagcacgcttgccgagcagctctcccgggaaggacatgacattaccattgtagaccacagcccagatccacttcagcagacgacggaagcgctcgatattctctgcatcgagggaaacggcgcgacctatgagacgcagatcgaggcaggcgtggattccgcagacctgctgatcgcagtgacggcgtcggacgagctgaatctgctgtgctgcctgatcgccaaaaaggccggcgcgcagcatacgatcgcgcgtgtgcgcaatccggaatatgattcgcagctttcgctgattacggacgacctcgggctgagcctgtccgtcaacccggagctgacctgcgcgaccgagatcgcgcggagcctgcggctgccgtcggccatgcgggccgacgcctttgcggacggacatgtggagctgctgcagctgattttgtcggagcagtcgccgctggcaggcaagacgctgatggagctgccggtactgacgcggtcgaacgtgctgatcggcgccgttgagcgcggcggaagcatggtgacgatccccggcggctcgttccggctggaggcgggggaccggatcctcctgatctgtacgccgcgcagcgcgcagaccttcttccggcaggtgcatctggcggcaaatccgatccggcacgttatgctggtcggcggcggacgcatcgcgtattatctggcgcggcagctgctggaaacggggctggacgtcaagatcatcgaatcgaattttgcccgctgcgaggcgctttcgcagctgctgcccaaggcgacgatcctgcacggcgacggtacgaacgaggcattcctccgggagtccggcgtggagcaggtggacgcctttgcgagcctgaccggcatggacgaggaaaacatcctcatcagcctctacgtccgcaagagcttcccgcgcgtcaaggtcgtgaccaaggtcaaccgcgcctcgttccaaagcattctcagcgcgctggatgtcggcagcgtctacaactcgcgccacagcgcgtccaacctcatctgccgctatgtccgcgcgatgcagaattccgtcggctccaaggtcgagacgctttacaagctgctcagcggacgggtcgaggcgctggaattccgtgcggcggagggctctccggtctgcgggacgccgctttccacgctgcggctcaagcggaacatcctgatcggctccattgaccgcggcggcaaggtcattatccccagcggccaggatactatcgagccgggcgataccgtcattgtcattacgaccatcaccggcctgagcgacctgagcgatattctggacagacgaaagggataa

SEQ ID NO: 1075 - DNA, 1371 bp, Unknown
  Unknown gut bacteria
atggagagaaaaaacggcgggacgatggggctgctggcgcagcagctggaaaaggtctacgggatcggcgaggaatactatcgcggcgaggtcaagcgcggcctgcgcaacagcgacggcaccggcgtcctgatcggcgtgacgaaggtcggcagcgtgcagggctacctgatgcaggacggacagagaattccgacgccgggccatctctactatcgcggcatcgatctcaacgacatcgtggaagcgcaccgggcaagcggcaccttcggctatgaggaggtggcgtatctgcttctgatgggcagcctcccggcgtgcggtgagctggcgcggttcaaggagcttatgaattgtgcgcgcaagcttccggacggctttacggagagcatgatcctccgccgtccgagccagaacatcatgaacgagctggccagaagcgtgctggcactctattcctacgacgacgacccggacgatacggggacggaaaatctgctggcgcagtccatccgcctgatcggctctttcccggccatcgtggcgaacgcctacgccatcaagcggcactattttgagggcgaatccctgcacatccactatcccgaggacaagctttccacggcggaaaatttcctgcgcatgatccggccggacaagcagtttaccgaggacgaggcgcatttgctggacatgatgctgatgcttcacgcggagcacggcggcggcaacaacgcgaccttcgtctgccgcgcgatctcctccagcatgacggacacctacagcgccatcgcgggtgcggtcggttcgctcaagggcccgctgcacggcggcgcgaacgccaaggtgatggagatgctccactatgtgcgcgaaaacaccgatccggcggacgacggctccgtgaccgattatctcaaccgtctgctggaccgcgaggcgggcgaccgctccggcaagctctacggtctgggacacgcggtctatacgatgtcagacccgcgcgcggtgatgctcaagaaatacgcccggagcatggcggagaaaaagggcttcacggcggattttgagctgctggaaaagatcgagacgcttgggatccggctgcttcaggagcgcagacgctcggacacgccgatgtgcgccaacgtcgatctctattccggccttgtgtatacgatgcttggcataccggaggagctgtttacgccgctgtttgcctccgcgagaatttccggctggtgcgcaaaccggatcgaagagatactgaccggaaagcgcatcatgcgtccggcctaccgcgccgtcaccatccggggcgaatacgttcccattgaggcgcgcacgccgcagctgctgccggaggcgtaa

SEQ ID NO: 1076 - DNA, 996 bp, Unknown
  Unknown gut bacteria
atgtcgcagctcgtgctggtggccgcgctggcggagctggcgggctgggcctttcggcattggttcggtgtgacgccggagctgccgatcttcgtgtgggcgatggtgttcagcgggaccatcggcgtggccgtgaccaaccatatgacaaaaatgctgatcgaccccattgccaagctccgcagcgcgatgcgcgaggtcgcggacggcgatttcaaggtcgaagcaaaatgcgaaagccgcatccaggacgtgcaggacatctatgacagcttcaacagcatggtgcgtgagctgagcacgaccgagaccctccagacggacttcatttccgacgtttcgcacgagttcaagacacccatcaacgccatcgagggctatgcgtccctgctcgagggcgagccttcgcccgaggagcagcgcgcctacgtcgagaagatcctcttcaatacccgcaggctgtccgccctgacagggaacatcctgctgctgtccaagctgagcaatcagtccatcctgccgcagaaaacgcagttccggctggacgagcagatccggcaggccattgtcgcgctggagcagaagtggtcggagaaggagcttggctttgaggtggagctggcagagacgccattcttcggctatgaaagccttctgccgcatgtctggacgaacctgatcgggaacgcggtcaagttttcgcccaagggcggcgagatccggataaaaatgatgcgcacggaaggcgcggtcgtgtttacgatcgaggacgacggccctggcatcgtgccgggtgacgaggaacacattttcacgaaattctatcagagcgagtcctcacacggcatggagggaaacggcctcggactggcactggtgcggcagatcgtggagatgagcggcggcagcgtggacgtgcagaatctggaagcgggagactgccggtttacggtgcggctgccgttagagcaagaaaaaggggctgccttttcgtga

SEQ ID NO: 1077 - DNA, 1224 bp, Unknown
  Unknown gut bacteria
atgaaattccgaagaattttctgcgcactgcttgcggcgctgctgctgtgtacggcggcagccgccgccggatacccggatgtttccgacacgcattgggccggaaagcagatcgcttatttgcaggacgagatcaagggctatcccgacggcacgttccagccggagaacaccgttacgcgtggggaatttctgacgctttttgcccgcattgcgttcccggatgagtggaagcagcagtcgggagaggactggtggaagcctgcctacgaggtctgcaaggcccacgagcttctgaacgggatcaccaacatttccgaggccatgccgcgatatgagatcgcatccatcctcgggcgcttttgcagcggctgggacggtgtgaatgagagcgcctcgcctgacggaaggctcgtcatcaactgggaggagcagcggctggagtcgccggatgcgcagccgcttttctccgacacggagaaatatgagcgtgtgagcaatttgcttcggatctgcgccaatcagggcctgatgaacggctatccggacggcagcttcaagcccgagaagggcgtgacgcgcgcggaagccgccgcgattctggcgcggctcaaggcgcagctggcccttcgtgaaaagggctgcgaatatgtctgcacggtggggaagtactggctgatgcagcgcgagacggagaaaacgatcggccttgcgctctataagccgtacacaggtacgctctgccggatagtcagcagccgcagcaaggtcaagtctgataccaacggcccgctggtcacgaatcttctgatcggctccgacggcatctacgtctggggcaaggcaggactctatcagcgcaagggcgacaagctcgtgcagatcacagaagatccggtctttgatttctattgggtcggagacaatacgctctattatctgagctgggacgcggatcaggaggccccgacgtattccggcgcgggtatgtactatccctgcgcctctcaggtcaaaaagctggagatctccggagaaaaaacgagcgtcacgctgcttgccagccgcgacgagaagaacttcatgcagaatctgaccgagatttatgtggaaaacgggaaggtatatgcagccggctcctatttcatgggcatggcggactggcatgcggcgctttatgaggtaacagacggcgcgcttacggcagtatttggagaatactga

SEQ ID NO: 1078 - DNA, 1440 bp, Unknown
  Unknown gut bacteria
atgtacgatgtcatcatcatcggctgcggcgtcgtcggtgcggcgtgcgcttacgagctgtcgcgctacgagctgtccgtggcggtgctggaaaagagcaacgacgttgcaaacggtaccagcaaggccaattccgccatcgtccacgcgggctacgacccccatcccggcacgaacatggcgcggctgaatgtggaggggaaccggctgatgccggagctttgcagaaggctggacgtgccgttccggcagaccggcagccacgttctggcgttctgtgaggcggagctggaaaccctgaaggcactctacgcgcgcggcgtggaaaacggcgtgccggggatgaagctcctcaccggcgacgaggcgcgcgccatggagccgaatctttccgaagcggtctgcggttcactgtgggcgccgtcggcgggcgtgatctcgccgtgggagctgacgctggcgctcatcgaaactgccgtccgcaacggcacggagctgcatctggaggctccggtgacggcgctgcggcaggaaaatggccctttttccgccgaaacgccgcagggtgtattcgaggcgaagtatgtcatgaatgccgcaggcgttcactgcgaggagatcgccgccatgctcggctgcgcggattatacgatccagcccaaccgcggggaatactacctgctcgacaagtccgagggcacgcgcgtgcgctcgaccattttccagtgcccgaacgaaaacggcaagggcgttctggtctcgcccaccgtgcatggaaatctgatcgtcggcccgaatgccgtcaacatttccgaccccgacggaacggagaataccgccgcgggactggcctttgtgcgcgaaatggcgctcaagtccgtgccgtcgatctccttccgcgacaacatccgcaacttctccggcgtccgcgccaatcacccggaggatgatttcctgattggagaaaatccgaaggtatcgggcttctatgagctggcgggcgtaaaaagcccgggcctcagctccgcgcccgcgatcgcaaaggacgcggcaaggtggctggcgggcaagacgacgctgatggaaaagacgcacttcatcgacacgcgccgccgcattcgcttcaatgaactgtccgccgaagagaaaaacgccatcatccgcgaagatccgctgtatggccgtgtgatctgccggtgcgagacggtcacggagggcgaggtcgtcgccgccatccattctccggtgccgccgacgaccatcaacggcgtcaagcgccgtgtcggcgcgggcatgggccgctgtcagggcggcttctgcgggccgagagtgcaggagatcctgtcgcgggagcttggcattccgatggacaagatcctgatggaccagccggggacgtacatcctgaccggcgaaacgaagggaggcgctcacgaatga

SEQ ID NO: 1079 - DNA, 2463 bp, Unknown
  Unknown gut bacteria
atgagtaagcccgcaaaggaaaaacaggataccgacagctcctttctggagaagctttcgacgctcattgtcgataagcggaatctggtattcttaattgtgatcattctgcttgttttctccgctttttcgcggaactgggtcgaggtcgagagcgacctgacctactatctgccggagggctccggaacaaaacaggcgctgaatattatggacgagcagttcattacatacggctctgcggaggtcatggtcgcaaatgtgacgctgaagcaggcggcggagctgcgcgaccagatcgccgatgtcaagggcgtacagatgatcagctacgacgaaacgtcggagcactataacaatctctccgcgctctactcgatcacctttgattattccgaggatgatccggcgtgtctggattctttggatgccgtgaaggagctgctgtccgcctacgacgtttatgtcaagaccgacctcggcaattcgcaggagaaaacgatcgagcacgaaatcaacgtcattatgatctatgtcgccatcgtcattgtcgtggtgctgctgttcacctcggaaacctacggcgaggtgccggtgctgatcttgacgtttgttgtggcgctggtgctcaatcagggcagcaactatctgcttggaaagatatcgttcgtctccaactccgtgacaagtattttgcagctggcgctgtccattgactacgcgatcatattctgcaatcgcttcaaggaagagcaccggatgcttcccatccgcgaggcggtcattgtggcgctgtcaaagtccatcccggagatcggcgcgagctgcctgaccacggtcggcggcctgatcgccatgctgttcatgcagttccgccttggcccggatatggccatctgcctgatcaagtccatcgcctatgcgctgttgtccgcgttcatcgtgatgccgggactgctgatgctcttcggcccgctgatcgacaagaccggacacaagagctttgtcccgaagatctccttcgttggccagatcgactacgcgacccggttcattgttccagcggtatttattgtgctggtcgtactcggcttccgcatgtcgaagaattgtccgtttgcctatggctacagcctcctgtccacgccgaagctcaatgagacccagatcgcagagcagatgatcgaggacaatttttcctcgaccaatatggtggcgctgatggttccggcaggggactatgacaaggaacgcgagcttttgcaggagctggaaagctacgacgaggtggacagcagcatgggcctgacaaacatcgaggccatggacggctatatgctggccgataagctgacgccgagacagttcgcggagcttgcaaacctcgactatgagctggcggaggtcgtctacgcggcctacgcggccaatcaggacaattacggccagctggccggtaatatcaccaattatcaggtgccgctgatcgacatgcttctgtatgtctgcgaccagcttgacgcgggcgtcgtgacgctttcggacgatcagatgcagctgctctcagacgcaaaggtgcagatgctcagcgcgaagaatcagcttcagggagatcagtacagccggatgctgctgtatctgacgctgcctgtcagcggcgacgagacctatgcttttaccgacaccattcaggagatcgcgcggaagtattattcggacggcaatatctatctggcgggcgactccacgaatgaatatgactttgaaaagtccttcgcagtggataatacggtcgtcagcatcgtgtcggtgctgatcgtgctgctggtgctgctgtttactttcaattcggcgggtatgccgctgctgctgatcctcgtcattcagggcagtatctggattaacttctccttcccgacgatcacgggcaagtatctgttcttcctcggctatctgatcgtcagctcgatccagatgggcgcgaacatcgactatgccatcgtcatcgccagccgctatcaggagctgaaggggaagatgccgcacaagaacgccatgatcgagacgctcaactttgcgttcccgacgatcatcacctctggtgcgatcatgtccatctgcggcttcctgatcggaagcatgacctccgagccggtcattgccggtatcggcgaaagccttggacgcggtacggtcatttcgatcttcctcgtcatgttcgtacttccgcagattctgctggtcggcagcggggtggtggacagaacctccttctcggtgcctgcggtttccgtcggcgaacggaaaacggcaagcggtaaggtcgttatcaacggtatggtacgcggacacatcaacggtacggtgcgcggtatactgcgcgcgacggtggatggagacgtagatttgaatgtggtttccggctctgccggcggagaggaggcggaacaggatgaacagtaa

SEQ ID NO: 1080 - DNA, 2520 bp, Unknown
  Unknown gut bacteria
atggccagaaaagaagagaatgcctcgcagcccagaccgcaccgcgtcaggcgcgtcatcgcggcgatcctgaaggtgctcggtacgctgctgctcgtagcgctgctgacgacgctggtgcttgcgtgtctgtttgcgctgtatgtgaaaaacgacctgtcgtctcaggtggacttttccattgcggatttctcgctggatcagacgacggtgatttattatgaggatccggatacgggcgagaacgtcgttttgcagaagctctacggcggcgagaaccgcacctgggtcagctatgaaaagctgccgaagaacctgatctacgcctgcgtggccatcgaggacaagcgcttcttcgaccatcacggcgtggactggatcacgacgatgcgcgcctgtatcgatatcttcctcggaaagggagatgcgggcggctcgaccatcacgcagcagctcatcaagaacgtgaccggcaacaaggaggtcactgtccgacggaaaatgatcgagatcttccaggcgctggagtttgaaaagacccacaccaaggaggatatcctggaatggtatctgaatatcatcggccttggggaaaactgctccggtgtacagtcggcctcgcaggtttatttcggcaagaatgtggaggagctgagcctcgcggagtgcgcttcgctgatcggtatcacgaacaacccctccatctatgacccctatatcaatccggaaaagaacaaggagcgtcaggaggtcatcctcagccagatgtacaagcagggatacatcaccgagagccagtacaacgaggccaagaatgaggagcttcagctgcgcaacaacagcggcagcggcgatgacgattcctccgactattattcctattttgtcgatcaggtcatccgcgacgtggtgaacgacctctgcgacaagaccggctatgcctacgacatcgtatataagatggttctgaccggcggctacgagatctactccaccatgaatccgaaggtgcagcaggaggttgaccgcgtctatcaggatctgaaaaacgtgcccaacacggcaagctcacagcagcttcagtccggtatggtgatcgtggacaacgccacgggcgatattgtagcgctggcgggcggcgtcggcgaaaaagagggaagcctgacctacagccgcgcgaccatgagtctgctgtctcccggctcgacgatcaagccggtggccgtctatgcgcccgccatcgagctgggactcattacgcctgcctccgtttacgacgatacgccctacagcttcaccgatacggcttcgtggccgaagaactccgattccacctaccggggcctgacgtcgatcaacgacgcgatgtgctactccatcaacacgatcccggtcaagctggtcgcggagatgacgccggaatactgctattccttcgccaaggacaagatggggctgtccacgctggtttcgaattatgtaaactccaagggtgagacgctttccgacgtcgcgctggcgccgctggcgctgggcggactgaccaacggcgtgaccatccgcgccatgacggcggcctacgccacgtttgcgaacgagggcgtctaccgtcaggccagaacgtacacgaaggtaaccgacaacggcggaaagaacgtcgtcctcgacaacacgcagaactcctatgtcgccatgaaggacatgacggcgtggtatatcacctatatgctgcaaaataccgtctcctacggcagcggtacggcagcagcgctggacaatatgcaggtcgccggcaagaccggcacgaccacgagcgactttgaccgctggtttgctggctatacgccgtattacaccggcgtggtgtggtgcggctatgacgcgccggaggaggtcgtgctgaccgactccacgaccaacccagccatcgtcctgtggcagaaggtcatgcagggcgttcacaaaaatctcaagtatgctgagttcaagaagccgacgaacgtcgtcgagtgcagcgtttgctatgacagcggcctgcttgcgaccgacgcctgccgcgcagacccgcgaggaaaccgcgtggtcaatgtggagctgagcctctacgatgtgccgacggagtcctgcacgacgcataagatggtcaagatctgcggcacctccaagcacgccgtcaacgaatactgcgagctggttcccggcaacacgacctatgaggtcggattgcttgatgtgacgcgcggcttcccgatccgcggaatcaaggtgctcgatcaggcgttcgtcgtcccgaacgcggcgatcccgagcggctattacggcgcggtctcgccggacgtggacgcgatcaatgtggagtgctatgtccacacctttgagagcatcccggaggaggaagaggaagaggaagaagagcccgaagaggagaagcctgaagataccgaacaggaggacgactccggagcatcgggcggaacgcaggtcccggactgggaagaaaacagcggcatccggccgtaa

SEQ ID NO: 1081 - DNA, 1101 bp, Unknown
  Unknown gut bacteria
atgaggcttgacgcactcacgctctatgatttccgaaattatgcgcacctcgaggcgcagttcgtgccgggcgtcaatctgatcctcggcgagaacgcacagggcaagaccaatctgctcgaggccgtcgcgtatttatcaacaggccggagcttccgcaccgcgcgtccgcaggagctggtgcgcttcggggccgattttgccgacctgagcgcagagcttttctcggccgggcgtcagcagaccgctcgcgccgtgattttcgccggaaggcgtccgaggcagatctacgtcggaggggtcaagcaaaagaccgcagcggctctcgacgggcttctgacgacggttttattctgtccggaggagcttcaggtgctcaagggcggtgccgccgcccggcgaaagctcatcgatacggcactgtgtcagctgcggccgaactacgcccgcgcactggcggaatatacgaagctgctcgacagcaagagccggatcctgaaggactggcacgaaatgccgtcgctgctggagcctctgccggaattcagcctgcgcatggcgcaggtgggggccgtcatcgtgtcctatcgtgcgcgttatctcaaaaagcttgccgaagcggcagcggaatatcattccgaattttccggcggtcaggaacggctgacgctctcctatcagaccgtctccacgatcgatgatccgtttgccgaccagaaaacgcttttcgagcgcatttttgagcatcagaagcgccatgagcgcgcggagatcgacgccggacagtgcctgaccggcccgcataaggacgattttgaaacgttcatcaatgaccggcccgtcaagagctacggctcgcagggccagacgcgcaccgcgtccatcagcctcaagcttgccgaacgcgagttgatgtaccgggataccggcgaagagccgctgctgcttctggatgacgtgctctcggagctggacgccaagcggcaggacttcgtgctcaatcagatccgcaccgggcaggtgctcattacctgctgcgagaccgaccggctcacggagttggggaaggtcatgctcatccgggacggggagctgatttaa

SEQ ID NO: 1082 - DNA, 1893 bp, Unknown
  Unknown gut bacteria
atggaaaagaaacagtttcaggcggaatccaagcggctgctggatctgatgatcaattctatctatacccacaaggagatcttccttcgtgagatcatatcaaacgcttccgacgccatcgataagctggcgtatcaggcgctgacggacgacaaggtcggcctcagccgcagtgactttgccattaccgtctgcgcggacaagcaggcgcgcacgctgaccgtttccgataacggcatcggcatgagcatggacgagatggaggacaatctcggtacgatctgccgctccggcagcctcaagttcaagcaggagatggagaagaaggacgagctggacatcatcggccagttcggcgtcggcttctattcggccttcatggtcgcggacgaggtgacggtcgtttcgaagaaatacggctccgacgaagcgttcatgtggaagtcgagcggcgccgacggctataccatcgagccggcacagcgcgacggcgcaggcacggacgtcattatgaagctcaaggaggacacggaggacgaaaagtacagccgcttcctcgagacctacacgatccagagcctcgtgaagaagtattccgattacatccgttacccgatcaaaatggatgtggagacgcagcgcgtcaaggaaggcacggccgattccgataagccggagtatgagactgtgacggagaaccggacgctcaactcgatggtgccgatctggcagaaggccaagaaggacgtcaccgacgaggagtacaacaacttctacaaggaaaagttctttgactttgaggacccgttggctgtgatccatgccagcgtggagggcgctgtgacctataaggcgctgctgtatatcccggcgaaggctccgtatgacttctacaccaaggacttcaagaaggggcttcagctctattcctccggcgtgctcattatggaaaactgcgcagacctgctgccggactgcttccgctttgtccgcggcatcgtcgattcgcaggatctgagcctgaacatttcgcgtgaaatgctccagcatgaccgccagctcaagtttatggcctcgaatcttgagaagaagatcaaggcggagctgacgaagctgctggaaagcgaccgcgagaagtatgaaaagttcttctccgttttcggaatgcagctcaagtacggtatcgttgcggattacggccagaagaaggaaatgcttcaggatctgctgctctactggtcgagcaagcaggataagctggtcacgctcaaggaatataccgacgccatgccggaggatcagaagtacatctattatgcaagcggcgagagccgttcgcgcctcggtcagcttccgcagctcgagctgctccgccagcagggctacgatgtgctgttcatgaccgacgaggtggatgagttcgttccgcagtcgctgatgaagtacgccgacaaggagcttcgcaacatcacgaccgaggatctcggccttgcgacagaggaagaaaagaaggccgccgaggagaaggcagagcaggccaagacgacgctggatttcgtcaaggatacgctgggcgacgccgtgaaggaggttcgtttgagcactaatctcggcagtcatccggcctgcatggtgccggagggcggcatgaccttcgaaatggagaagtatttccgccgcgtcagcccggagatgcaggcaaaggctgaccgtgtgcttgagctgaacccggatcacccggtgttcgccgccttgcagctggccgttgcgcaggacccggaaaaggcaaagaagtatgtgaagatcctgcatacgcaggcactgatgatggccgacctgccggtcgaaaacgcgggcgagtataccgagcttgtctgcgagctgatgaagtga

SEQ ID NO: 1083 - DNA, 1275 bp, Unknown
  Unknown gut bacteria
accatgaagaaaaataagatctttctactcatcatatcgctgatggcggcaagcatcctctggatctatgtcgtcacggtcgtcaaccccgagggcaaccgcaccattaccggcattcccgtcgttttctccggcgaggatgtcctgcgggaggatcagagccttatcatcaccggagggcgtactgcgaccgttacggcggagttccacggaaagaacgccgacctcaacaagctgcttcagcagcaggacgagatcacggcggtcgtcgatgtgacgcgcatccgcacggcgaagagctataccatgagctacgacctgaacctcccgaactccgtgcaggacgcgggcatcaccgtcaccagccgaagccccagctccatcacctttgaggtgcagaagcaggtttccatgccgatcgagatccgcggggacttcacgggcgtcagcgtggccgagggctacatgctggaaaagacctcgtttgactatgacgtcgtgcaggtcacaggccccgagagcgtggtcagtaccatcgactgcgcacaggtcgtcatcacgcgcacgaatctggacaaaaccgtgacggataccgttccgttcacgctctgcgacaaggacggaaatgcggtcgatacggcgaatctgtccatggatatcagcacggtcgatgtgacgctgaatgtggtgaaatataaggacgtggcgctggaggtcgagatcctcgacggcggcggcgcgaccagcaaggacgccaaggtcacgatcgatccggaaagcatcacgctctccggcgactcgacggtgctcgacgccatcaacaagatcacgctcggcaccatcgatctggcggatatggagtcgaacaccctgacgcagagctttgatatcatcattccgaacgacaccaagaacgtcagcggcgtcgatcaggcgaatgtgacggtcacaatccgcaataaggagacggctgtcatccgcgcgacgaacatcgccttcatccatgagccggaggggctgaccgccaccagcatgaccaagcaggtacaggtgctcatccgcgcctctacggcggatatttcgaagatcacctccaataacctccgcgtcgtggcggatctctccgattacacgacggcgggtaccaacaccgtcccggtcaccatttacatcgacggcttcccggatgcgggcgtgatcggagacgaatacacgatcgttgtgacgctggccgaaaagacggacgagaaaaacagcgacacgaacggcaattaa

SEQ ID NO: 1084 - DNA, 2949 bp, Unknown
  Unknown gut bacteria
atgctgaggctgaagcaaatcgtaaaggactacaccgccggagattccacggtccacgcgctgcgcgggatcacactggatttccggaaacaggaatttgtcgcggtgctcgggccgtcgggctgcggcaagacgacgctcctgaacatcatcggcgggctggatcaatatacatccggagacctgctgatcaagggccgctccacgcgccagttccgcgaccgggactgggattcctaccgcaaccactccatcggcttcgtgttccagagctataacctgatcccgcatcagacggtcctgcagaacgtggagctggcgctgacgctctcgggcgtctcccgcagcgaacgccgcgcccgcgccaagcgcgcgctggagcgcgtcggactgggcgaccagctgcgcaagaagccgaatcagatgtccggcggccagatgcagcgcgtggccatcgcgcgtgcgctggtaaacgacccggagatcctgcttgccgacgagccgaccggagcgctggactcggagacctcggtgcagatcatggagctgctcaaggagatttcccacgaaaagctcattattatggtcacgcacaatccggagctggccgagcgctacgccacccgcaccatccggctcctcgacggcgaggtcgtcagtgattccgcgccctatgaagcacgggaggcggagccggtacagacggaaaagacgaaaaagacctccatgtcgttcttcacggcgcttggactttcgctcaacaatctgatgaccaagaaggcgcgcaccatcctgacggcctttgccggctccatcggcatcatcggcattgcgctgatcctgtctctttcaaacggcattcagaattacatcgacgatgtgcaggaggatacgctttcatcctaccccatcacaattgaggcggaaacggccgacatgacctccatggtcacggcgctgatgggcgcacacgacgaggcaaaggaggaaacgcatgaggacgggcgcgtctacgcctcgacggtcatgtatgagctgatgaacagcttcaaccagaccgagacgcagaccaacgatctggcggccttccggacgtatctcgacgacccggacagtgagatccaccagtacctctccgcgatccagtattcctatgacctgacgctgccgatctacacgaaggacgcggacggcaatattgtgaaggccgacgtcatggagctgatgcagaatatgatgtccagcctctacggcggcgattacagcgcttatttttcccgttttggcagctattattccggtatggacgtatgggaggagctgctgcccggtgaaaacggcgagagcgtgtctccgctcgtccggtcgcagtacgacgtgctctacggccattggccggagagctacgacgaggtcgtgctggtcgtgagtcagaacgatgagatctccgatctggtcatgtatgcgatgggtctcaagaccgaggcggaaatgaatcaggcgatggaggatgccatgaacgaggtcgaagtctcgaccgacgccatgagctggagctacgaggagctttgcggccggaccttcaagctgatcctgccgtatgagaattaccggaaggacgcgaacggcggctataccgacctttccctcacggacgcgggcatggattacctcttcggctcggacgaggtcggtacgacgctgaagattgccggtatcgtccgcccgaatccggacgctgcggcctccatgctgagcggctccatcggctataccagcgcgctgagcgaatacgtcatgcagaaaacggcggacagcgagatcgtaaaggcgcagctggcggagccggagacggacgtgctgctggatctgcccttcaagacggacgataccgccgagccgacggaggatgagaaggacgccgccgtgacggcgctgctcgaggacgcctccgcgcaggacaaggcgtcgatgtatctggacatgatgcagcagcccgccgcggactatcttgacgccatgaccgcgcagaccatgcaggacatgacccgcgagacgatcgaggagcagatggcgggggcatatgccgagcagatgggcgtgagcaccgacgaggtccggggctatatcgcgcagatggacgacgagacgctcatggactacgtcgagcagatggtgcgcgaatcgatcacgcagcagtacgccgagggcgtttcccggcagctcggcgccatgacggcggcgcagctggctggtgcgatggatatgacggagcgcacgcaggagcagacggactatctctacagcgtctacgcgcccgcgcagtattccgaaagcagctgtcacgacgtgctggacacgctcggctatgtcgagccgggaaagccgtcgaaggtcagcctctatgccgcgaccttctccgacaaggacgcgatctccgactgcatctcccgctataacgacacggccggcgaggacgagcagatcacctacaccgattatgtggcgctgctgatgagctcgatcaccaccattatcaacgccatctcctatgtgctgatcgcattcgtggccatttcgctggttgtctcgtcgatcatgatcggcattatcacctatatctccgtgctggagcgcaccaaggagatcggcattctccgcgccatcggcgcttcgaagcgcgatatttcgcgcgtgttcaacgccgagacgctgatcgagggcctgatcgcggggctgatcggcattgggctgacgctggtgctgattattccgatcaacgccatcgtgcagcacttgaccggcattcctacgcttggggccgcgcttccggcagctgccggagcggtgctcgtcgccatttcgatgctgctgaccttcgttgcgggacttattccgtcgcgcattgctgcgcggaaggaccccgtcgtggccctgcggagcgaataa

SEQ ID NO: 1085 - DNA, 1473 bp, Unknown
  Unknown gut bacteria
ctgcgctacccggaggtcaagatcgtctgcaacgccaagaccgtcacgatgatccggaatttcttcaccttcgacatcgacagccgcgctgtgatcgtcaaggagatggacacgctctgcacaggacggcataccttcgccttcgtcatggcgccgatggtccactggccagaggccatggtcagctacgacgcaacgaccaaaacgctcttctccgccgatgccttcggcaccttcggcgcgctgaacggcaacctctatgccgacgaggtcaacttcaagacggagtatctggccgacgcacggcggtattacaccaacatcgtcggcaaatacggcacgcaggtgcaggcgctcctaaaaaaggcggccgccattgaaatcgagaccatctgcccgctccacggcccggtctggcggaaggatatcgcgtggttcctggacaaatacgtccattgggcgacgtatcagcccgaggagaccgccattgtgattgcctatgcctccgtctacggcaacaccgaaaacgcggcgaatatcctcgccgggatgctggccgacaagggcgtccgcaacgtcaaggtctacgacgtttccgcaacgcacccgagctatatcgtctccgaatgcttccgcgccagccatctggtgttcctctccacgacctataacgcgggcatgttcgtgaacatggaaaacctcgtccacgacatcgtccaccacaatctgcaaaaccgcaccattgcgctggtggagaacggctcgtgggcaccgacggcggcaggtctgatgcgcgccgagttccagaagctcaagaactgcaccatcctcgacgagggcgtcagcatccgttcctccctcaaggaggatcagcttgcgcagatggaggcgctggctgacgcgctggtcgcatcgatgcctgcgcagaagcccgttcctgcgcaggaaaagcctgcgggcctcgtggagcagaacgcgatgttctcgctctcctacggcctgttcgtcttgacggcccgcgacggtgcgaaggacaacggctgcatcatcaacaccgtcacgcagctgaccgattcgcccaagcgcatttccatcgcagtcaacaaggcgaatctcacgcacgacatgatcgtaaagaccggcgggttcaacgtctccgtcctttcaaacgacgcgccgttcgcgctgttccagcactacggcttccagtccggccggaacacggacaaattcgcgggcgttcagggcatggcgcgttcgaccaacggcatatattatatcccgtactgcacctccgccttcctcagcgcgaaggtcacgcagaccgtggaatttgaaacgcatacgctcttcatcgccgacgttacggaggccaagctgctctcgaacgtcccctccatgacctacgcctactattttgcgaacgtcaagccgaagcccgccgtgctccagaagcagaccggctgggtctgc

SEQ ID NO: 1086 - DNA, 1281 bp, Unknown
  Unknown gut bacteria
ggcaacatgatgggctccatcatcgacgttccggaaaagctgagctttgaggtctccttcaacgatcccgaccgtaccgattccatcgccaaggttgagctggtcgccaactccggcaaggtcgcctatacctgggacaatgccgcggatctcgccaagggctccgtcagcgtcacgctcgatcccgagtacacctattacttcgtccgcgtcaccgagggcgacggcgatctggccgtgaccgctcctgtgtgggtcggcgaatcgctcaagctcggcatctccaaggctgagtgcggcacctctacgccggtcaccgacgaagagctgaccatcaccaccacgttcttcaacagcgaggccaagcccgcgacgatcaagtccatcacctataccatcggcaatgagacgatcggcactgtgacggacgccatcgcgctggctgcaagcagcacgcaggatgtggagttcaagtataccccgaccaaggcccgtgtcatgacggtcaagatcaccgccgtgatcgagcaggacggcaaggattacaccttcacgaaggacgtcacgctcgacgttctggatgctggtaagcttgtctacatcggcatcgacgcatcccactacaacgagtatgttgcgggcaactacaaggattccatgggcaacttcggcgagctggctgcgggctattccgtgcgcacggtcatgctcaagaccagcgaggagctgatcgcggcctgcggcaacgccaagtttaagggcctgatcctgacggctccgtcccgtcgtctggcggacgcgcagacggatcccagaacctattccgaggcagagctgaacgcgatcaaggcgttcaacgagaatggcggcatggtcgtgcttgccggctggtccgacaactacgagaactacccggtcattcagaacaacccggccatcaagcacatggctgcgacgcagaacgaggttctggcggcccttggctccagcctccgtatctccgacgacgcgacctatgacgatgttcgctccgcagcggacggcgtcgataagtggagactctacttctcggcctacaatatggacaacccgcttctgaagggcgtggagtttgacgcggagcatccgttcgacaagctctacaccgagcgcttcagccactacggcggcgcctccatctatgcggttgacgccagcggcaacccgacctccacgatgcccgcgacggtcagccccgtggtctatggccacgcgacgacctactccgtggacgttgacaag

SEQ ID NO: 1087 - DNA, 507 bp, Unknown
  Unknown gut bacteria
ggccacaacttccgcaagaacgcgcagaccggcaagtacgtctgcgagaactgcggtaaggttcttggcgagtccgagaacacgaagccgaccaagccgacgaccccgaccaagcccggtaaggacgatacgaagttcccgttcacggatgtgagcaagaacgatcgttactacgacgcggttgactacctgtacaacaacggtatcatgaacggcaccacggacaccctgttcagcccgaacgcagaactgacccgtgcgatggtcgtgacgatcctgtacagagcacagggcaagcccgctgtcagcacgagcggcagcttcaaggatgtagcggcaggccgctactacaccgaggccgtcgaatgggcagcagcgaacaacatcgtcaagggcttcacggacggcacgttcaagccggacgagcctgtgacccgtgagcagctggcagcgttcatcagccgctacgctgagtacaacggcatcgagatcgttgcagccgacggc

SEQ ID NO: 1088 - DNA, 1881 bp, Unknown
  Unknown gut bacteria
atgacggaaagcttgcagcattttctcgaacaatttcacaccaccggctgcgcggatgcgttccggtatatgggctgccatttcgcagacggcggcgcggtgttccgcgtctgggcgccgaaggccgagtctgtcagcgtggtcggggatttcaatttctggaatgagcaggatctgcccatgcagaagatctcggacggcgtctgggaggctttttctgtttatgcgcagcccggcggagcctataaatactgcgtgaccggccaaaacgggcggaaggtctataagaccgacccctacggcacgcgctgcaaggcgctgccggacacctccagcgtgctggagccgccggacagcttcgtctggcacgacggcgcgtaccgcgcgcgcaggaagaagcagaacgcgctgaagcggccgctcaacatctatgaggttcacgccggctcctggaagcgccatgccgacgggagcgcctacagctgggacgatctgacggcggagctgatcccctatgtcaaggacatgggctatacgcatatcgagctgctgccgatcatggaatatccctacgacccgtcgtggggctatcaggtgacgtgctattacgcgccgacgcaccgctatggcacgccggagcagctgatgcgcttcgtggacgaatgccaccggcagaacctcggcgtgatcctcgactgggttccggcgcatttcccgaaggacgagaacggtctttacgagtttgacggcgcgtgctgctacgagctttccgacccgatgatgaacgagcatcccgactggacgacgcgcatttttgactacggaaagccggaggtgcgctccttcctcgtgtcgaacgcctgctactggctcgaacgcttccatgtggacggcattcgggtggacgcagtcgcgtcgatgctctatctcgattataaccggcaggtgtacaagccgaaccgcttcggcggcaaggaaaatctggaggctattgagttcctgcgggagctgaacaacgcggccttccgggtcaaccctgccgtcatgatgatcgccgaggaatcgacggccttcccgctggtcacgaagcccgactacgtgggcggcctcggcttcctgttcaagtggaacatgggctggatgaacgatatgctgcggtatatgtcgctggacccgctgtaccgcaagggcgaccacaacgcgctgacgttctcgatgacctatgcgttctccgagaactttgtcctgccgctgagccatgatgaggtcgtccacggcaaatgctcgctgatcgggaagatgccgggcaactacgacgataaattcgcaaatctgcgcgtattttatgcgtatcagatggcgcatcccggaaaaaagctcaactttatgggcaacgagctggcgcagttcatcgaatggaactacacacaggggcttgactgggtgctgcttgactatgaccggcaccgtcagatgcaggcgtttgtccgggagctgaatcatttctatctggagcatccgcagctgtgggaaaacgacagcgactgggacggcttccagtggatcgactgcgacgaccgcgaccgcagcatcgtcaccttccgccgcatcagccgcagcggcaaggagctggtcgtgatctgcaatttctgcccggtggtgcgggagcgttaccgggtcggcctgccgaaggcaggctggtatgtgccggtactcaacaccgacgaggcgcgcttcggcggctacggctttatggcccggcctcagaaagcggaaaaggagccgtatcagaagctcccgtattcggcggaattctatctgccgccgatgagcgttacctattaccgcttccagcgcgcaaagccggaagcggcggaatga

SEQ ID NO: 1089 - DNA, 894 bp, Unknown
  Unknown gut bacteria
atgaaggtaggatttgtaggactcggcattatgggcaagcccatgtgcaagaacattctcaaggcgggctataccgtcaccgcgtacaacccctctccggcgtctcttgacgaggtcgtcgcctgcggcgccatccgtgcggcaagcagcgcggaggtcgcggcaaacagcgacgtggtcattaccatggtcccgaactcgcccaacgtccgtgacgccgttctcggcaaaaacggcattctggagggtgcgaaggaaggcctggatatcattgacatgagctccatcgcaccgctggaatccaaggccatcgccgccgagtgcctcaagcacggcgtgcatatgatggacgcaccggtctccggcggtgagccgaaggcggtcgatggaacgctgtcgatcatgtgcggcggcccgaaggcgctgttcgacaagtaccatgagctgctgatgacgatgggcgcctccgccgttcactgcggtgaggtcaacggcgccggcaacaccgtgaagctggcaaaccagatcattgtcgcctgcaacatcgccgcctgcgcagaggcgtattccctctccacgatggccggtgtagacccggagaaggtctttgaggccattcgcggcggtctggccggctcgacggtcatgaacgcaaaggttcccatgatgatggagggcaatttcaagcccggcttccgcatcgatctgcatatcaaggatctgaacaacgcgctcgacaccggccacggcctcggcacgccgatgatcctgacctcgcaggtgcaggagatgatgcagtggctgcacaacaacggctgcggcagcgacgatcacagcgcgatcctgaagtattacgagcggatcaccggcacggaggtccgcaaggagcactga

SEQ ID NO: 1090 - DNA, 1758 bp, Unknown
  Unknown gut bacteria
atggaattactgcttgacctgatctcccgtcaggtctccgatgcctttgccgaggctggctacgacgcctcctatggaaaggtcacgctctccaatcgccccgacctatgcgaataccagtgcaacggcgccatgcccgccgcaaaggcctatcacaaggcccccatccagatcgcggaggaggtcgccgcgaagctgaacggcaacgcgctgttttctcaggcggaggccgtaaagcccggcttcctgaatctgcgcgtttcggaggaatatctgaccggctatcttgcacagatggcgcaggacgcgcatttcggcgtgaccgccgagcttgcgccgcgcaccgttgtgctcgactatggcggagccaacgtcgcaaagccgctccatgtcggccatctccgcagcgccatcatcggcgagtccatcaaacgcatttaccgtttcttcggcgataccgtcatcggcgacgtgcatctcggcgactggggccttcagatgggccttgtcatcgagggccttcgtgagcgccagccggagcttccctattttgacgagagctacaccggcgaatatcccgccgaagcgccgtttacgatctccgacctcgaggaaatctaccccgccgccagcgcgcgcagcaagaccgacgaggaatttgcgcaccgtgcccatgaggccacgcgcaagctccaggagaaggttcccggctattacgcgctctggcagcacattatccgcgtttccgtcgccgatctccgcaaaaactacggcgacctcaacgtgacgttcgacgtctggcttggtgaaagcgacgcgcagccgtatattccgcagatgctgaagatcgtcgaggacaagcatctggctgtcgagtccgaaggtgcgctggtcgtgccggtgcaggaggaaagcgactccaaggagcttccgccctgcattctcgtcaagtcggacggcgcaacgctctacgccacgaccgatcttgccaccatcgtgcagcgcgagcaggactaccaccccgacaagatcctctatctgacggacaagcgccagagcctgcactttgagcaggttttccgcgtcgcccgcaaggcggagctggttccgcccacaacggagcttcagcacatcggcttcggcacgatgaacggcaaggacggcaagcccttcaagacccgcgccggcggcgtgatgcgtctggagcagctcatccgcgagatcaccgactttgtcatgcaaaagatcaccaccaaccagaccgtctccgacgaagagcttccagctacggcacgtcagatcgcgctggccgcgctcaaatacggcgacctttccaacctcgcgaccaaggattatgtgttcgatctggatcgcttctcctccttcgagggaaacaccggcccgtatctgctgtatacgatcgtccgcatcaagtccattctctccaagtatgacggaaacgtctcggaggcaaagcttctcccgccggagagcgcagagcagaaggagcttatgctgatcctgtcacgtcttgccgattcgctccgcgcagcctgccgcgactccgcgccgaatgtgatctgcgcctatgtctacgagctggccgtcgccgcgaacaagttctatcacgacgtgcgcatcatcacggagccggacgaggcaaagaaggcaagctatgtcgcgctgatcgacctcacacgccgcgtgatggagacctgcatcgacctgctcggcttctccgcgccggataaaatgtaa

SEQ ID NO: 1091 - DNA, 2196 bp, Unknown
  Unknown gut bacteria
atgattaaatctcatgaaaaggaggggacgcatttgggtctccctgcgaagctggtacgttcccaactgaatttcttcaagccctttgtcgccaactgctctctggaggtcacgcgcaagggtcaggacaagctcggtgagctgatggaagccatccaccggcgcgacgtctatgtccgcaaccatgacttcggcctgttctccggcgcgtggctcataccaaaggatgagcggcggcagggcgttgttctgtatctgcacggcggcggctacacctgcggcaatctcgactatgcgaagggcttcgccgcgacgctggccgacgaatgcggcgtgcgcgtattctgcgcggcctaccgtctcgcgccggaaaaccgctatcccgccgcactggatgacgccgtggaaagctaccgttatcttctgaaaaagggctacccggcccggcagatcctgctctgcggtgaaagcgcgggcggcggtctgatctatgcgctgtgtctgaggctgcgggaactgaagctgccgcttccctgcgggctgatcggcatttcgccgtggacggatctgaccggctccggcgaatcctacgtcaaaaaccgcgacatcgacccgtccatgacgccggagcttctgaaattctatgccgaatgctatacggacgatcccacggacccgttctgctcaccgctcttcggtgatctgaaggggctgccgccgtcgctgctgttcgtcggcggcgacgaggtcatgctggacgatacgcggatgctgcacgaaaagctgctgaaaagcggctgtcagagcaagcttatcatcgcgcccgagcgctggcacgcctatgtgctctactacctgaacgaaaacatgtccgattttgagacgatcggcgatttcatgacgaaggtgctctctccggcgaagaagctccgctggatgcggctggacaacgcggcgaagatctaccccgccgccaagcgccgcggctggacgaactatttccgcctctccgccacgctgacggagaatgtggacgtgcccgtcctgcgcacggcgctggatgtgacggtgcgccgcttcccgtccatcgccgtccggctgcgccggggcgcgttctggtattaccttgagcagatcccgaaggcgccgcctatcgaggaggacaaaagctatccgctcgtccacgtccccttcgacgatatccgcaaatgtgccttccgggtgctcacctatcatgaccgtatcgccgtggaatttttccacgccgtaacggacggcaccggcggcctgatcttcctcaagacgctcgtcgccgaatacctgtgccagaaatacggcgcacagatccccgccgaatgcggcgtgctcggacggctcgaggaacccagtgaagacgagctggaggacagcttcctgcgctatgccggcgacgtaaaggccagccggaaggaagcgaccgcgtggcatttgtgcggcacgccggagccggacggcttcctgaatcttacgaccatgatgctctccgtcgaacaggtcaaggcctgcgccaaggcgcacggcgtcagcgtgacggaatttctcgccgccgcgatgctggaggcaatctgccgccttcaggcggagcaggtaccgcgccgcagccgccgcaagcccgtcaaggtcctgcttccggtcaacctccggcggctgttcccaagcagaacgctgcggaacttcgcctcctatgtgacgccggagatcgaccctcgcatgggcgactataccttcgacgagatctgctccatcgtccatcaccggatgggtctggaaaacgaccgccgcatgatggccgcgaaaattgcgacaaacgtcgcaagcgaaagatctccgatcctgcggatcatgccgctgttcgtcaaaaacatcgccatgaaggccgtttttgatacggtcggcgagtgcaaatcctgcctgtgcatgtccaatctcggcgcggtgcagatgccggaggctatggccccctatgtccgccggatggacttcatcatcggcgtgcagtcacgcgcgccgcataactgcggcgtgctctcgtggggcgataccatgtatatcaacctcatccgcaacatccgtgagccggagctggagcttcacttcttccgtgtgctgcacggcctcggcctgcacgtcaaggtcgagagcaaccaacgtgattaa

SEQ ID NO: 1092 - DNA, 909 bp, Unknown
  Unknown gut bacteria
ggctccacggcgaatgacgccgccttcaacgcctacatcaccgacgccatcgattccggcaaccgcggcaaaacggaatccgtgcttgccatcctgccgctgatctccatgctggtgatcttcggcgcgttcgacggcatgacccagcgcggcgaatggcagaaattcttcgccatcttcggcggccttgtaacgtttgcgggcttcgttgggattttcctcgtggctgagccgaggctcacgccgaaaaaggaaccgtacctgaaaaatctggtctatggcctgcggccgtccgttgtgaaggagaacgcggcgctgtatctggccttcgcggccttctgcgtattctccgtcgccgtgcaggtctttttcccctatctcattatttatatccagaattatctgaagatcgacaactacgccgtcgtgctcggcgtcgtgctgctcactgcatccggtgtcagcgtcgcctccggcaaggccatcgaccgcgctggaaagctccgctttacgcttccggcggcgggcgtgatgctgctgggccttatcggcatgttcttcgcgcgcgggatgctggctgtcattctggcgggctgcgtcatgatgtcgggctacatgctcgtcacggcggcgctttccggcgtgatccgcgatctgacgccggagggcaaggccggtcattttcagggcatccgcatgatcttcggtgttctgctgcccatgatcgccggcccggccatcggcgcagccgtcatccgcaattccgacagcacccatgttgagcttggcgtgaccaagactgtcccgacgccgccgatcttcctcgcggcggcggtcgtgctgctgttcatcattccgctcgtgctgcttctgaaaaagcgcgcggctgcgcgggaggctcgcgtatga

SEQ ID NO: 1093 - DNA, 894 bp, Unknown
  Unknown gut bacteria
atgagtaaaaccttgaaaattttgatccccgtcgtctgcgccgtgctgctgatcatcgtactggcaggcagccttgtcgtgacgcaggcaaatgaatacaccatcatccgtcagttcggcgcggtcgtccgcatcatcgatcagccgggtctttcgctcaaaacgccgttcgtccagtccgccagcacgctccccaaaacggagatgctctacgatctggccgtcagcgacgtcattacctccgacaagaaatccatggtcgccgacagcttcgtgctctggcggatcgacgacccgctcaaattcatccagacgctgtccggcagcgtcgccacggcggagtcccgtctcgatcaggccgtctacaacagcctgaaaaccgtcatcagctccatgaagcaggaggcggtcatttccgggcgcgacggtgagcttgccagcgcgatcatggaaaatctccgcaagaccagcaattttgagagcttcggcatttacgtcctcgccattgagaccaagcagatcgacctgccggacgaaaacaagtccgcggtctatgagcgcatgatctctgagcgtgaaaacatcgccgcctcctacgcggcggagggtgccgcgcaggccaaggagatccgcaacgatgccgacaagtcggtcgagatcacgatctccgccgccaaggcgcaggcagaaaagctcaaggccgagggcgaggcggaatatatgcgtatcctgagcgctgcctatgacacgcaggagaaggccgacttctacgaattcgtccgtgcgctcgacatggcgcgcagctcactgaccggcaagaacaagacgctggtcgtcggctccgattcgcccatcgcgcagatctttgacggaagctggaggagcgcggaatga

SEQ ID NO: 1094 - DNA, 1137 bp, Unknown
  Unknown gut bacteria
atgaaaaaaagaaaaagcttctttgagtccagcgccgtgcagtcgctcatcgcttcgctgatctgcattctgctgggcctcctgatcggctacatcgttctgctgttcatcaatcccgagggcgcgggcaaggccattgtggacgtcatgaagaacttcctgacctacaacaaggcatcctcccgcatcaagtatttcggcaatacgctcgtcaagacggctccgctgctgatgtgcgcgctgagcatcctcttcgcgtacaaggtcggcctgttcaacatcggcgcggccggtcagtatgttgcgggcacctgcgcctgcatctatgccgcgctggcgtggcattggagctggctgccgtgtatgctgcttgcaatcgcggccggcagcgtgttcggcgcgatcgtgggcctgctcaaggcctattgcaacgtcaacgaggtcatctccggcattatgctcaactggatcggcctgtatgcgaccaacatggtcctgacgaacgtgaaggaggagacaagcccgtatacgctccagatgaaggatttcggcgagcaggcgctcctgccgtccgcgggcctcgataagcttctcggcggcaacaagtacatcaccattgcgatcccgatggcgatcctgatcgccgtcctgatctgggtcgtgctcgaaaagacgcgcttcggctatgagctgaaggcaacgggctacaacaagaacgccgcgaagtactgcggcatggccgaaaagtccaacatcatcctgacgctggtcatcgcgggcgcgctggccggtctcggcggatcgctgctgtaccagacaggctatgagcagtggcagtgtacgcatacctccgtcccggcgatgggcttcaacggcattgcggcgaccttcctcggcggcttgaatccgttcggaacgatcctcgcttcgttcttcatccagcacatcacggcgggcggtgcttacgtcgataagtcgatgtactgctcgcagatctccgacctgatctcctcgctcatcatttatctctgcgcgttcgtcctgttcctgaagaacgtcatgaacgccatggccgcaaggcacagagaaaagaaaatcatggcttccgacgcagcggagaaaggagggaaagcgtaa

SEQ ID NO: 1095 - DNA, 2436 bp, Unknown
  Unknown gut bacteria
atgaaacgattttttgcgatcctgatcgtactggccgcctgtctggcgctgttctgtgtgacagcgggcgcggaggacattccaaatgatgtgacatgggaagaaatcagcagcgaaagccagctgcgcgcgctggagtatggtacacactatgccaaggtcacgcagagctttgaggtcagcacccccagcaatatatttgtctatggcgatctcacgctggatctgaacggctgcacgatcaccttgaaggcgaaaaacaaggaggacttcaacggctatgccatgttcgtcgtcggcgacgacacgaacaaagcctccttcacgctgatggacagcagcccggcacagaccggtaagctgacctttgcgtatcttggcgacacctatcaggaagaagagaatggccagacggtcacgaaaacctgccgtgcgggtgccgtttctatgaaaaagggttctgcctttacgatgaaatccggcacgatcgaccgcttcggcggtacatacacgctctcggtcatcaacctcggcaggccgaacacgaccttcaacatggagggcggcgtcattcagaactgtaccacgccgaacgatctcggcggcattgccgtcggcataaccagcagcggcaataccttcaacatgaccggcggcgagatcaaaaactgtgaaaccggcggttctggcgtcatttacgcctcaaacgcgaccgtccacatcggcggcaacgccaaaatcacgaacaataagagcggcaatggcggcgcgttctatgtgaagaacgacaccagactcacgatcgacggcaatgccgtcatagaaggaaacgagagctccagaaacggcggcgcgatctatgcgtgcgtcggctcgtcggaaaaggataagccctcctccgtcgagatcggcggcagcgccaagatcagcggcaacaaagcctccggaacgtatagctatggcggcgcggtctatgcggagaacgcagccattacgatgacgggcggcacaattgagaacaacggcgcacaaaacggcggcaatgagcttttccttaccggcagcaccacttttaccatgcgcggcggcaagctccgccataccatcgatgcggcggcatggcggactgtttcgctccgttccagcgccaagctgagcatctcggacggcgagatcgagctgctcaacgagccgtatgccatggaacttcgcgataccgccaagctgaccgcgaccggcggcacggtgatcgcatccggtacgatggcagcgttcgacctcgtcagtaccgcagatgtcgatcccgaaaaggcggcgaccttcgccggcgcggacgccgaaacggcggaattcatcacctatccgaatctcaccacatatgcgggcagcaagtacataaagctcgttcccggctggaagctcacattggacagcaatgggcacggaacgaatccagatccgatcattgtcccgaaaaactacggcgcgaagctccccatgctggatgatacagacggctatgtctgtaccggctggtattacgacgcagcgtgcacacgggcttatgcaatggagaaaattaccgcggacaccacgctctacgcgggctgggtgcagagcggcagcttcgggctgagcttctccggtgtgagtcaggacacaaacgatgtatggtatttgacgtttgatcccgtgacctacggtacggaggagtggggcaagagtcagacaaagacttttacgatcacaaacaccggtgcggtcgcgctgaatgtagagctggaaaataagtccggcggcgggatcctcgccatatattttgagaaaaatgaaaacagtccgggtagtaaatatgtgaagtccgctgtactgaagccgggagcgtcgaagctcgtctatatggagtccgaaggtctcggtcacaaggtcggaagtttcgtttcggcttcgttcaagatcacagcgaaggacttcaccgatgagactcataagcaggagtatctggtcgggctaaaatggcagcgcaatccggcgattgccagtctggacacgccggagctgaaccccaacaccttcgactacggcacaacgctgggcgagatcgagctgcccgagggctggagctgggtggacagcaatgacgtccgtctccccgtcggaacgaccgaggcatccgcacgctatacactcagcgacaacgataagaaatactatgactggtcgaacgtcgagggctatgatgcagaagccgggactgtcacgcgcgatatcgcgctgaagatcgagaagggcgatgcggccgcgatgctcttctcctgcacactgcctaccgaccttatctatgacgggactccgaaggaggcaactgtgaccgcgttggaggcccctgcgggctatgcgccgtataccggcacgttcaccgtgctctataacggc

SEQ ID NO: 1096 - DNA, 1380 bp, Unknown
  Unknown gut bacteria
atgaatatggatggttcgaccatggacatgacccgcggcaagccgtggcggctcattactgcgtttgccattcccgttctgctcagtcaggtgttccagcagctttacaacaccgcggacgcactgatcgtcggccgttttcttggcgacgaggcgctggccgccgtcagctcctccggaacgctgatcttcctgatcatcagcttctttaccggcatgtcgatgggcgcgagcgtcaccatctcccgctattttggagccggagattatgcgcgcgtctcccgcgccatccatacgaacgtcctgctggccattctctgcggcattgtcctgaccgttttcggcgttgcgctgacgccgaccttccttcgctggatgggcaccgacccggacgtcctgccggaggccatctcctatttccgctactacttcttcggcattctcgccgtcgtgatgtacaacacctgcaagggcatcatgaacgcgctgggcgacagccgccgtccgctgtactacctgattctctcgtctctggtcaacatcgtgctcgacctgctgttcatcgccgtattccactggggcgtctggtcggcggccgccgccacgaccatctcgcaggcagtcagcatggtgctctgccttatccatctgacgaaaaaaggcacgatctatcaggtccgtctgcgcgacctgcggctcgaccgggaaatgctgggccagatcttccgctatggcctgccctccggcgtgcagaattccgtcatcggctttgcaaacgtcattgtccagtcgaacatcaactccttcggcaagcttgcaatggctgcctacggcgcctactccaagctggagggcttcgcattcctgcccgtcacgagcttcaccatggcgctgaccacctatgtcagccagaatctcggcgcgggcgaatacgaccgggccaagaaaggctcccgcttcggcatcatcacctccctgcttctcgcggagctgatcggcgttttgatgtatctgttcgccccgcagctgaccgccattttcaccgaaacgccggaggtcattgccctcggcgtcgagcaggcgcgcacgatctcgctgttctactgcctgctggccttctcgcacgccgtcgcatccgtatgccgcggcgcaggaaaggcgttcgtgcccatgacgatcatgctcgtgttctggtgcgttgtaagaattacttacatcacgactgtcatgcattttgtccatgacatccagtatatctactgggcgtatcccatcacctggtcgctcagctccgtcgtctatctcatctattatcatttctccgattgggtacatggctttgaaaagaagtcccaaaagctccagcccgaggaagcgtaa

SEQ ID NO: 1097 - DNA, 1512 bp, Unknown
  Unknown gut bacteria
atggaacagtacatcctcgagctgaagggcatcaccaagatctttccgggcgtcaaggcgctggatcgggtcagctttcagctcaaggcaggcgagatccacgcgctgatgggagagaacggcgccggaaaatcgacctttatcaaggtcatcaccggcgtacaccgcgcggaggagggcgagatgtatctcgacggcaggcgcgtcgatttccggtcgccgctggacgcgcagaacgccggtattgccgcgatctatcagcatgtcaccagctatccgcatctgaccgttgcggagaacatcttcatggggcatgagatccggaagcacggcatcatgcagtggaagaaaatgaacgaggccgccggggcgctcctgcgtcagctggacgccgacttccagcccaccgcccgcatgggcgcgctgtcggtcgcgcagcagcagatggtcgagatcgcaaaggcgctgtccaccaacgcgcgcatcatcattatggacgagccgacagcggcgctgacaaaaaacgaatccgaggagctttaccggatcaccgaaaagctccgtgacgacggaaaatccgtcatctttatctcgcaccggctggaggatatgtaccgtctggcctcccgcgttacggtgttccgcgacgcacagtacatcggcacctacaacgtcgccgagatccagccgccggagttgatcaaggccatggtcggccgcgaggtcagcgacctgttcccgaagccggaggtcaagcccggtgaggaggtgctccgcgtggagaacctttcccgcacaggcttcttccgcgacgtcagcttccgcgtccgcgccggtgagatcgtcggcctgaccggtctggtcggcgccggacgcaccgaggtcgtgcagaccattttcggcgtggagcattacgacgcgggcaaggtctttgtggacgggaaggaggtccatattcgcaggccgcaggacgcgatgcgcctcgggatcggcctgctgaccgaggaccggcagaatcagggcctgatcctggactggggcatcggccgcaacatcacgctgcccgagcttggcgcgaaattctccaaaaagggcggcatcaccagcgaaacgatcgaaaatcaggcggcgaaggagctggccgaggagatcgacgtcaaggctgtgacggtgttcgaccccgcaagctcgctttccggcggaaaccagcagaaggtcgtcgtggccaaggcgctggcaagcgacctgaagctcctgattatggacgagccgaccaagggcgtggacgtcggcgcaaaggccgcaatctatcagatcatgggtgagcttgcgcagaagggcatggccatcgtcatgatctcctcggaaatgccggagcttttgggcatgtccgaccgcatttacgtcatgtgcgacggccgtgtgaccggtgagctttcgcgcacggaggccacgcaggagaaaattctggagctttcgatgctcaagcacagcggcgcggcatcgggctga

SEQ ID NO: 1098 - DNA, 1095 bp, Unknown
  Unknown gut bacteria
atgatcatgactgattttatgacgaaaaacaaggaaaagctcgagcagtttgccgccatgtcgcaggctgccggcagccgcagcgactatgtgcagggcggcggcggcaacacctccgtcaagctggccgacggcctcatggccatcaaggcctccggctactgtctgtcggatatccgtccggacaaggcctacgccgtgctcgactatgaagcgctccgccgcttctactacggcaacgagcctgcgcagctggccgacgttgaaaagctcggctccgcctgcgcaaaggaaaacacgaagcttatcgagggcatggacgcactgcgcccctccgtcgaggccggcttccactccattctcaagacctttgtctgccacacccacagcgtctacgcaaatctcgccgcctgctcgaccgcctgctgcgagatcgcggaaaaggcgttcaacggcgcggactacacctggggctgggtcccctacaccgatcccggcgcaaatctgacctttgccatccgcgacgagcttcgccgcgtcgaggaaaagactggtaaggttccctccgtcattctcatgcagaatcacggcatcatcgttcatgacgacgatgcggagcgctgccttgccatccacgccgacgccaacgagcgtctggcgcagcagttcggcgttcacggagacagcttccccgcgatctccgtccgtcagaccggcgaggagctctacgaggctgacacgccctacctgcgcgaagccctcaagaattgccgctacgactacaagaccttcatcgaaacgccgctctaccccgaccagatggtattcctgattggcacgttcttcatggacaaggaaggcacacctgccgagggcgaatgctatgctgataccaagaccggtgcgctcgtcctgcatatgggcgaaaagaaggcgaaaaccatcaccgaaacgctgaccgcagtcatttttatcatggacaccatcacaaaaatggggtatactgtatctaccatgggcgaggcggccaagagcttcatcgccaactgggaaagcgaaaaataccgcaagagccttgcgggaaagaaaggttga

SEQ ID NO: 1099 - DNA, 1824 bp, Unknown
  Unknown gut bacteria
atgcccagagttgagctgcgggattaccgcaaggcgcgcacgcccttcggtagcctcctgcgcttgttccgctatttcaggcattgccgtaccattatgatctgcgcggtcgcgtccattctggtctatgtggcggcgacgatcgcggcctcctactgcatgaagccgctcgtgaatctgctcaagcagaccggccttgcgcccagcgaggtatacgcgaagtatctggcgctgctgctcgggcttgcgggcctgtacgcgctcagcgcggtgacgaattatctgctcaaccggctgatgctcgagtgcagcacggtcattatgcgcgcgctgcgcacggagctgttcgccaagatgcagagattgcccatcagctattttgacgcgaacaccaacggcagcctcatgagctatttcacaaacgacatcgaggcgacgaatgagcttttgcagcacgccattacgcagatgctgatctccgtgacctcgctgctcggtacgatcggcatgatgctggcgctgtcgatgaagctgttttcgctgatggtcgtgctggcggcaattgtcatcgtcgttgtgcgcggcattacgaagaaaagcagccgctgctaccgccagcagcagaaggacgcggccagcgtcaacggctttgtcgaggaaatgatcgccggccagcgcgacgtcaaggtttttacgcatgaaaagcaggtcatgcaggacttcgagccgatcaacgagagcttctatcagtcctccgccgaggccacgaccgtgacctccatcgtcgggccgatcctcaataatctgtcgcactttttctatgcgctgacctgcgccgtgggcgttttgtggcttacgggcgaaaatgcgggcggcgtgctcatcaccttcctcggctatatccgtacctttgccgagcgcgtcagtcagatctccgagcagttcaacgccatcatgctggcgcttgcgggcgcggagcgcattttcgacgtgctggatatgccgccggaggtggacgagggcgaagtcacactggagcagtccgggcgggactatttctgggtccggccggacggcgaacgtgttccgctgcgcggcgacgtgcgcttctacggcgtggacttcgcctatgtgccggaaaaaccggtgctgcgcgacctctcgctgtacgcaaagcccggccagaagatcgcctttgtcggctcgaccggcgcgggcaagaccacgatcacgaatctcatcaaccgcttttacgacattcagggcgggcagatcacctatgacggcatcgacgtgcgccacatccgcaaggacgacctccgccgttcgctcggtacggttttgcaggacacgcacctgtttaccggcacggtcatggagaacatccggtatggccgtttgggggccacagacgaggactgcatccgcgccgcgaagatcgccaacgcgcactacttcatttcgcatctgccgcagggctacgacaccatgctgacctccgacggcgcgaatctctcgcagggccagcgccagctgctggcgatcgcccgcgcggcggtctcggaggcaccggtattgattctggacgaggcgacctcgtccgtcgatacgcgcacggaaaagctcatcgagcgcggccttgacgggctgatgaaggggaggacggtctttgtgatcgcgcaccggctgtccacggtgcgcaacgcggacgcgatcctggtgctggaaaacggccgcgtcgtggagcgcggaaatcacaacgacctgcttgagctgcgcggacggtattatcagctgtatacgaacatgatcgagctggcataa

SEQ ID NO: 1100 - DNA, 2148 bp, Unknown
  Unknown gut bacteria
atggatggactggaatttctggatacgctgaaccccgcgcagcgcgaggctgcggaaacgacggagggctatatccgtgtgatcgcgggcgctggctccggcaagacgaaaacgctgaccgcacgctatctgtatctggtgcaggcgctcggcgtctcgaccgcgaatatcctctgcgtcacgtttacgaacaaggcggccgccgagatgaaaaagcgcatccgccgcgtcctgcccgatcaggacctggcgctcatcacgacgttccacggcttttgcgtggggcttttgaaggaggactgccacgtcctgcaatatccctccaccttcatcgttctggacgaggaggacaaggcggcgatgctgcgcggaatttttgaggagctgggcatcacttcgcgggatatgaccgtcaaggatgccatcgactacattagctggcgcaagggcgggcgcggctatgtgcgcacgctcatcgatatgaacccggagcgcctgcgggagctggaagcgtcggccaacacgctcaaggacaaggtcatgtaccggtatttctatgagcagcgtaaatgctacggcctcgactttgacgatatcgtctattttgcgctctactgcctgcggcaggacgcacaggtgcggaaaaagtggcagcagcggctggaatacgccatggtcgatgaatttcaggacattgacaaggatcagtacgagctggcggatattctggcgggataccacaagaatctgttcgtggtgggcgacccggatcagaccatttacacatggcgcggcgcggatgtgaaatttgtgctggaatttgaaagccgccatgaaaatgcgaaaacgatcctgctggacacgaattaccgctccacgccggagatcttagctgcctcgaacgcgctcatccgaaaaaatcgggagcgcctggacaagcagctccgcgccgtccggcccgaaagccgaaagccgctctatttccatgcaaagaccgcagccgacgaggcggcgtggatcgtgcggaagatccgctttctcgcagcgcaggggacagagctttcccggatcggcgtgctgtatcgcgcgcactatgtttcacgcgccgttgaagaggcactgatccgggagaaggtgccgtatgtgctctacagcggcgtggagttctacaagcgcaaggagatcaaggacattctctgctatctgcgcatgatctacagcggcgacgatatttccttcctgcgcacggtcaacgagccgcgccgcggcgtcggacggacgcgcatcgcgtttttgaaggaatatgccgccgcgcggaatacgagtctctatacggcgcttctggagaacgtggaatcgccgctgttccggcagagccgtgccaaggagtacgtgcgcctgatcgaaaggtaccgcgccatctatgcgcagatggatctgaccgatctggtcgcggaggtgctgaatcagagcggctatgaggcgatgctccgcctgtgcggcgaggaggatcggctcgacaatctggccgagctgaagcaggccgtctatgactatgcccgaaaggcgggggagcaggtctcgctgggcggctatctggagcatgcagcgctctttaccaacatggatacggcagagcgcgctgccgccgtcaagctcatgaccatccacagcgccaagggcctcgagtttccggtcgtatttgtctgcggcatgtccgaggggattttcccgggaaaacgcgccaacacgcgcgaaaagctagaggaggagcggcggctggcctacgtcgccttcacccgtgcgcaggatctgctttatctttcggacgcgtccggcaaaaattacgacggctccttccgctatccgtcgcggtttgtatttaatgcggaacgcgaaaacgtcgattacgctgtggagctggagccggagctgctggaggaggctatgtgccacatcggccgcacagagcgcgtcgccgcgcctgcggaggcgcccggcgtaaagcgcggcgcgcgtgtccggcatgcgatcttcggagaaggggaggtcatcgggcttgcgcaggagggacgcgcgtatatcattcagttcgattccgtcgccacgccgcgcacactttccgtgcaggcggtaaaaccggcataa

SEQ ID NO: 1101 - DNA, 1176 bp, Unknown
  Unknown gut bacteria
atgaaaaagatacttaagctgatctgcttcctgctgctgtgcggcatacttgccatcaccataaagctccggctcgattctcccgaaatgccgactgcgagcgccgcacctgtaatcgcgccgctcgacgcatcgcccacgccaaccccgtcgccgacaccggaacctactcctacaccgaccccgacgcccgagacctacacgctctccgtcatcggcgactgcacgctttggtcgaacgcgaactacgcccagcatcccgcggggtacgccggggtcataaacggggactactcctatccgttctcgaacaccatccagtattttgagaatgacgatttcaccattgcaaacttcgagtgcatcctctccgacaaaaaccttgcctacgactacacgcaggtctacttcccgttcatcgcgccgactgagtacgccaacatcataatcgacggcggcgttgactttgtcaccacagcgaacaaccacattatggactgctatgaagccggtgagaccagcacctatgacactctcgaagcctacggcatcccattcggcaaggaggggcaggcgcagctctacaccaccgacagcggccttgttatcggtatctactgctccggcaaggatctcgcaccgaacaagaccaaggctctaaacgctatccagcagcttattgacgacggcgcggagtatataatctgtgctttccactgggggcaggagctttactacgagccgaaccaggctcagatcgatcttgcccacgcctgcatcgacgcaggcgccgacctcatctacggcagccacacccactgcctccagcccattgaggaatacggcgacgggctgatcctctacagtatgggcaactggactttcggcggcagcaccatgccgagcgatccggacacggcgatcgttcaggtcgagctgacgcgcaatgacgacggcagcgtgtcccgcaccggtatggacgtcatcccctgctgcgtcagcagtaaaattgacgcggcgatggcaaacgagcagaactacaacgactataagccgactccttatgaggagggctctgagggctataaccgtgtgctcagtaagctcacgggtgagttcgaggccacctcgcagggcgctgactattccggctggctcgcaagccgcgcgggctga

SEQ ID NO: 1102 - DNA, 1125 bp, Unknown
  Unknown gut bacteria
atgaaatactgtaagagggcgggtgatagattgcgcagggtcaacaagcttatcataagcgggctgacgacaatgggtctgtattttctctcggcgagcgggatatacgcgagccttgaaaaccggctcggcttcgatgccgcgccgaaaagaatgaggaacgtcaccgtggtcgaggccgcggctccgacaacaactcctgcaccggtgcctgccgcggctccgcttgccgtgcatattgagcaggaacccgcggcggaggtcacaatggagacagcttcgccggtatcggagccgctgcagcccggcacggaaaccgtgctcataagcgacaacggggagacggttttggagacgacgatcagcggcgggctgagcataaagaacgagacgcagtattgggtggacgctgcgcagataattgagaacggcccggggctcacgctcccggacggcgagccgcagatactcgtgatccatacccattcgagcgaggcctatactcaggcagggctcgaccattatgaggcgagcgatacgaaccgcaccgaggacacgaactataacatcgtgcgcataggcgatgagctgaccgatatcctcaccggcgcggggctgaacgtgatccacgaccgcggcatatacgattacccgagctacaccggctcatataaccgttcgggcgcggccattgcacagtacctcgaaagctacccgagcatacgtatagtgctcgatatccaccgtgacgcgctgggctctgacggcgtggtgtacaagaccatggccgaggaacagggcgtgtgcgcaagccagataatgctcctcgtcggcacggatgagagcgggcttgaacaccccgactggcggcagaacctcgccctcgcgatgtatatgcagaacgctgtcactcaggcaaacccgacgctgatgcgcccggtcgacctcgtgcgccagcgctataaccagcacctgagcacaggctcgctcatcatcgaggtcggcagcaacggcaatacattgcaggaagccctcgctgcgatccggctcttcggcaatgccgtcgccccggcgctgtgcgagctggtcgccgcagaggaaccggcggaagaagcagtggaataa

SEQ ID NO: 1103 - DNA, 690 bp, Unknown
  Unknown gut bacteria
atggcgctctacacaataggagacacgcatctttcccttgccaaggacaagcccatggacatctttggcgaaaagtggaagaaccacgcgcaaaaattaaaggacggcttttcgatagtcggggaggacgacctcaccgtcatctgcggcgatatcagctggggcatgggtatcgaggagacaaaggaggacttcctttttatcgatgctctgccagggaaaaagataatccttaaaggcaatcacgactattggtggagcaccgctgcaaaggcgaagaagttttttgcgcagaacgggataaccaccatagacattctttataataacagctttgactatggcgagtacgcgatctgcggcacccgcggctggttttatgaggaggaaaagggcggcgagcatgacgcgaagatcatgcgccgagagataatgcgccttgaagcgtcgctcaaggcggccggggataagaagaagctcgtgttcctgcattatccgccgctgtttcagagctaccgctgcgaggagatccttgaactgctcaaaagctatgaggtccgcctgtgctgctacggccatatacacggcaaaggctgcgcatatgcattcaacggctggcgcgacgggacagagttcaggcttgtgtcggcagattttgtggattttacccccgtgaagctgccatattag

SEQ ID NO: 1104 - DNA, 876 bp, Unknown
  Unknown gut bacteria
atgaaagtaaggaaagcgataatcccggcagctggtctcgggacgagactgctgccgaacaccaagagcattcccaaggagatgctgccgctggtggacaagcccgtcctccagtacatcgtagaggaagcggtcgcggcgggcgttgaggagatcctcatcatcacgaaccgcggcaagtccccgatagaggactattttgactatgcccccgatcttgaggcgcgcctgctgtcagacggcaaggaaaaagaagcccgcacggtgcgcgaggtcgcggacatggcggatgtgtacttcctgcgccagaaggagacgaagggactgggtcacgcgatatggcgcgcgaagagctttgtcggcgatgagcccttcggcatactgctgggcgacgatataatgctcagcgagacgccggtgctcaagcagcttgttgacgctgccgaggcgaaccactgcagcgccatcgccatcagggagttccccggcgaggaaatttgcaaatactcctccgttaagctcgagaaaaaactgtccgaccgcgtataccgcataggcgacatgaatgagaagccgaccatggacgagcgcctttcgaactacgccatcatggggcgctacgttctgaccccggcgatcttcgatattctcgcgaacaccgcccccggccgcaacaacgagatccagctcaccgacggcatgaagcagctgtgccatgtcgagccgatgtgcgctgtggacttcgagggccggcgctacgacaccggcaacctcaagggctatctggaatcgataatcgactttgcgctgaagaacgaggaagccggcgaatggctgcgccagttcatcatcgacaaggcggaaaagctcaagtaa

SEQ ID NO: 1105 - DNA, 1062 bp, Unknown
  Unknown gut bacteria
atggataacactaaatcgatcgcgctgataaataaataccgcgggcagataatgggcttttccgcaatatgcatcgtctttttccatctctgggagtgccagctcagccccagttctccgctcaggctgctgtactggctggagcactgcatcagcgggatgggctatttcggagtggatatcttctttctgctgtcgggcatcgggctgagctacgccataggcaagtacggcctgaaagagttctggctgcgcaggttcaggaggctcgtcgtgcccgtgctggtcgtttcgctgatacagtgggccaaggagggctggactgtgctgtactatctgttcggtctgtcaggcatcggcttctttataaagcggcactacttcctgtggttcatctcggccatcaccgcgacatacctgctctttccgctctattggcgcttcttctcacgcagccgcgcgaagcctcgcttcacggcgctgttcgccgcggtgtggtatctgtgctctataccgctggccggagtgctcaagcccatcgtcttcctattcataaaccgggtgccgtcatttgtgctcggcgttcttctcggctggcagcagcagaacggcgggctgaagctgagccgccgcgcggtcaataccgtcgcggccgtttccgctgcagcggggcttatcctcggcgcgctgtgtaccttcggcgagaccgcgtttttccagccgccttacaacagcacctttcccggcgtgcttatcgctttcggcttcaccgttctgcttgcagagctgggcggactgcttgaccggggcggcagagcggtgcgcggcatcaacggattcttcggcttttacgggcgcatcagccttgagatatactgcgttcaggaatttttaggtccgatcgcagcggatgcggcgcgcggactcggctgcgggagcatggcggtaaaccttgtacagctcgccgcggtcacattatccgcatggctgctgcatatactgactgacagagtccttgccctgacgggcaggctgaaaccccgcgcaaaatgcgccggataa

SEQ ID NO: 1106 - DNA, 879 bp, Unknown
  Unknown gut bacteria
atggagaagagagaaaaaaagcacggcgaccgctttgacgcctattggcttcgtgacgaagcgccctcgatggcgcagttcatcgccttcctctacccgaaccgcgcggataacgaggcatatatccagcaggatatcgacctgcgcccgatagacgaatatctcgccaagaagaacgaggggcttgaaaaggataagtataattacttccacataatcatggcggcgcttgtcaagtgctttgtgctgcgcccgcgcatgaaccgcttcatctccggcaaccgcgtctatgagcgcgaccatatctccgtcgccttcgtcgtgaagaagcactttgccgactcctccgaagaaggccttgcctataagcactacggtggggacgataccatcgacaccctccacacctccattctggaagagatataccagtgccgccgcgatgacgttaaggacaactccagtgactttatggataagctcgtccgtctgccgcactggatgctcaagatagtcgtgaatatcctcttcttccttgaccaccgcggcaaggttccctttgaccttatcaaggctgacccgaactatgcctcgatattcctcacgaaccttggctccatcggccttcagagcggttaccaccatctgaacaactggggtacgaactccttcttctgcgtcatcggcaagaagcaccttgcccccgaatggcatgaggacggcagctataccgtgcgccctgtcattggtctcggcctcacggtcgatgagcgcatcggcgacgggtactattattccggcaccgtgcgcctgctcaagaagctcatggagaaccccgagcttctcgaacagcctttcagcactcccgtagagtattaa

SEQ ID NO: 1107 - DNA, 669 bp, Unknown
  Unknown gut bacteria
atgaagaaaagtacaatataccgggcaatattttatattgccgggctgctcattcttgcgctcggcatagttctcaacactaaatccggacttggcgtgtcgccgatcatttccatttcatacagcgtttccgttatatacggcctcaacttcggcaacgcgacctttggactctacgccgtctttgtcgcggtcgaaatcatgctgcaccttatccgcagaccggagggctccttgctgcttacgctgggaaaggacgttttgcagctgccgctgtgccttgtatttacaaggttcatgaacctgttttcggtgctgctgccggagcctgatggctttctgccgcagcttctggtgctcattgccggtatcatcctgaccgggataggtgcggcgatgtccctcaatatgcgcgtcatcccgaaccccggcgacggaatcgttcaggccattgccgactttgtccgcaagccggtcggcatcacgaagaactgctttgacctgttcgacgtctgcctgaccgctgtcatatgcctggccgccggccacaaggtgatcggcatcggcttaggcacggtgcttgcggtgctcggcgtggggcgcgtgatcgcgctgttcaaccacctgtttatgaagaaaatggatgcgcttgcaggtctggagcgctga

SEQ ID NO: 1108 - DNA, 1239 bp, Unknown
  Unknown gut bacteria
atgaagaaaatttataacagcaaggcgttctggatgatcgtgtcgctgctggcgtcccttgcaatatgggtgtatgtaaccagtgtcgagacggacgagtccaagaccacgtttaggggcgtcaaggtcgagcttgtgggcgaggatatccttagggattcaaagaaccttgtcgtgaccgatatggacacgagcaccgtgacggtcgaggtcgtaggaccgcggcgcattatcggctcgctcagctcggatcagctcgtcgcgcaggtcgacgtcagcaagctctcacgcgcggcgtacacctcgcagcagtacacgatagtttaccccgacggcacggatacgagcaagctttccgagagccgccggacgccagagacgataaacttcatggtctcggcgcagacctcgaagtccattcaggtgcgcggcagctttgacggctctcttgccgaaggctacacggctgagatgccggtgttcgagccgtcgacgatcacgataacaggctccgaggcgtatctgaaagacgtcgaatacgcatgggtgactttcggcaaggagaatgtcgacagcacctattctgtggagacaggcttcacgctgatggatgcgaacaacgagccgtgctccacgaccggcatcagcttttcgacggacgtcgtcactgcgacgctcccgctgctgacgctcaaggaagtgaacctcgatgtgaacatcatcgagggtgcgggcgcgacaaaggcgaatacgaagatcaccattgatcccgtgtccgtgacgcttgcgggagactcgtcactgctcgcgggcatgaacaagatcatccttgcgacgatagacctgacggacttcagctctacctttaccgagacctacacgataccgatagataacgagcttaagaacaccaccggcgtcacgaaggcgacggtcacggtcgagatagtcggccttgagacgaagactttcagggtcacgaacttctcctgcatcaatgccaccgagggctacgaggcggatataatcaccgagagcaaggagataacgctgcgcggcacgcccgaggcgctggcgcagataaaagctgagaacatccgcgcggtcgcagaccttacggattacaaggagtccacaggcacctatatgccgcaggtcagggtatatgttgacggatttacggacgtcggcgcgataggcgaaaacacgatatcgatagagatcaggaaggtaagctga

SEQ ID NO: 1109 - DNA, 1455 bp, Unknown
  Unknown gut bacteria
atgcctactacgtggaaccgctcctccgaggattttcataagatatactccgccaataccgacgccttctaccgcgtcggcggcattgccatggcaaaggagttagatgagtttatgacccgctgcgcgcttgggctgtggagccgcggcggcgggatcacccagcgccatgtcgacatggcgaaccagatatattcccgcaaccagccgcagccgaaatggatgctctggtcactgacaagctccgtgtgcgaaagcgaggtcttcctcccgccggtgttctattggaacctcgccgagaccgatgccaagcgcggcaccgaggcttcccgcacctttatccgcatgctcacaaatattctgctctacctcgccgcagtggacgacgacgtcagctacgacgaggccgcctacataaccgagtgtaccgacaagctcaccgcgatatgcgacacgagcggcgtgcgcaagagccgcgaggcgctcaatccccttgactatgtcacaagctccgagccgggctttcaggaaaagcatcgccttcaggagcagactgcgggcggcgaaaagtccaaagcgggcgacgctgaaaagcctgacgccgaggagaaaaagccggactttgacgagctcatggcgcagctcgactccctcgtcgggcttgacgatgtgaagaaggacatcaagaacctgatgaaccttgtcaaggtgcgcaggctgcgcaaagagaacgggctccccatcccgccgatgagcctgcacatggtgttcatgggcaaccccggcacgggcaagaccacggtcgcgcgcatcataagcgggctgtacgcggcgataggcgtgctggaaaaggggcagctcatcgaggtcgaccgctccgggctcgtcgcaggctacgtcgggcagaccgcgctcaagacgcaggaggtaattaaatccgcactcggcggtgtgctgtttattgatgaagcctactccctcgcttccggcggtgagaacgacttcggacgcgaggcgatagagacgatactcaaggcgatggaggatcaccgcgatgagcttatcgtcgtcgtcgcgggctatgacgggcctatggagaagttcatcaactccaaccccggtctccagtcgcgcttcaataaacacttctacttccccgactataacggtgagcagctcctgtacatcttcaagggtcaatgcaaaaagaacggctacgccctcacagaggaggccgaagccgaggcaaaggcgatgtttgaagagctgtacgagaaccgcggcgagaacttcggcaacggacgcgatgtgcgcaacgtgtttgaagacacggtcgtgcgccagtcaaaccgcgtcgccgcgctggacgcgccgacgaaggacgacctcatgcagttcctcccggaggatctcagggacgcggatgagacctgcgagacagacgctgaagaataa

SEQ ID NO: 1110 - DNA, 1437 bp, Unknown
  Unknown gut bacteria
gtgataaaaaagcttgcgcagagtctgcgggaatataaaaagcccacgatcctgacgctgatatttataacgggcgaagtgttttttgaagtgctgatcccgttcttcacggccgatctcgtgaacgcgataaaggccttttccgcagccgggcaggaggctgccgggctgcacgatgttgtgaagcagggtctgctgctcgtggcaatggcgctggcctcgctcggctgcggctccgtcgccgcggtcacctgcgcgaaggcctcctccggctacgcgaagaacctgcggcacgatatgtttgcgcgcatacagagcttctcatttgagaatatagaccgtttctcctcggcatcgcttgtaacgcgtatgaccacggatataagcaacgtccagatgaccttcatgatgctcatccgcatggcggtgcgctcgccgctgatgttcctgtttgcggtcatcatggcgtttatcatgggcggcaagcttgcgctgaccttcgtgatagtcatccctgtgctggtgttcggccttttccttatcgcgaagaaggccatgcccgcgttccgcgcggtgttcaagaagtatgaccggctcaatgagtccatcgaagagaatgtgcgcgcgatgcgcgtggtcaagggctttgcccgcgaggactatgagaaggataagttcggccatgcctcgcgcgatatctgcaaggacttcacatatgccgaacgtgtcgtcgcgctcaacaacccgctcatgcagctgtgtatatacttcaacatgatcttcatcctgaccgtcggttcgaagctcatcatcaccagcggcggcacgctcatcgacgtcggccagatatccgccatgctgacatacggcttccagatactcatgtcgcttatgatgctctcgttcgtctatgtcatgctgacgatgtccgcagagtccgcacgccgtatctgcgaggtgctggatgagactccgtccctgttctcaccggaggacgcggtcacggagataaaggacggctctgttgattttgagaacgtctctttcaaatattccgccaaggcacagaagttcgccctcgccgggataaacctgcatatcgactccggcatgaccgtcggcatccgcggcggcacaggctcgagcaagtcgacactggtgcagctcatcccgcgcctgtatgacacgactgagggcaccgtccgcgtcggcggcagggacgtgcgcgagtacgaccttgaagcgctgcgctcgtccgtggcggtcgtgctgcagaagaacctgctcttctccggaacaataaaggagaacctgcgctggggcaaccccgacgcgaccgacgaagagctcatcgaggcctgcaagcttgcacaggcggatgagtttgtccgctctttcccggatggttacgattcccacatcgagcagggcggcacg

SEQ ID NO: 1111 - DNA, 981 bp, Unknown
  Unknown gut bacteria
atggataacaggatcgtcgttgtcgcaggccccacggcctccggcaaaacacgccttggcatagagcttgcgcaggcgttcggcggagagatcgtttcggcggactccatgcagatataccgccgcatggatatcggcaccgccaaggcgacaaaagaggagcgcgccgctgccgtacaccatatgctcgatgtcgccgaccctgccgagagctggtctgtcgcgcgctatgtcgaggaagccacgcgctgctgcgatgatatcatcgcccgcggcaggctgccgatagtcgtcggcggcacggggctgtatatagactcgcttatctccgggctcgattttgccgataacacatccgacaacgccctgcgcgataagctgagcgcggaatatgacagcctcggcggggacgcgatgctcgcgcgccttgcgcagttcgaccccgaacgcgccgcgaagctccactcaggcgacaaacggcgtatcgtgcgcgcgatagagatatatctgctcaccggcactaccattaccgagcatgaccgcatcaccgccgcgcgccccaagcgctatgacgcggcgcggatagtcctcaattacgctgaccgcgtcgacctctatgcgcgcatcgacgcgcgtgtcgacgcgatggaacaggcggggcttgtcaatgaggtgaagtcgcttcttgcctccgggctctccccggactgtaccgccatgcaggccataggctataaggagatcgccgctttcctcgaagggaaaacgaccgagcgcgaggcctttgacctcatcaagcagagcagccgccgctacgccaagcgccagctcacgtggttcggaaggtggcaggatgcgctgcgcatcgtctgggataaagtcccggatatggaaaaagcccgccacgcttcgacagagtttttacactcccgcgtgtatcataatgccgggcacccggatgacggatgcgacacattatga

SEQ ID NO: 1112 - DNA, 1104 bp, Unknown
  Unknown gut bacteria
atgcgcgtgtatgaacgtccggcgcagatcctgagaccggatattgaccccgcgcgccgcgtcctcgtcgtgtcggatatccacgctaacatcccgtatttcgatggggtgctctcccgcgcgggcttttgcgatgacgatatcctcatcatcgacggagactttcttgaaaagggtacgcagagccttgagatgctgcaccgcgtcatggagctttcctcaagggagaatgtctacaccgtcatgggcaactgtgatgagtggtcggcgatattcatcgagacacaaagccgctgggcggacagcatcatgaagtatgtcaactggcgcaaaagcggcctgctgtgggacatgatccacgagcttggggacaaccccgcgcagatacaggattttcaggagtataaattcaagctcggcaaggctttcccggacgagtttacctttctcgattctctcccgcatgccatcgagagcgggaactatatcttcgcgcatgccgccgtctaccccggaaagccgctcgaagcgcacaccgagggcaagctgctgcgctgcgacaggttcatggatctcggcttcagcttcgataagtggggcgtcgtcggacactatcccgtcgtgctctacggcgaggacaaggtctgcgcaaacccgataatcgaccggcagcgccatatcgccagcatcgacggcgcgtgtgtgctcaaggacgacgggcagctcaactgccttatcatctccgggataaacggcgacgatatttcctttacatcctatgaccggttccccgtccgcacggtgctgaaggctcaggcggagggcggacgctcatattacatccgctggggcgacagccgtgtgcaggtgcttgagcgcggcgcggagttctcacactgccgccatgtccgtaccggctatgaaatggatatcctcacaaagtatctcttcgagccggaggagtttaccgactgcaacgactgcaccgattatgtcctgcctctgcacgcgggggataaggtgagcgttgtggaggagacctcgcgcggatacttcgtcaagcacaacggcgtttccggctggtacttcggcgcgcttgagtag

SEQ ID NO: 1113 - DNA, 966 bp, Unknown
  Unknown gut bacteria
atgaacacgatgaacattatcgacctgcactgcgatacgctgataaagctgcacgagcagggctgcgggctggaggatgtgcaggggcacatcgaccttgacgcgctgcgccgcggcggcgcactggtgcagtgcttcgcggtatacacgccgacgcacgagcaggtacacaagcataagataactaccgggccgtgggagtacttcaacaccgcggccgatatctttgaccgggaaatggaaaagcacaaggagcttatccgcccggtgcgctgcgcagcggacataaaggagaacatggacgcaggcaggatatccgcgatgctcacgttggaggacggcgtgtgcatagacggcagaatggagcgcgtgcagcagctctacgaccgcggcgtgcgcatgatagcgctgacgtggaactatgaaaactccataggcttccccaattccgccgatcccgagcttcacgcgcttgggctcaagcccttcggcttcgaggtcgtggagcgcatgggcgagcttgggatgatagtcgacgtatcgcacctgtcggagggcgggttttacgacgtggccgaagccgtaaaggggccgttcgccgcgtcgcactcctgcgcccgcgcactgtgcgggcacagccgcaacctcaccgaccggcagctgcgtgtccttggcgaccatggcggcgtgtgcggggtgaacttctattcgagctttctcaccgggacagacttcacggcgatagacgatatcctgcggcacatggaatacatcgcggacaaggcagggatcgaagccgtcgcgctcggttcggactttgacgggatagactgcgggcttgagttcggcggttacgccggtatgccgcggctcgtcgaggcaatagcagcgcgcttcggcagcggcaatgccgacaggatatgctatgaaaacgcgctgcgcgtgatgagggatgtgatcggatga

SEQ ID NO: 1114 - DNA, 1443 bp, Unknown
  Unknown gut bacteria
atgaactacaagatggtgggccgtgtgctgggtatggtgctgctgtgcctgaccgggctgatgctggtgccgctgctggccggtataatatacggggagaacgtgcgcccgttcgtgctgtgcatcgcgctgagcctcgcgctcgggctggggctggcctccataaagcccgattcgaccgacctgttcgcgcgcgacggcttccttgcggtcggccttgcgtggatgctcatgtcgctcctcggcgcgctgccctatatcctgagcggggatataccggattttgtcgacgctctgtttgagtccgtctccggcttctcgacgaccggcgcaacggtgctgaccgatgttgaaacgctcagccgcagctgcatgctgtggaggctcctgtcccagtggataggcggcatgggcgtgctggtgttcatgcttgcggtaatgccgatgagcggtgagcactcgatgcacatcgtgcgtgcggagttcccggggccgacggtcggcaagcttgtcccgcgcgtgcgcgagacggcgaagatactctaccttatctacgtcggcatgacgcttctggagttcgtgctgctgacctgcggaggcatgagcatctatgaagcgctcggccacgcctttgcttctgccggtaccggcggcttctcgacgcgcaatgcgagcctcggcgagttcaacagcctgtatatcgaggtcgtcgccacagtgttcgagctgctcttcagcgtgaacttttatatttattactgcatcctcaccggcagagccaagtctgcgctcaaaaatgaggagctgcactgctttataggcatcgtcctcttcgcggtcgtgtcgatcgcgataaacctctattcgcgcggctattacggcagcatcgcaactgcgctgcatcaggctttcttcaacgtctccatgagcataagcacctcgagctttgcgaccgtcgactatactctctggccgcagtactccaagtggatgctgctcatgctgatgctgataggcggctgcgccggcagcacctgcggcggcctcaagctctcgcgggcaatgatccttgtgaaaacggcgctctccgacctgcggcgtatggcgcatccgcgcagcgtgaaccccgtgcagatagacggcaagcgcgtcgcgcccgagacggtcaaggccgtgcacacctattttgtcctgtacatattcatcatcctcagctgcacgctgcttatctcgctcgacggctttgacaccgcgacgaacttttccgcgtcgcttgcctgcctttcaaatatcggccccggcctcggcgtcaacggcccatacgggaactacagtatgttttccgacctgtcaaagctcctgctgtccttcgtgatgctgctgggcagacttgagctctatccgatactcgttatgctcatgccctctacgtggagaagataa

SEQ ID NO: 1115 - DNA, 648 bp, Unknown
  Unknown gut bacteria
atgaagaaaactctatacagtctgatgctcaacgacgaggtcgtccgcgaggtcgatatgatggcgcacagaatgggcacgaaccgctcggcgctgataaaccagatacttgcagaatacgtgaactacaccactcctgagcgcaggataaacgatgtgctctccgcgatcgagacactgatgactccgtcgcgcgagctggtgccgttcttctcgccgaacagctactccatgtcgctgaaaagctcgctggagtacaagtaccgcccgacggtgaagtacgaggtggagctgtaccgcgggcatgatgagtccatcggccagctttcggtgatattccgtacgcagtcggcggcgctcatctccgcgatgacatctttcttccgtctgtggaagcagatcgaggatgcgcacctcaagccgctcaccggcgcaagtatcgactacgcgctctatgacggcaaattcgtccgctcgatcgcagcgcccgataaggactgcacgaccgatgagctcgcctcggcgctgtcggaatacatcaagctcttcgacaggctgatgaaagcctaccttgccgggaagctcgacgcgcatgacgtcgaagcctcctactattcctatctcataaacacatcaatccacatttga

SEQ ID NO: 1116 - DNA, 681 bp, Unknown
  Unknown gut bacteria
atgcatatacgccgacggcatcgctccgctcctaaatacacctacacgcaggggagcgagccgacttcagcaaaaaaagcgcttaatctgacgctgctgctcacgctggcggcgttgtgtctgttcctgtcgggggcggtcatgttcctgaaaaccctgtcaagtcaaatcgccgtatccgacgcaagcgatatcgtgatcgacaaggtcaacagcgccatagccgatatattggcaagcggggactatgacggggattatttcgtatcctttgagaaaaactcgtccggtgagataactgccatcagcagcaacatggcgcgcataaacgcgctctccgcacagatactcgaccgtgtggtcggcgcggcgacggatacacatacgctcacggtaaagatcccggcagggaacctgacagggataagcctcctgatggggcgcggcccagcggtcccggtgcagatcatcgtgctgacgtcctcacgtgtggagttcagcaacagcattgtcactgcggggataaaccagacgaagcaccagataaatctcaacgttattgtcgatatagatatcctcatcccgtggggcaccgagagcgcgcaggtcgtgactgaggtgctcatcgcagacacggtagtcgtaggcaaagtaccggatacatacctaaatatgcagtag

SEQ ID NO: 1117 - DNA, 1359 bp, Unknown
  Unknown gut bacteria
atgctgctgctgatcctgctcctgctgctgaatgtctatccgctcatctccgcgcgcgacgccgtgtttcaggagaaggaaaaggccatggagagccaggccgcaacgctcgcttccgctcttgcgagccttgacaatcccgatcaggagagcattgccgaggtgctgcgctttctcgacattcagggctatgacaggataatagttgccgggaagaccggggatataatatacgatacgcagacgcacgcaagaccccagaccgccgcgggcgatctgctctccgctctcggcagcaagacggtgtttcgctcttcacaggaggatgaagctttctccagcagctacgccatccccatcagcagtcagagcaccatcacgggggcggtgtacctgcatgagacggacgccgagcgcggccgcatcataaacgacctccaggtgcagatacgcaccgtctccctcataatcgccctcgcggcgctcgtgatggccgtggtatattcctcggtcgtcctccagagactgaacgaccttgccaattccatgcgcatcgttgccggcggggactataagcaccggctcgcgatatccggcacggacgagctcagtgagctcgggcgcgagttcaacacgcttaccgaacgtctttacgacaccgagcaccagcgccgccgctttgtctccgacgcttcgcatgagctcaagacgccgcttgcatcgatacgtctgctctcggacagcatcgtgcagaacgagaacatggacgccgagaccgtgcgcgagttcgtcaccgacatcggcaacgaggccgaacgcctccagcgcacgaccgagaagctgcttgacctctcgcgtctcgacgacgatatccaggtcgtcccggagccggtcgatgtaaagcaggtggcagtcgacgcgatggtgctgctgcgcccgctggcaaaggagcatgacgtgaagctgcgctgcgagcttgaggacggctgcgtcgtcatggcgacggtggacgatatgttccacatcatctttaacctcgtcgaaaacgcgataaaatataacgtcccgaacggcagcgtcacgctgatcctgaagggcacggtcgacagcgtccagttcaccgttgcggataccggcatcggcatccctgaggaggagacgtacaacatcttctcccgcttctaccgggtcgataaggcacgctcgcgcgaagccggcggcagcgggctcgggctgagcatcgtgcatgacgctgtcaaggcgcacggcggctctattgccgtcgggcagaataagccgcagggctcacgcttcatcgtgactttcccgcggcccacatcggaggagacaggcatatga

SEQ ID NO: 1118 - DNA, 933 bp, Unknown
  Unknown gut bacteria
atggcgttccagcttgaagatatcaacttcaaaaccgtcgccgatccgaaaggcttcattgaggagggcgatcaggcctataaggacagagtcgccaaggccgcggataagataatcagcaaccgcgataagagtcccattgttctgctctccgggccgtccggttcaagcaagaccacgacctcgatgaagatcgccgaggaactcaaccgccgcggcatcggcacgcactacatcggcatggacgattatttcaagaccatcgacgataacagcccccgcacacccgagggcgatctggatctcgagtccccgctctgccttgacatggagcttatgaaccggcactttgacatgctccccaagggtgagcgcatctacgtgccgaagtacgaatttgcccggcgcatgaggagcctcaccccctccaagtccatccagctcaagaaggacgaggttgtcatcgtcgagggcatccatgctctgaacgacatgataacgaacgcgcaccccgaagctttcaagctctatatctctgcgcgcagcgatgtgctcttcggcgaccgcgtagtcttcaagcgcacatggttccgtcttgtgcggcgcatggtcagagactataacttccgcggctcctccgctgccgagacgatgagcatgtgggcaaacgtccgccgcggcgagaagctgtacatctccccgtacaagaacaaggccgactatcagttcgacaccgcgcttccctacgagctgcccgtgttcaacgagacggcaactcagctgttccagtccgtgcccgagggcatcgagcgctttgacgagctgcgccaggtgctgcccgcgcttcagctcttcggggtcattgaccatagcctgattcccaaagaagccatgatacgcgagttcatcggcggcggcatatacgaatactga

SEQ ID NO: 1119 - DNA, 1455 bp, Unknown
  Unknown gut bacteria
atgaaagagaacgatacgcgggataggacccgccggagacttaaagtaatactgctggtgctgctggcttatattgttgccatcgcggcgctcgctgtgataatagacgcgcggcatgtgcgcttttacgtgacggggtcggagaacatgacgcaggagtacggcgaggtgtacgaggatccgggcgtgtatgccgtgacctacggcaagcttttcggcgaggggacgcagcgcctgcacgtcgcagttgagggcagtgtagatactacgaagctcggcagctgcacgctgaaatactggacgcgctggatgttcacggactatgtgacagagcggaacgtcactgttatagacacgacgcccccggtcatagagctcaagcacatagagggctatgaggcgagctggatgaacggctacgaagaggagggctacaccgcatttgacagctgcgacggcgacctcacctcaaaggtcgtgcgcacagaggataaggacaaggtgacctataccgttacggattcgtccggaaacaccgcgacagccgtgcgcgagatcgagtacgcaaagaccgagccgcacatcatcctgaacggcgacgagaacatggtgttcaccgcgcgcacggatttcaccgacccaggctatacggcgtcggatggactggggagagacctgacttcgctcgttcaggtggacagcgacgtcgtgccatatatcgcgggggactatcagatagtctacagcctcacaagcgagacgggcgagtccgtcagcgtgacgcgcagcgtcacggtcatcccggcgaacaggccggacgttgtgaaccccaacggcaagacaatctacctcacatttgacgacgggccggggccttatacctcaaagcttctggacgtgctggctgcgtataacgtgaaggcgacattcttcgtcacggcggcgaatccaaagtactatgacatgatcgcccgcgaagtgaacgaggggcactccgtcggcgtacacagctattctcacaactataagaccatctattccagcgaggaagccttcttcaatgacttcaacgccatggaggagatcatatacgagcagaccggcagctacacgcagctgtgccgctttcccggcggcagctccaacacggtcagcaatttcaatccgggtataatgtcccgcctgacggaagcgcttactgacatgggttacaagtatttcgactggaacgtgtcctcgggtgacgcgggagagacgacgaagacggatgtcgttatctccaacatcgagtccggctgccgcggcatgaaagcatctgttgttctccagcacgatataaaggacttcagcgtgaacgcagtggagtcggtaataatctggggattgcagaatggctatacattccgcgccctcgatatgagcagccccgacgcgcaccatggggtgaacaattaa

SEQ ID NO: 1120 - DNA, 1611 bp, Unknown
  Unknown gut bacteria
atggaattcaagactgcaaaccgtgaatgggtcaaaaacgcggctatcatctttctggccgtgctgctcgtgctgacctttttctcgaacactataatgaaccgctcgctggtggaggtcgccacagccagagtgaccgacggcaatatcgtcgccaaggtgcgcggcaccggtaccgtcacggccagcggcaagcaccaggtcaaggcgacgaagacccgcaccgtccgctccgttatggtcaaagcggggcaggaggttcagaccggcgacgtactctttatcctcggcgagggtgacggcgatgagcttgagcaggccgaacaggccctgcgcgagctccgcgtgagctaccagaaagctgcgctctccctgccgacctttgattacactacgcagaaccgcgccgtgtccgatgcggaaaaagcgctcaatgccgcagatgaaaaatgcgtcgaagcacagaagctgtacgacgatatgtttgaaaagtacggcaataaggagatagccgcccagcttgcggaggccctgacgcagctgcagaacgctgaggataccatgtatcaggcgcaggatgcgtataacgacaggtaccagaaagcctacaaagcagtggtcgatgcacagacagcctatgacagcgacccgagcgaagccaacgctgccgcgcttgaaaaagcccagcagaccctctccggaatgtccgaagaatccgacccgctgcttgttgcggcaaagaagcagtatgacgccgcaaaggcaaagtatgacaccatcgcaagacagcaggaggatatcgactacaagcttatcccttatagagacgctcttgacgctgcatacgaagaatatgataaggcttacaacacatactccgacgctctgagcagccttgaatatactcaggcgcagaacgaaaaaactcttgccgctgcccagatcgaccttgcaagtctcgccgaccagatatcccaccagcaggagaagataaagtccctcgccggtgaggacgataacactgtcaccgcaaacgtcagcggcaagatcgacaccatcgactgcaccgccggtgataccgtcaccaaggattcgctcatgtgtaccatcgaggtccccgacatgggtcacaccgtgagcttttccgtcacgaacgatcaggcgcagcgactgcgcaccggcgataccgccaccgtcagcaactactattggggcaataccatcaccgcgacccttaccaatatccgcaccgacccaaagaacccgcagaccaataagctcctcacctttgaccttgagggcgacgtcaccaccggctccgagcttaccctctccgtcggccagaagagcgcgaattacgacaccatcgtgccgaactccgccatccgcaccgacaataacggctcgtttgtccttgccatcagccagaagagctcgcccctcggcaaccgctatatcgcaaagcgcgtcagcatcgaggtgcttgcctccgatgacaataactctgccgtcgtcgccgacctcggcaatggggactatgtcatcaccaccggctccggccccatcaagaacggcgatcaggtgagaatggccgacagctccgagggctga

SEQ ID NO: 1121 - DNA, 576 bp, Unknown
  Unknown gut bacteria
gtggcattttcagaagagcaaaatgaatcgatccggaaagagctgattcgcgaggcgcggcactgcggagtcaccatcggcatgcgcaagacctcggtcgagcagcttgccgaggcggtcggcatatccaagggctcgttctataaattttttgactccaaggagctgctgttttttgccgcgctggaggatatacataccgagggctacgccgtggcgcagcaggcgctgcgggataacgccgcactgccccctgctgagcgcgcggaggcggcgatacttggaatgtgccggtggctgtccgagacgcgggcgcttgtctttatcgagaacgatgcggagtttctgctgcgcaggctgccgcaggaggtcaagtccgcacattaccacgacgatgaggtacacatccgcgcgcttttagagggcagcggtttgcagcccaagggcggcatggccctggccgcggcgacggtgcgcgggcttattctgacagtctcgcatcaggagcagataggggagctttatccaaaggttttggagacacttgtgcgcggagcgtgcaaagagcttttttaa

SEQ ID NO: 1122 - DNA, 1098 bp, Unknown
  Unknown gut bacteria
atgtaccttgagctcagctgcgccggggtcgatgtgaatgtccacccggcaaagaccgaggtcaagttctctcaggaaaggcgcgtgttcgaggtcgtgtaccatgccgctctcgccgccctgacgggggaggacaggataaaagcccccgccgcgctgcctgcggagaagaagtctccgtcccccgcggcgatacccgcgcctgtgcgcgcggccttcacgccgccgcagacgcagaccaccgcacccgcgccgaagccggatttctaccgcagcatgacttccgagcagttccgtgcgcagggctataccgtgaaggacacgccgaaaccggctcccaagcctgttgaaactgcccccgcggcatcactcggcgcgtatgagataccctaccagaccaggctcgatatgccgaatggccgcccggccaccgaaattcgaccggaaacgactgaaattcctaaagaaactgcccacagcatggtcaaagctgtggaaaaacctgttcaaaatgttgaaagtcagccgatccccgaccacaagatagtgggggaggctctcaagacctatatcatcgtcgaagtcggcacggagcttgtgctcatagacaagcacgccgcgcacgagcggatgaactttgaccgcctgaaaaagaacggcgcgcgcaatatgtcgcagacgctgcttgagagtgtaacgctccacctcacggacgaggactgccacgtccttgaggaaaacggggaactgctctcggagttcggctttgagatagagcccttcggcgagcgggactacgccatccgcgccgtcccgtcggggatagccgcgtccgacgctgccgccgccgtcgaggagatatgcgaaaagctgcacggcagcaaggcacccgaccccgattccgcgcgcgatgagatcctgcacaccgtcgcctgcaaggcggccatcaaggccgggtgggataccgacgtaaaggagctcgaaacgcttgtggacgccgtcctctccgggcagataaaatactgcccgcatggccggcctgtctccgtcaccgtgacgcggcgcgaccttgacaagctcttcaagcgcatagtgtga

SEQ ID NO: 1123 - DNA, 2016 bp, Unknown
  Unknown gut bacteria
atgaaagatttcagtctggacttcgaccccacaactgaatcttataccgacatgtcgtttgacagcatactgtcgcaatacaagctggagtcgtaccaggacgcttcgtccgggtcgggtgactccagctattccccgttgtacgacgacgaggacgacgatgtgcgtgtctacacacccggcgcagcctcatctcgcaaaaacgcagagcctgagagcacggacagcggcgatgatgactacgccgatgaaggttacgatgcacaggactacggctatgacagcgccgtatcatcccgcgctgacgattacggtgaggaggacaacagtaagcccttccccacgattcccggtatcgatcatctgaagagctttctcaagagcaagctgaagccgaagtccgaaaagcatgctgcgggcagccggagcaagacagagcctgccgacgactatgacgatcccggttattccgatactgccgacgggcaggactatgcttcggaatataccgacacatactacaccgacgaagactatggctatgttcccgacggcagcggtgcttatgactccgcgcccgcgcagagcacatggcagtatgacgacggcggctacgatgagccgcaggcggaagaggaaccggaatacactgctcccggcaccgaacactcaggtgcgcgcggtgcgatggagcaggaggcgcgaagatatatcgcgcagatgcaggcgggctatgagcaggactatgcagagcccgaggtcgaggaggatctgccctacgatccgagtaccgacggctatgatgcagacccgacgcgctattccgccgaaggcggcagcaccgtatacgctgccgattccgacgacggtgacgaaatagacagccgcttcaatctcagcggcaagcgcgcggcgagccgtatgcagtacggcagcagggcggtcgacctgagcgctgacgaaaactatgagccgacgccgcagacggggtacagcccgtcgcagtggacgccggattacgacgatcccgcaaacgacggctccggtgaagaggagccggtacgcaaaaagcataaattcggcaagaagaaaaagaaaaaagaaaaggccaaggccgaggtcacagagaccgaagccgacgtctctgacaaacggacgcccatctacagcggctttgacgataccgccgatgaaagcggcagctacgctgaggaggacgactacggcttcgacgccgaaggtgacggcaagaagttctccgaggaggacgcttacttcccgccgagcttccgtgaatatgtgctctcgctctttgcgtcgctgttcctgcgcgtcaggggcacggcacgcggcgacacagccgctacgatgagcgacagcgaggaggatctcggaagtgaggtcacgcccgccgccgcgtcaaaatactacggttcgttcacgcgttcgctgtcactgcgcattaaaataagtgcggggctgctggcactgctgtgctatatatcgctccagctcccgctgcccggtatgctgcgcactctgcccgtttccgccgccgcatgcttcgggctccaagcggcgatcatgctgctgagccttgacgttgtaacgacggctgtgctcaaggtcacgcggccgcgcttcggcattgacacacttgcggtgttctcctgccttataagcggtgcggacgcgctgatagttgcgctgtccgacacggcgagggcgcacatcccgctgtgcgcgctgacaagcctctcgcttttcggcatactgatatcgacatacctcagcgtcaaggggctgcgcaaggcgacgcgcgtcccggccatcggcaagcacttctattccgtgacaggtgaaaacaagctcggcaaaaaggagcttacgctcctcaagtcccagcgcccggcgacgggctttgtccgccgtgccgaggaagcgccgcccgatgagacgctgtttctccggctcgcgccgatccttgccgtgctggcgctgctgctggccgtaata

SEQ ID NO: 1124 - DNA, 1020 bp, Unknown
  Unknown gut bacteria
ttgcttaaagggggcgggagcgtgaagaaaagaatagccgcggcggcgcttgcccttgcgctgctgctttccggctgcgcaggcgatgccgcgcaggatcagggcggctttgccccgccggaggataagcgccttgtgatatacacctcgcaccgagcggaggtatacgagccgatagtcaaggaatttgagcagcgcacaggcgtatgggtcgaggtcaagaccggggacaccgcggtgctgctcgatgcgatcgccgcgggcggcacggactgcgaccttatgctcggcggcggggtcgacaacatcagcgcatattcggattgtttcagcccttataccagcgtttataacgacaggatactccctgagtaccgcagcgcggacggcagctatacgccgttttcggtgctgccggtcgtgcttatatatagcacaaagcttgtgcgccgcaacatgccatcgggctgggacagcctgctcgacgaagcttggcgcggcaggatagcttttgccgatcccaatgtctcgggttcgagctacacagccctatgtacgatgcttcaggctctcggcggcggggatgaactgctgccggagttcagacagaatcttgaggggaaaattctcccgagttcgggggacgtcgtgagtaccgtggccgagggcaaatgctacatcggcgtgacggtggaggacatagctctcagcggcattgccgagggctacaacattgcgatagtctaccccaaggagggaacaagcgcgatacccgacggcgcggcgatcgtcaataactgcgcccaccgaaaaaatgccgaggcgttcatagacttcctgctctccccggatatgcagcgcctgctgccggagcttatgcaccgccgcagcgtctgcaccgacgcggatatcacgaaagccgacggcagcgcgatcactcttattgactatgaccttgccgcggcgagcaccgggcggggtgagatactgagcctctggaacggaggtgcggcgggatga

SEQ ID NO: 1125 - DNA, 1020 bp, Unknown
  Unknown gut bacteria
atgaacgcaatagccatttccgtcggcagcatcaccgtctattggagctcgcttatcatcgcgctcggcgtcctcgccgggctcgtaatggggctttcactgtgccgggacgataagtgccgcgcatcggcggtgctctgcttttacccgcccgcgatcctgttctccgtgttcttcagccgccttatccattggtacagctacatggagcagtatgcctccttcgtcgctgccgtaacggattattccgccggcggctactgcgtctccggtgtcgtcctcggtgtgctgctcgcgggcgcggtagtccgttgggcagggctcgtcgggcgcatcggttcgctgtttgatacggtccttcccggcgttgtcctgagcgtcgccattctgcgcctgtcggagagcttcggcaacatctgccgcagcaagatatccgtgacggctccgctgctccagcggctccccttcgccgttgcctcgactgactctgccgggaatgtgtcgtataagtttgcgaccttctttgtgtccttcctgctgcttgcgctgctgtcgctggtgctggtgcggctgtgcgtacaccggcgggatgtcccgatgctgcgcggcatgagccgcacgggcaacgtcgcgcggctcggactggtgctctttgccgcaatcgagatcgtccttgacagcacgcggagtgaccccgtctccatccatttcgcgtttcttaccatgttcaataagtatgtgggcttcataagcgtgacgatgtttgtctgcgccgtctgcatcctttgcgtgttcctgcgctatttcaaggcagtcaagcggaacgggacaggccgccccgccccgctgctcgcgggatatatcgtttcgctcgtcggcgtcggtgcgtcggagtatctggtacagcgcttcaccggcatgttcatgctctaccgcagtatccagacgctctctgccgcactaatggtgtttgtcgtctgccgctgctatgcgctctgctgcgatgatccggagtattga

SEQ ID NO: 1126 - DNA, 1110 bp, Unknown
  Unknown gut bacteria
atgagttggcaggaagagctgagcaaaggaatacgtaccgcggagcagctcgcggaatacatgggatgggatcaggagaagcttgacgcatgcaggcagatagccgagcgctacccgatgatgataacgccgtattatctctcccttgtggataaggacgatcccgatgacccgatagcacgcatgtgcatcccctcggcggatgagttcgtgccgggcggctcgttcgacacgagcggtgaggcctcgaacacaaagcttgagggtctgcagcacaagtataaacgcacagtcctgctgctctcgacgaaccagtgcgcgatgtactgccgccactgcttccgcaaaaggcttgtcggcctgagtaatgaagagctcaacaagcgcgtcgacgaggtcgtcgaatacgtcggcagccacccggagataaacaatgtgctcatctccggcggggattcgctgctgaacccgaaccacatcatcgagcgctatctgcgtgagctgtcggcaatagaccaccttgacttcatccgcttcggctcgcgcctgccggtcacgctgcctgagcgtatctacggcgacggcgagcttctcgatatgctcgatgaatactcggacataaaaacgatctacgtcgtcacccagttcaaccacccgcgtgagctcacaccggaagcgcggtgcgcggtgcgcgcgctgctcgaccgcggcgtgcaggtgcgcaaccagaccgtcctgctgcgcggcgtcaacgattcaccggatgtgctcggcgagctcttcgccgggctcacgcgcgcaggaatttcgccgtattacatattccagtgccgccccgtcaccggcgtgcagaaccgtttccaggtgccgctgctcgacggcatcaggatcgtcgacgaggcgaaggggcttcagaacggcttcggcaagggcgtgcgctacgcgatgagccacccgcgcggcaagatagagatcatcggcacgctccccgacaggcagacaattttcaaattccaccagaacaaataccccgaggacgcctcgcgcatcttcacccgcgcgctcacgcccgacagccgctggctcgacgacgaactgaatccgatgtga

SEQ ID NO: 1127 - DNA, 1263 bp, Unknown
  Unknown gut bacteria
atgctacaatataacacactattttattcggacggaattgaaatgaagatcgaaagagaatacccctcctttataataaccaagaaaggcagcgcatgggtcggcacgggtcacccgtggatatacgcgcaggagataatctccaaaagcaccgagccggaaaacggcgcgcttgtcgacgcactcagcgaaaacgggcgctatctcggcacggggctgtacagccgcgagagcaagataggcctgcggctcatctcccgcaacgcgaacgaccgttttgacgcggagttctggaagcgccgcatcaggtacgcgtgggactaccgccgcaccgtcatgggcggggacgtgtcctgctgccgcgtcatcttcggcgaggccgacggcttccccggcctgaccgtggacaggttctcgaacatcctcgtcacgcagacgctctctgtcggtatggagcggctcaaggacgtgatcttcccgctgctcgccgaagtgctgcgcgagagtggggagaggatcgacggtatatatgagcgcaacgacgtcgccatccgcgcgcttgaggggctcgagcagggcaagggctggtatgagctgccgggcgaagagcacccgcagagtaccgtgaccgagatatgcgagaacgggatatactatgccgtggattttgagaacgggcagaaaacgggcttcttcctcgaccagaagtataaccgctttgccgtggcgcgccttgcaaaggggcggcgcgtgctcgactgctttactcacaccggctctttcgcgctcaacgccgcgcgcggcggcgcagagcacgtgacggcggtggacgtgtcggagagcgccgttgagatggcacgggagaacgcgcgcagaaacggccttgaggacaggatggacttcgtcgcggctgatgtgttcgacctcctgccggagctgaagaagggcgagtatgacttcatcatccttgacccgccggcattcacaaagtcgcgcaagactgtcggccgcgccgagaaaggctataaggagataaatctgcgtgcgctcaaggcgctgccgcgcggtggatattttgcgacggcctcgtgcagccacttcatgccgtcggagctgtttgtgaagatgctgcgctccgcggcgcaggacgcaaatgtcgagctgcggcagatcgaggcgcgccagcaggcacccgaccacccgatactctggaacgtcccggagacggattacctgaaattctatatttttcaagttgtctga

SEQ ID NO: 1128 - DNA, 450 bp, Unknown
  Unknown gut bacteria
atgcgggaaaagttttatatcgatgcctttgccgagtatgaaaagcgtctgcgcacactctgccgcttcgagctgacggagctcacggagcagcggctgggcgataatccgtcgagcgcggagatatccgccgcgcttgacagagaagcgcaggatatcctcaaggccatcccggcggatgcttttgtcacggcgatgtgtgtcgaaggtaaacagatgccgagcgagggcatggcaaagctcatcgctgagcgcgagaattccggcaaaccgaagctgtgctttgtgatcggcggctcgttcgggctttcggataaggtcaagagcagggcagacatgaagctcagcatgtcgcagatgaccttcccgcaccatcttgcccgcgtgatgctgatagagcagctctaccgcggcttcaagataaatgaaggctcaaggtaccataagtaa

SEQ ID NO: 1129 - DNA, 1347 bp, Unknown
  Unknown gut bacteria
atggaaagaaaccttacaagcggaagcgtattcaaaaacattgtcatattctcactgccctatctgctgtcttacttcttgcagacgctgtacgggcttgccgacctgttcatcatcggccagtttgagggcgtggcgagcacgacggcggtgtcggtcggctctcaggtcatgcatatgctgacggtaatgatagtcggccttgcgatgggctcgacggtcagcatcggtcaggccgtcggcgcgcgcgacaggaagcgcgcggcactggccatcggcaacacggcgacgctttttatgacgctctccatcgtactgacggttgtgctgcttatcttagtacggcagatcgtcgcggtcatatccacgcccgccgaagcagttgaggggacggtcgcgtacctcactatctgcttcatcggcattccgctcatcacggcttataatatcatcagctccgttttccgcggcatgggcgattcaaaaagcccgatgtacttcatcgctgttgcctgcgcggcaaacatagcgctggactacctgttcatgggcgcactcaagatggggcctgcgggcgcggcgctcggcacaacgcttgcgcaggcgataagcgttgcggtgtcactcgtcatggtgctgcggcagaagaccggcatcgcgctgcgccgtgagaatcttaagcccaaccgcgacatgatggggcagctgctgtccatcggtgttcccatcgccgttcaggacgggcttattcaggtcgctttcattattataactatcatcgccaatcgccgcgggctcaccgacgcggcggcggtcggcatagtcgagaagttcattagcttcgtgttccttgtgccctcgtccatgctctcgaccgtctcggcgctcggtgcgcagaacatcggcgcgaacaagcccgaacgcgcggtggctacgctgcgctacgccgtgatgatcgccgcgggcttcggcgtgatcgtcaccatacttatccagttcatcgccgagagcatcgtcgggctgttcacaccggacgccgcagtcattgcggcaggcgggcagtacctgcgcggatatattttcgactgcatcttcgccgggatacacttcagcttcagcggatatttctgcgcctgcgggaagtccgggctgtcgttcatgcacaacatcatcgccgtcgcgctcgtgcgcgttccgggcgtgtatttcacctccaagctcttccctgcgacacttttgccgatggggcttgcaacggcggcgggctctctcgtgtcggtcatcatatgcgttatcgcattcgcggtcataagccgccgcgggaaagccgaagcggcaggggtgtga

SEQ ID NO: 1130 - DNA, 1533 bp, Unknown
  Unknown gut bacteria
aggatcctcgccaaggctgtcaactgcgagcatccggtggacggcaatccctgcggagtgtgccccgcctgccgcgggataagcgacggctctgtgctcgatgttgtggagctggacgcggcgtccaacaacggcgttgacaatgtgcgcgcgctcagggaggaagcggtgttcaccccggcctctgtgcgcaagagagtgtatattatcgacgaagtccatatgctgtcggcctcggcgttcaatgcgctgctgaaaattctcgaggagccgcctgggcatctgatgttcatccttgcgacgacggagctgcagaaggtcccggcgacgatactttcgcgctgccagcggcacagctttcggcgcatcgacactcccgacattgccgaatacctcgaatacatcgcaaagcaggaaaacttcaagctcagccatgaggcggcggagcttatcgcccggcttgccgacggcggtgtgcgagacgcgctgagtctgctcgaccagtgctcggccagcgcgacgatagaccttgaagctgtttacagcgcgatggggcttgccggcaaccggcgcacggcgcagcttatgagcagcatattggatcatgatacagacaagacgctgcgggacttcaactccatgtggatggacggcaaggacccggctacgctcctgacggagctgtccggtctgctgcgcgatacgcttatgacgcacgtcgcccccaaaggcgcgcgcagccttatctcaggcggctatgacgatacgacgctcggtgagctctcgggccgcatgacgaccgaggagataatctgcgcgatggagaccgtgcagaagtacaccgcgtccatgcgcgagagcaccagccccaagacgactgcggagctgtgcctcgtctccctgtgtgataacactatgggtgagagcatagcggagcttcgggcgagaatatcgcggctcgaactgcaaattagcagcgggagcttcaccccagtgcgggaggacaagcatccgacgcctgcgcccgccgaagaggaaccggagcgttatgagccggagctcccgcagcggagagaagagacgtccatccaggaggaggacgaccttgaccccgagatgttcatggaggagcagcccgaggacagcttcgttcagcgcggcggcagagtcgaacccgagcctcaagccgaaccggaagctctgcccaaagcggacgcaccggcaggggagccaacatggaaggatatctgcgcaaaggcggcaggtgcgcttccgatggatataaagctgagactggacgacagcgcttccgtaagggggaagatagaaaacggtacactgcgcatagaggtcgtgccaggatttctctatgggcgctttaacaggcaggatgtgctcgcaaagttctcggaggcggcgacagcccttgcgggaaaagagatacacgctctgctctcagagctgcacgatgagccgcgcccacagcgcagtctggacgaactgaagcagttcaaggaagtaaaattcatataa

SEQ ID NO: 1131 - DNA, 351 bp, Unknown
  Unknown gut bacteria
atggtcaatatcagcagcggcaagggaaacatcagcattaccgatgaggttctgacctaccttgcgggcgacgcggctaccagctgcttcggcgtcaagggtatggcagggcgcagcaaggacggaggtccgctccagcttctgcgcagggaatcgatgtccaagggcgttgaggtgcactataacggcgacggcagcgtatctctcgagctgcatattggcgtcgaccacggcgtcaatatcgcggcagtttcacgcagcattatgaatacagtcagctataagctcacgaaggccgctggagtcccggtcaagagcgttgacgtttatattgacacgatcatcggataa

SEQ ID NO: 1132 - DNA, 3339 bp, Unknown
  Unknown gut bacteria
ttgctcagactgatgatcggcaaggccggtgccggcaagacggcggccatcataaacgaaataaagcgcgatatggcctctgcgcatggccgcgccctgatgatcgtccccgagcagtacagccacgaggccgagcgcgagctctgccgcgtctgcggggatcgtctttcgctctatgcggaagttctgagcttcaccggccttgcgcgcgagactgccgcaaagcacggcggcggagccgagccgtggctcgataagggcgggcggctcctgtgcatggcgcttgcgctgcagagcgtcggctcgcgcctgcgcatctattccgccgcccagcgccgcgcggagcttcaggcgctgctgctctccgccgtggacgagctcaagagcgcctgcatcggctatgacgcgctcatggccgccgcggcctcctgcccggacagcctcggcgataagctctccgacctcgccctcatcctcgaagcctatgacgccgccgtcgcgaacggccacgccgaccctgccgacaggctcagtatcctcgctgggcagatagacgagaacaccgacattgacgcgaacgtaaagatatacgtcgacggctttatcgacttcacccggcaggagcgggagatacttcatgccatgctccgccgcggcgcgcagctcaccgtgtgcctgacggtcgacgcgctcgacggcgataatgagatattcgagctctcccgccgcgccggcagggagcttctcgcctatgcccgcgcgctcggctcggaaacggagatcgtcacgctctccgagcagagcgcaaaggcacccgagctcacggtctttgccgataatatgttcagctattcaagcgataaatatacccccgcgcgtgacgccctccgcctttaccggacggagagtatggccgccgagtgcgagcagaccgcggcgctctgccttgaatttgtgcgcgccggcggctgccgctggcgtgatatcgccgtcgtcgcccgcggctttgaggattaccgcggcagtcttgagagcgccttccggcattacggtgtcccgctcttcaccgcccgccgtgatgacctcatgtcaaagcccctgcccgcgctcatcgccctcgcctatgagatcgtgcgcggcggctgggcggtcgatgatgtcatcagctatatgcgcaccggccttgccgggctcgcccccgccgagtgcgacgtgcttgaaaactatatcttcaaatggcagctccagggcggcgcgtggcacagaagcgccgactggcgtcagcacccggacggctacggctgcgagtataccgatgagacggaagaaacgctccgccgcgtgaacgccctgcgccgtacgcttgccgcgcccctcctcgcctttgaggaagccaccgccaaggcgcagaccgccgcgcagcaggccgaggcgctcgccgggctctttgaagcgctggcgcttcccgagcagctctcgcgccgcgccggggagcttgcgcagctcggcgatgaaaagaccgccgccgaataccgccagctctgggacatcgtcgtctccgcgctcgagcagtgcgccgccgtcctcggcgataccgcaatggacagcggggagttctcgcgcctgtttaccctcatgctttcaaaatatgatatcggcaccattcccgtgtcactcgaccgcgtctccgccggcgactttgaccgcaaccgccgccgcagcataaagcaccttatcgtcctcggcgcgtccgaccaacgcctgccgcgcacggatgacgaggccggcgtgttctcccctgaggagcgggagcgcctgctggaaatgcagcttgagcttggcgcgggcggtgagagcgagctgtggcgcgagttctcgcttatctatacctgcctcaccatgccctccgagagccttaccatgctctgcccggtcgccgatactcagggcgcggagcttcgccccgcctttgtcttcaaccgcgcaaaggctctcttcggcctgaacgtcacaaacgcttccttaagcgacgcgcgcatgtccgcaccctccccggcgctcggccttgccgcgcagtccatgcacggcggggacggccgtgcccgcgccgctgcggaatatttcgcagaaaaagaccccgcgcgctattcttctcttgaagccgcggcgaacatgagccgcgggcggctctcctcggcggcggtcgagaagctctacggacagcgcctgcgcctcagcgcctcgcgcatagataaatttgcctcctgccgctttgcgtatttctgccagtacggcctgcgcgcaaagccctatgagcccgccgccttccgccccccggagatcggcacattcatgcactatgtccttgagaagaccgcgcgcgaggtcaagcgccgcggcggttttgccgcggtggacgacaagaccctgcgtgagctgtgcgagcgcttcaccgcgcagtacgtctctgaggagctcaacgattttaacgagaagagccgccgctttgtctatctcttcaaccgcctgtgcggcgacgtatggcgcgtcgtcgaggatatggcggcggagctgcggcggtcggatttcgagccgctggactttgagcttgatttttccgacgcgcgcgaaatgccgccggtcgagctcggcggcggggaggacagtcttgtcctctccggtattgccgaccgtgtcgacggctggtaccacgacggcaagctctatctccgcgtcgtcgactacaagaccgggcgcaaggagttctccatgtccgatgtctggtacggcatggggcttcagatgctgctgtacctcttcgcgctcgaagcaaacggcggcgggcgctatgactgtgaagtcctccccgcgggcgtcatgtacgtccccgcgcgcagccgcatcctctccatgccgcgcgacgcggacgaggagtccgtttcagccgagcgcgcaaaggagcagcggcgaagcggccttgtgcgcgaggacgcagcgctcattgaggcatgggagcgcggcgacgataagcgctatatccccgtgaagttccgcacagggaaaccttcggcggattccctcgccagtgccgagcgcttagggcttctcgaccggcatataaaaaagacccttgcgggcatggcaaagcagctgcgtcagggcagcatcgccgccgacccgttctaccgcggccagcaggagaatgcctgcctgaactgcgattattttgacgcctgccatttctccgacggtgaaaacggcgagagctgccgctataccccgaagctctccgcggagaaggtctgggcgcttatggaggagggcgacgccaatggctga

SEQ ID NO: 1133 - DNA, 690 bp, Unknown
  Unknown gut bacteria
atgataatcgcggcgatattcatcgtcgcagcgctgtttgaaaagtacgtctgccatgacaaaaagagcttttcgagcacgcactatataagctacacggcgatgttcgcctgcatgtcgggcgtgctgatgctcattgagataccgctgttcttcgcgccgggcttctataagctcgacctgagtgagatgccggtgctgatatgcacattctacctcggccctgtggcgggtgccgcgacggagctgctgaaggtcatcgtaaagctcctgctcaaaggcacgaccaccgcttacgtcggcgactttgcaaacttcgtcgtcggctgcacgttcatcctcccggcaagcatgatctaccacgcaaggcccggcaagaagaccgcgctcatcggcatggccgtcggcacgctcatcatgaccgtgttcggcagcgccttcaacgcgatttatctgctgccgaagttctcggagctgttcggcctgccgctcgacacgatagtcggcatgggcacggcggtgaacggcgcgataaacagcgtcagcacactggtgcttttcgcggtcgtcccgttcaatctgctcaagggcatcgtcgtctcggtgctgaccttcctgctgtataagcgcatctcccccatcctgcacaggaacgacgccaagcgcgtcagccgccgcggcgggggaggg

SEQ ID NO: 1134 - DNA, 942 bp, Unknown
  Unknown gut bacteria
atggaacttgctaatacattgtgtgatgaaatcttctatgtggaggctgttatggttaaagtacctgttttcaaaggctcatgcaccgcaatagttacgcccttcaacgagcacggcgtggactatgagagacttaaaaagaaccttgagttccagtatgagaacggcacctcggctatcgtggtctgcggcacgaccggcgaaaacgcgacgcatacgcctaacgagcatgacgagcttgtccgcgtgacggtgcgcaccgtcaacggacgcatgaaagtgatcgccgggatcggcagcaacaataccgaaaacgccctgcgcgcagccgaaaacgcaaaatactccggtgccgacgccgtcctcatggtcacgccctattataataagaccacccagaaagggcttatcgagcatttcagctatgtcgctgaccgcgttgatatccccatgatcctgtataacgtcccaagccgcaccggcatcggcatcaccgccgatacctgcaaagtgctctcgcagcaccctaacatcaacggcataaaggaggcctccggggacatctccttggccgctaagatacgcagcctgtgcggggacgatctttatatctggagcgggaatgacgactgcactatacctcttatgtccctcggcgcgctcggcgttatctccgttgcgagcaacatcgttcccggcgctgtcgcgaagctctgcgcgctctgccttgagggcagctatgccgaggcgacagagctgtacgccaagtatgcctcgctcttctccgcgctgttcatcgagacgaacccgatacccgtcaaggccgcaatgaaaatgatgggcatggacagcggcattctccgccttccgctcaccgagataagtcaggaaagctttgaaacactcctaaaagcaatgcgggacgccggaataaacgtgtga

SEQ ID NO: 1135 - DNA, 828 bp, Unknown
  Unknown gut bacteria
atgaagaagaaaacaatgtggatcataactatgcttggactgtgccttgtgctttatacgatagtcgtatccagaatggagagcagcaccaacgtcatcttcggtggagccgaggatgcttttgtcagaacggacagcatgaattttactgacctgagcgcgaccgagacgccggaaccgactgtggatatctggccgaagctcaccacggatgattttgaaaagaaccactgcctctggatggtcagggagaacagccttctctcatccgcttataagccggatatagcaaaaataagccggacgcgctatatgatgtacagtaccgaatatatggatgagcttgatgcgtttctcgatgcgatagaggacgcgggctttgagtatttcatcggtgcggcgttcagagagtacagcttccagacgcatctgttcaactccaaggcgagccagatcgcgtatgagatggggctgtccgccgactatctcgaccccaagtatcaggaggcggtcgaaaaggccaagacgatagttatgtaccccggcagcagtgagcaccagcttggcgtcgcgatcgacatttttgacgagaaccgttcaagacttgtgtacagtgaaatgaatcaggagctttacgcatggcttgacgagcactgcgcagagtacggcttcataaagcgctacccgacgcgcaagctgctcctcaccggctgggacgagccatggcattaccgctatgtcggcaaggaggtcgcgactttcatcatggaaaacggactctgctatgaggagttttatggtcactacttcccggattttgaatactga

SEQ ID NO: 1136 - DNA, 1299 bp, Unknown
  Unknown gut bacteria
atggaaaataccgagataaaaaaagaacgcgctgtgcttgcgggcttgtccgccgcaagcatggacgagcatgagcgctcgaccgaggtgtcgatggaggagcttgccgcccttgtcgagaccgcggggggcgagactgtcgccatgctcatgcagagccgcccgacgccggatgcgcacagcttcatcggcgacggcaaggtcagggaaatgaaagagcttatcgcgatgaacgactgcgaccttgcggtgttcgacaacgaactcagcccctcgcagatgcgcgtgctgtccgaggagctcggcgtcaaggtgctcgaccgctccgggctcatactggatatcttcgcccagcgcgcccaaacgcgcgagggtcagcttcaggtagagcttgcgcagtataaatacctgctcccgcgcttgacaggtatgtggacgcaccttgtccgccagaccgcctccggcggctcgtcgcctatcggtacgcgcggccccggcgaaactcagcttgagaccgaccgccgccatatccgccgcaagatccagaagcttgaggaggagctggccgatgtgcgcaaggtcaggagcacccagcgccgcaagcgcgagaagaacgccatgcccgtcgtcgcccttgtggggtatacgaacgcgggcaaatccacgctgctcaactgccttaccggctctgacatccccgcgaacgaccgcctgtttgacaccctcgataccacgacccggcgcttccgcatcgacgagacgcaggaggtgctgctctccgataccgtcggctttatccgcaagctgcccacgcatcttatcgaggccttcaaggcgacgctcgaggagctgagctatgccgatgtgctcctgcacgtcatcgatatctcgaaccccgaatgggaggagcaggcgcgcgttgtcgattcgctgatccgccagctcggcgcggaggacacgccctgcatccgcgtgttcaataagtgcgatgcctatatcggcatcctgccgcacggagagaacatcgtctgcatctccgcgcgcagcggcgagggggcaaaggagcttgtcgacacgctatccgccatgctcgaccgcggcaagaagcgcgtcacgctgaagattccttacgcaaacgccgggcttgctgacagcctcaaccgcgaggcgcaggtacactccatggagtataccgactccggcatcgaggccgaggtcactgtcggaccggagctcttcggcagggtcaagcagttcatccccggctatgttgaacccaaggaggactgggaggattga

SEQ ID NO: 1137 - DNA, 1623 bp, Unknown
  Unknown gut bacteria
atgaacagaaaattttttgcgctgctgctcacgctgctgatggtcctcgcgctcgtaccagtctcggcctacgcggacacctcgaaaagcagcggcaaggaaattgcggtattattcacaaacgacgtccactgcgccgttgataagaacctcggctaccagtccgtcgcgctcgcaaaagagacgctggaagcacagggcaaggatgtgctgctcgtcgacgtaggcgatgccgtccagggcgacgcgataggcacgctctccaagggcgaatacatcatcaagataatgaatgagctgggctacgacgtggccacgatcggcaaccatgagtttgactacggcatggatcagttcaagaagctcaaccgccttgccgacttcccctacgtcagcgcgaacttcatggacaagaacggcgagaccgtgctcgatgcatactcgatgcagaacgtccacggcgtgaagatcgccttcgtcggcgtcacgactcccaagaccataacctcttcaactcccgcgtacttccagaatgagaagggcgaatggatattctccttctgtcaggatgagacgggcgaactcgtgtacacggcagtccagtcggcggtcgacgcagcgcgcaaggagggtgcggactatgtcatagcgctggcgcaccttgggatagagaaggactgcgagccttggacttcttctgatgtcataaacaacaccaccggcattgacgtcatgctcgacgggcactcccactccgtcatcgaaaaggagcttgtgaagaacaaggacggcaaggatgtcattctctcctccaccggcacaaagcttgagaacatcggctgcctgacgatatccgccgacggaaagctcgacgttgagcttctcaatgacgacggcataggtgaatacatcgcggacattcaggaggagttcgacgggctcgtgaacgaggtcgtcgcgcacaccgatgttgaccttgccgtatatgacccgaagaatcccgaggagcgccttatccgcgtgaccgagacgaacctcggcgacctctgcgccgatgcgtacagggtcatgtccggtgctgacgtcgccatcgtcaacggcggcggcatccgcagcgacatcaaggccggagacatcacctacggcgatatcatagctgtgcacccgttcggcaactccatgtgcgtggtcgagtgcacggggcagcagatactcaacgcgcttgagctgggcgcgtccgcgctccccggcgagagcggcggatttttgcaggtgtccggcatgagctatacgatagacctgaatgttgagtccacggtcaagcgcgataaggacggcctgttcctcagcgttgatggtgaccgccgcgtcaaggacgtcaagatcggcgacaaggagctcgatccggagcagacctacaccctcgcctgccatgactatctgctgaaaaacggcggcgacggctacacgatgttcaaggactgcacgctcacgcaggactgcgtgatgctcgacaatcaggtgcttataagctacattgtcgataagctcggcggcagcgtcggcaaggattactccgagccctacggtgccgggcgcataacgatagtcgaagcaaagtaa

SEQ ID NO: 1138 - DNA, 1839 bp, Unknown
  Unknown gut bacteria
atgaaaaacaggcttcgcgacatctttatcggcaagcccttgaaggactccgatctgggcggtgaaaagttcggcgtgctttgggggctgccgatctattccagcgacactatctcctccgtggcatacgcaggtgaggaagtgctcatggtgctgctgccggtgatggggctgcttgccgcgcatacgctcgtgtacgtcatgtgcgcgataattgcgctgctgcttattctcgtgttctgctaccgacagacgatagacgcttacccgcagggcggcggtgcgtatatcgtcggtgcggacaacctcggcgaagcgccggggcttaccgcggcgtcgtcgctgctggtaggctatatcctgacggtggcggtgtcgagctgctcgggcgcggcggcggtggcgtcggcgttcccggagcttgcagcgtataagccgtggatcgcctttgccatcgtctgcattcttacgtggggcaacctcagaggcatgcgcgagtcggcgatcatgttcggcgtgcccacgtatttcttcatcttcgctatccttgcgctcatcgtgacgggctttgtgcgtgtgctcgtattcgggtaccagccgccggagccgacggcggtcatcgaaacggcgggggatgtgacagtgttccttatcctgcgagccttcgcttccggctgcaccgcgctgaccggcgtcgaggccgtgagcaacggtgtgccgtccttccgcgacccatcggcgaagaacgcgaaaagagtcctcggccttatggcgctcacggtcggcgtgacctttataagcatcgccgtgctgaaggatatttatcacatcgtcccgcaggagggcgtcaccgccattgcaagccttgcttccgcagtgttcggcagcgggagcgtgtgcttctatgtgttccagatagcgacgatcgttatcctttcacttgcggcgaacacggcttatgccggtatgccgctgctgcttgcgatggtcgcgcgcgacggatacatgccgcgccgctacactcagcgcggcgcaaggctgaacttctcaaacggcgtgctgctgatattcttcgcgtcctcggcgcttatcttcctcttcaatgctgacacgcatacgctgctgccgctctacgcgacgggcgtgttcatctcgtttacgatctcgcaggcaggcatgcttgcccactgggtcaggctcaagactccgggctggcaccataaggcggtcatcaacgctctcggtacagtcgtgtgcgcagtggtgtgcctcgtcattgccatcacgcgctttaccgagggggcatgggtagttgttatactcatccctctgctggtgtatgtgatgaagtccatcaagaagcattatgcggaggtctccacggacctcacgctgcgcagcacagacgaagcgcgcgatatgctgcgctatatcatgccgggcaaggtcatcatcccggtgcagacgctcaaccgctcatttgtgaaaacgctcaggtgcgccctcagctgcggcttttccgagatagagctgtataacgtgacggacgacgagcagaaggcgcgcaggctcagggcgcagctcgatgagcttgacctgaacgtggagtttgtgtatgacgtcacggcctaccgcaatgtaaacgaggtgcttataaagcatgtcgaggacgaggcggcgcagcttcacgagcatgagaacctgacggtcatgatgggtgcgctcgttgtgacctcgccgttaaagaagctgctgcataaccagacaacgcagcgtctcagcaagaagcttgagaggtacagaaatgtttctgtattcacggtgccgtatataatatga

SEQ ID NO: 1139 - DNA, 936 bp, Unknown
  Unknown gut bacteria
atgccggtatatctcttcacgggtttcctggagagcggcaagaccaagttcatacaggagacgcttgaggacaagcgcttctgcaataaggaaaagaccctgctgctcgtctgcgaggagggcgaggaggagtacgcgcccgagcagttcgcgacggataccgtcgtcatccgtgtgcttgaaggtcaggagcagctcacgaccgagaacctcaccaagtgggcacaggagacgaaagctgaccgcgtcgttattgagtataacggcatgtggctgctcgacgcactctatgccgcgatgcccgagggctgggtcgtctatcaggagttcatgtttgccgacgccggcaccttcctgagctacaacggcaatatgcgccagctcgtctatgataagctcaagagctgcgagctcgttgttttcaaccgcttcaagcccgacatggataagatggagtttcacaaggtcgtgcgcgctgcgtcccgctgcgccgacattgcatacgaatccaccgatggcaaggtcgtctatgacgatattgaggatcacctgccgttcgacctgaacgcgccggtaatcgagataggcgacgcggactttgccgagtggtaccgcgacctcggtgagaccccggcaaactacgagggcaagaccgtgcgcttcaagtgccgtgcgctcaagcgcagcaagatgccggcaaacactttcatcgtcggcaggcacgtcatgacctgctgcgttgaagatatccagtttgccgcgctggtctgccagtgggacaaggccgacaccgtgcaggatgacagctggatgatcctcacggcgaagctgaacttcaagttcaacaaggcctatggccgcaagggacctgtgctcagctatgtttcgcatgagctgtgcgaggcgccggagcagcctgtcgcaacgttctattga

SEQ ID NO: 1140 - DNA, 2112 bp, Unknown
  Unknown gut bacteria
atgcacaacagacttgtaaaaccgggcagagttgcggggcttgttatcctcatcctgctgctcctgacggtgtatctggtggcgctttataagctccagatcatagagggcgaggcaaactacaaccgcagcagcgagcttacgaataccgagcgtgtagtgaccgctgcgcgcggcaatatctatgaccgctacggccgtaccctcgtcagcaatgaggagacctacaacctgaagatagatacggacaagctctttgcaaacgatgacccgaactcggtcatcctcgagcttgtgcacatggtccagggctacggcgatgaatataccgacgacctgcccataaccatgaccccgccgttcgagtacgacccggacatgacggctatccagcgcacgatgcttgacgcgtactatgtccgtcaggagatagacccgaactccacggcggtcgagctgatgagctatatgcgcacgagatataatatcgacaacagctactccgccgaggagatgcgcatcatcgccggcgtgcgttactcgataaacgtccgctacgccgtccccactgccgactatatcttcgtcgaggacgcgagcatgaagctcatctcgtcgatcatggaaaacaagctcgtcggcatcgaggtcgagcgtgcatacagccgtaagtacggcacggaatacgccgcgcatatccttggctacaccggccttatgactcaggaggagtatgagaaatactccctgctgaaatattcgaccgacgccatggtcggtaaggacggcgtcgagtacgcctttgaaaattacctccacggcaaggacggcaaggtcatcgagacgcgaaattccgccggtacggtgctcgcgacggtatacgaggaggagccggagcccggcaaccacgtgtacctgacgatcgacagcgtcctgcaggagcagaccgagcgcatccttgcaaacggcgtgtccatactcaagcagaacattgcccagaagcgcgccgagggcacggcgcgaggcgactataacgtcgacctcaaggatgagatcaccggcgctgccgccgtggtcgtgaacgtcaagaccggcgagccgcttgcgatggcgagctggccgacctacaatgtcgcgacgatactggaggactatcaggagctgctcgaagcggagaatgccccgctctttaaccgcacgctgatgggcacctacgcccccggttctactttcaaaccctgcacggcaatagccgcgctcacaatgggcatagtaaatactgaggacaaaataaagtgcgagggcgtctacacaaggtacgctgccgaaggctacgcgcctgagtgctggatctggaactcgacgaaggatcacctgacccaccccgaggaaaacgtcacgaccgctatccgcgactcgtgcaactactatttctactccatcggcaactacctcggcgtcgacgacctcggcaagtttgctgcgaacttcggtctcggcgaatattcgggcattgagcttgttgaagccaagggcaatatgtccaatcaggcaaaccacatggactatgccggtaccgagtggcgaataggcgataccctgcaggccgccatcggccagtccgacagcgttttcaccccgatacagatggccgaatactgcgcgaccgtcgcaaactccggtacgcgctattccgcgtccatcctcaaatccatcagaaactatgattacagcgaaaagctctatgaccgcgagcccactgttatgagcactgtcgagtccgccgagtataactgggcggcggtgcacgagggcatgtggcaggtgcttaacgactatataaacgagaagaatgtcaacgtctgggtcgactgccagtggcgcgtcgccggcaagaccggtaccgcacagaagggcgaaggcatccagaacgacggtatcttcatgtgctatgccccgtataaagatccagaggtcgcgatattcgtcgtcgtcgagcgcggcggcgccggtgctgacgtgcagttcatcgcgcgccacatcatggacgcctacatcaccataatgggctacagcgacacctccgagacggaaatgacgcttcttaaataa

SEQ ID NO: 1141 - DNA, 708 bp, Unknown
  Unknown gut bacteria
atgtttcagggcttcagcaaaaagaccggcgagtttctctgggagcttgcctttaataatgagcgcccgtggtttctggcgcacaaggatgagtttgaggagcgcgtgaacgctccgttcaaggcgcttgccggggagtgcttcgcgctcatggagcagcgttaccccgcgctcgactgccgggtacacgtctcgcgcatctaccgggacgcgcggcggctcttcggccgcgggccgtataaggaccatctctggttctcgataaaggcaagccaggtgctgcttgaggggccgatgttctggttcgaggtcggcgcggcggattacagctacggcatgggcttttacagtgcaacgcccgcgcagatggaggcgttccgccgcagcatcgacgcgaatcccgagcgcttccgccgcatcgcggagggcgtgaagcgccacggatataagctcgacggcgaggaatacaagcggccaaagaagctgcgcggcgacgcgctcatagacggctggtacaaccgcaagcgcataggccttgaaaagagctttgacctcggcggggacgctttcagtcagaagctgccggagatactcgtctccgcttatgcggagcttatgccgatgtacgaatacttcatggagatatacagggcctgcccggagacaggacggcccgcgccgagggggacaggcaatgcagcagaataa

SEQ ID NO: 1142 - DNA, 1080 bp, Unknown
  Unknown gut bacteria
atgaaataccagatagacaaaagctccggggtgagcgcgtatatgcagctgtatgaccagctgcggcgggacattgcccgcggcagcgtcaagtacggcgagcgcctgccgtcaaagcggctgctcgcgggggaactcggcgtgagcctgataacggtcgagcacgcttatgcgctgctggtcgacgagggctacgccgaggcgcgcgagcgcagcgggtacttcgcggccttcggcggcagggctgagacttcgccatcccgcgcgctgccggtgcaggacacggcgcccctgcgcgtaccggaggacttcccgttctcggtgctcgcaaaggtgatgcgccgggtgctgacggagtacgaccggcgcatactgatgaagccgccgggagctggctgtgcggagctgcgcgcggcgatagcggcgtatcttgagcgcagccgcggcgttgcagtgagcccggagcggatcatcataggttcgggtgcggagtatctgtattcgcttatcgcgcagctccttggcggggagcgcggcttcgcgctggaaaagccctgctatgaggtgatacgccgggtgtatgaggcaaacggcgtggagtgtacggagctcgcgatgggggaggacgggataatctcgtccgagctttcaggctgcgcggcgggggtactgcacgtgacaccgttcaacagctacccgagccatgtgaccgcccccgccagcaagcggcacgagtacgcgcgctgggcgagggcgcacggggcgtatatcgtcgaggacgattacgattcggagttctcctcggtcacgcggcagatagacacgatctattctctcacgccggaacgggtgatatacgtcaacaccttttcaaagaccctcgcgcccgcgatgcgcacggcgtacatggtgctgccggaggagctgatggcggagtatacgcgcaggctcggcttctattcatgcaccgtcccggcctttgaacagtatgtgttggcggagttcataaacggcggggagcttgagcgctatataaaccgacgcagaaggatactccgtcaggagaaaaaagaaaaataa

SEQ ID NO: 1143 - DNA, 618 bp, Unknown
  Unknown gut bacteria
atggggaggatggaaaagatgaaggataagggcaagctgtttgttatttccgggccgtccggagcaggtaagagcacggtcgttttcaaggccattgaggacagggacgatatgtgcttctccgtttctgtgacgacccgcaagccgagacccggagaggtcgacggcaaggaatacttcttcgttgacctcaagcgctttgacgagatggtcgcaaacgacgagctgcttgagcacgcgatgtacgtcgctaattcctatggcactccgcgcgcctacgtgcaggagaagctggacgagggcaagaacgtgatactcgatatcgaggtgcagggtgcgcgtcagatcaacgagaaaatgccggaggcggtcaagatattcattatcccgccgtccatggcagagcttgagcgccgcctgagaggccgcggtacagatacagacagagccattgaggcgaggcttatccgcgcccgtcaggaatatggggaagcggatttctatgactacatcattattaacgacgatgccgaaaaggccgccaaggagcttgccgcgataatcactgcggagagctgccgctatgccggccgcgagcattacctcaaggaagaataa

SEQ ID NO: 1144 - DNA, 1209 bp, Unknown
  Unknown gut bacteria
atgaaaaaacgtataataatcgttcttgccgcagcactgatcttctgcctgttcgccgccggctgctcctcaaaggatgatcccgccgtcaccgaggccccggctgtatctcccactcccgaaccgacgccggagccctgcgtcatcatgggcaagagctatccgctcaacatcgagagcatcgacctgcgcggtctgaatgatacgcttgttgacgagaccgcagcgcagctcaagagactgaccaagctcaaaacggtcacgctcggcagctgggaggaaagccccgtcacatggggaaagatgaacgagctgcacaccgcctgcccgcaggctgccatagactatgagttttccatttacggcaagcccttcaacctcagcgatgaggaaatggatctcaagtacgtcagcataaaggacgaaggcaggctcctcaagctcatcaccgcctgcatgacgaatctcactttcctcgacatggacactgccggtgtctccgacgagaagatggcagagctgcgcgattccctgccgaacacggaggtcgtctggcgcgtctggttcggcgactattacagcgtgcgcaccaatgttgagcgcatccttgcctcgatgcccggcaaggccggggagctgacgaccgagtccacgcgctccctcaaatactgcaccaaggtaaaatacatggacctcggacacaacaacttccttgacacgatcgactttgtctcctatatgcccgaccttgaggtgctaatcgtcggcatgactttcgtcgaggacttctacccgctggaaaactgcccgaagctcgagtatctggaggccatgacctcaaggctccacgacctccgtcccctcgcgaacctcaagaacctcaagcatctcaacatatgctacaacttcgccgtcaccgacattaccccgctctacgggctgactcagcttgaacggctctggatcggcaaatatgatcccgtcccgcctgagcagatcgagaagataaaggaacttctccccaactgcgtcgtcaattctactgtcgctgatccgacagacggcggctggcgcgtggacgaagaaccgaacgagttcggcgattcccagcaggccgcccgctatacactgctgcgcgagcagtttggctaccatgaggaggacttttcctattactggaatgaccgtctctgcatccgcccgtactga

SEQ ID NO: 1145 - DNA, 1032 bp, Unknown
  Unknown gut bacteria
atgctcgaagagcaggcgcgccgcctgcatcccaagttcgtcgctgtctatgacgagacggcggcaaagcagttcaaaatcgccgtcgcggacaccgatatccgcgtcggctccggcatggacgggcttatcgaagccgcctgcatggacggcaccgactgcgtcgtgaccgccgtgtccggctccgtcgggctccgtccgaccctcgccgccatagacgcgaaaaagcgcatcgcccttgcgaataaagagactctcgtctgcgcgggcgatatcgtcatggcgcgcgcaaaggaaaagggcgcggagatcgttccggtcgactccgagcactcggccatcttccagtgcctcatgggcaggaagaagggcgagctcaagaagatcctcctcaccggctccggcggtccgttccgcggcaaggcgagaagcgagcttgaggacgtcactcccgagcaggccgtgaagcaccccaactggagcatgggcgcgaagatatccgttgacagtgcgactatgatgaacaaggggcttgagttcatcgaggccatgcacctgttctccgtcacgcccgatgatattcaggtggtaatccacccgcagagcgtcatacactctatggtagagctggtcgacggcacggtcatcgcgcagctcggtgtgcccgacatgggtcttcccatccagcttgccctgacctaccccgagcgcaaggcctcaatgtttgagcatcttgattttgccaggctgcgcgacctcacctttgaagcgcccgaccttgagaaggccccctgcctcggtctcgcaatggactgcgcccgcaccggcggcacggctccctgcgtgatgagcgcggcaaacgaggtcgccgtgggtatgttcctgcgtcacgagctgggctataaccgcatttatgacgccgcggcaggagccgtggcaaagctgggagcggtcgacgcttccgatctggaaaccgtcctggaggcggatgccgccgccagagcctatgtcatggagaatttcggtaaatga

SEQ ID NO: 1146 - DNA, 1089 bp, Unknown
  Unknown gut bacteria
atgaagctgcttatcataaaccccggctccacgagcacgaagcttgccctttatgacggcgctgaaaagctcgtgcaggagagccttgaccatgacgccgccgagcttcagcagtaccataccattgccgaacaggtccccatgcgcttgtctgtcatccgctcattcatggagcgaaacggcattgaccaaaaggagcttgccgccgtcataggccgcggcgggctggtgttcggcctcaggacgggcggctatatcgttgacgatgagctgtgccgcgcccttgtcgatgacgagctgagtcagccgcatgcctcgaacctcggcggactgctcgcgcgcgagcttgcccagcccttgggtatcccggcatatatctatgacgccgtgacctcgggcgagctcaccgacattgccaagatcaccggctacgcggagatcgagcggcagagcttctgccacgtgctcaacagccgcgccatggccatccgctacgcaaagcagcagggcagaaactacagggacatgaacctcatcgtcgtccatatgggcggcggcgtgtccgcaagcgtccaccggcacggcgagatcgtcgactccgtcggcgatgacgacggccagttctcgcccgagcgcgcgggctgcgccccggcgctctcgatgataaagctgtgctactccggcaagtacacctacgaggagatgcgccgcaagatacgcggccgcggcggcatgtacgcccacctcggcgtgagcgattgccgtgttatcgagcagatgataaaggacggcgacgaacacgccgccctcatcctcgacgcgcaggcataccagatcgcaaaaacgatagggctgctctccatcgtcctcaaaggcgactgcgacgcgatcatcctcaccggcggcctcgcttactcggagcttctgacgggcaagataaaggactatgtcggcttcatcgcgccggtgtgcgtgctcgccggtgaaacggaaatggaggcgctggctctcggcggcgtgcgtatgctgaccggcgaggagcagcccaatgtgtatcacgcaagtgatggaaaggggaagaacaaatga

SEQ ID NO: 1147 - DNA, 1608 bp, Unknown
  Unknown gut bacteria
atgaagataacttttataggcgccgcgcatgaagtgaccggcagctgcacttatatcgaagtcggcgacaagaagggcattgtcgattacggcatggagcagggcaggaacctctatgagaacgctcccctgcccgtcgccccgggcgagctggatttcgtgctgctgacccatgcgcacatcgaccactccgggatgctgcccgcgctctataagcagggcttccgcggctcggtatacgccagcgccgcgacctgccagctgtgcgacataatgctgcgcgactcggcgaacatccagatgcaggaggcagagtggaaatcccgcaaggccatgcgcgcgggcggcgcgccggtcgagccggtatacgaccttgacgacgtcgcgggcataatggggagaatgatcccctgcgggtacaacaagataattcaggtcaatgactgcgtgtccatccgcctgaccgacgtcgggcacctgctcggctcggcggcaatagaggtatggctgcacgaaaacggcgaggagcgctgcatctgcttcagcggcgatatcggcaacctcaaccagcccatcctccgcgacccgcagtttgtgaagagcgcggactacctcgtgatagaatccacctacggcgacaggctgcactccgccgagcgcgcggactatgtctccgagcttgcaaagctcatccagtcgacgctcgacgccggcgggaacctcattatcccctcctttgccgtcggccgcacacaggagatcctgtacttcatacgcgagataaaggagcgcggcctcgtacacggacacgcggacttccccgtctatgtggacagccccctcgccatcgaggcgacgacggtgttcctccagtgcgacacggagtttgtcgacgaggagatgcaggcggtcatccgctccggtgtgaacccgctcatgttccccggcctcaagctctcggtatcgaaagaggactcggtcgcgataaacgaggataagacgccgaaggtcatcatctccgcaagcggcctgtgcgacgcgggccgcgggcgccaccacctcaagcataacttctggcgtccggagtgccgggtgctgttcgtgggctatcaggccgtcggcacccccggtcgggcgctcatagacggggcaaagaaggtcaagctcttcaacgaggatatcgaggtgtgcgcctcgataagtgtgctgcccggcgtaagcggccacgctgacaagaacggccttctcggctggctgcacggctttgaaaagaagccgaagctcgtcttcgtaaaccacggcgaccctgattccgccgacagcttcgccgcctgcctaaatgacgagcagggttacaaggccttcgcgccatacagcggcacgcgctttgacctgctgcgcggcgagttcgactatatcgccgagcccaaaccgatagagaagaagcccattgtctccaaggcgagccgccttgtgtccgagctcatcgccgcggcggagcgcctgctgcgtatctgcaagggcatggacgggaagccgaacaaggtgcttcagggctttgtcagggatataaacaagctgtcggacgatatggaaaaatatacctga

SEQ ID NO: 1148 - DNA, 696 bp, Unknown
  Unknown gut bacteria
atgtctgaattgaaaattatcaagggtgaagcatctgagatagaagaacaggccgcgcggcagataaaggatatcgtctgcgcaaagcctgacgcggcgatagccctcgccgcagggcgcgacgtgaaagggctgtataagcggctcggcgaaatgtgcgccgcgggcgaggtcagcctgaaaaacgcgcgcatcttagcggtgacggagttttctgaaaggcatgactgcgaaaatttcctgagagagcagctgtgcgcggcggatgtaagtgaagagaactgctttttcccggacgctgctgcgcccgaggagtatgaccggcttatagagagcctcggcgggctcgaccttgccgtgctcggcatcggtcaggatgcgcacataggctataacgagcccgcaacgccttttgattcgtatacccacgtccagaagctgacggacagaacaaagcgccagctctccgagcgcggttatacgaaggagaatatgcccgagtacgccgtgacgatgggcatcaagacgctgaccgaggcgaggaacatcatcctgcttgccgggggcgaggataaggctgcggccgtttttgagatggtttatggtaagaccattacatatatacctgcatcatttttgcaaattcctacggaagtcaccgtgtatcttgataccgcggcggcatccagactctaa

SEQ ID NO: 1149 - DNA, 441 bp, Unknown
  Unknown gut bacteria
atgctcaaggaaaaccttgtgatcctccgcaatatccacggctattctcaggaggagatcgcggaaaagataaacatctcccgccaggcatacgccaagtgggagaccggcgcgaccgtgccagatattgaaaagtgcagtctgcttgccgccgtctacggcgtgacgatcgacagcctcatcaagaccgagaccgccgacggcatcggcacgatcccgcccgcgccaaaaggcaagaacatctggggctccgtcacggtgagcgatcgcgggcagatcgtcatccccaaggacgcgcgcgacaagttcggactcacaggcggcacgcgccttatcgtcctcagcgacgaggagggcattgcgctcgtcccggcggagcgcttcgagcgcagcatgaaaatggctatggaatttgcctcgatgcagaataaggcagactaa

SEQ ID NO: 1150 - DNA, 1023 bp, Unknown
  Unknown gut bacteria
atgctttacttctcaagcgattatatggagggctgccacccaaatattcttcggcggctcagcgaaataaacatggacaagaaccccggttacggcacggatgcgatatgcgagagcgcgaagaataagatacgcgccgcctgcggcaaacccgacgcggaggtatatttcctcgttggcgggactcagacgaacgcagtagtgataaagtctatgctgcgctcttatgaaggcgttgtcgcagcggcgacgggacacgttgcagtgcatgaagcaggtgcaatcgaagccggtggacacaaggtactgacgctgcctgagcataacggcaagctcgacgccgcggaggtcgaagaatatatcgcgaccttctataaggacgcaaatcatgagcacatggtaaagtccggcatggtctatatctcgcaccctacggagtacggaacgctctacacaaaggcggagcttgaagcgctgcatagcgtgtgcgcaaagtatgatatcccgctgttccttgacggcgcgcgtctcggctacggcctcgctgcgacgggtacggacgtgacgcttgagacgatcgcagacaactgcgacgtgttctacatcggcgggacaaaggtcggcgcgatgttcggcgaagccgtcgtgttcaccgggaaagcacctgagggctttttctcaataatcaagcagaacggcgcactgctggctaagggctggatgctcggcgtgcagttcgatgagctgttcacggacgggctgtacatgaagtgcgggaagaacgcgatagactgcgcggagcgtctcaaggcggggcttatctccaagggctataatatgtatctggattctccgacgaaccagcagttcattgtcatagagacggcgaagctcgaagagctcggcaagcaggtcgcctacggattcatggaggcctacgacgcggagcatacagtcatacgctttgccacgagctgggcaacgcgcatggaggatgtcgagaagctgatagagctgctttga

SEQ ID NO: 1151 - DNA, 1815 bp, Unknown
  Unknown gut bacteria
atgaagctgacgctgatcctcctgctgctgatcacatccctgatggcggtggtaggcgcgttcctgaccaccagcgtcaccagtttctatatcgacagcttttatcagcagatgagcagtgccttcggcgcggaccgccgggagtttgtggcggacctccgcagcgccgccgctcagccggacggcgctgagcgtattcaggagatcatggaggtcaatgccggtatgctgggcatcgactaccgcacccggaactactatgtgctggacggcaccgcaggcagctttctggctggcagcgccgagtcctccgacctgccccgggagcagtccgccaaccttctgaccgcccggaacgcggttgcacggaaggacgcctccaccgtaggcgacgaaagcgatatctctgccgactacatggatgtggccatccccatcttcggcggtgacaacgccttcatcatctacattctggataacaaggacacggtatccgatctgaataaccagcttttccagatcatcatgcaggccctcatcatcggcctgctgatctccgtgctgctgagctttctgctctccaagaccatggtgggccccattgaaaagctgaccatcggcgcagaacgggtggccgccggtgattttgacagcgagctgccggtggaatccaccgacgagatcggtattctcaccggaaccttcaatgagatggccgaggtcctgcagtccacactggctgccgtggaaaacgagcgcaacaagctggataccctgttcctccacatgaccgacggcgtggtggcctttgaccgggaggggcacctcatccactgcaaccccgccgccacggagcttttgcggcgatccatcgatcccagctgcacctacgaggaattgctgggcgacctgcatcccttccagaacgtgctggccctccagaaacccaactacattgaagatgagttggtggcgggagaccggacgctggccctctacctcacccccttctccgacaaggcccagggcggcgttctgatcctgctccatgacgtgacggaacagcaccggaatgaggaacggcgcaaggaattcgtggccaacgtgtctcacgagctgcggacccccctgaccaacgtccgcagctacgccgaaaccatccgggatgccggagatgacattccccgggatatggagaacaatttcctggacatcatcattacggaaacggaccgcatgacccacatcgttcaggatctgctgaccctcagccgactggacgccggcagcaccgaaatggtgttcacccggttccccttccatgacgccatcgaaagcgtggtccgctccaacagtctcaacgccaagcagcggggccatgagctgacctatgtgccggagggcgagctgcccctcatcaccggtgaccggagccgtctggaacaggtgatgatgaacattctcggcaacgccatcaagtacactccggacggcggacacattcgcgtcaccgcaggagccggccccgacaccgcctggatggaggtccgggatgacggcatcggcatcccggaaaaggacagggagcgtattttcgaccgcttctaccgggtggataaggcccgttcccgggaatccggcggcacaggccttggactatccatcgccagagagatcgtccagcggcaccacggcaccatttccctggtcccccatgagggaccgggcaccacggtccgtctggagctgcccatcacccagcccgcccccggcgcaccggaggatacggcggaaaacacgtcggctcagcagtaa

SEQ ID NO: 1152 - DNA, 1773 bp, Unknown
  Unknown gut bacteria
atgaacattttctctctctttaccctgtgcggagggctggccttcttcttatacggcatgacggtcatgtccaaaagtctggaaaaaatggccggcggcaagctggagcggctgctcaagcgcatgacttccaaccccatcaaaagtctgctgctgggcgccggcatcaccatcgccattcagtcctcctccgctatgacggtcatgctggtgggtctggtgaactccggtgtcatggagatcggacagaccatcggcatcatcatgggttccaatatcggcaccaccctgacagcgtggctgctgtccctcaccggcatcgaaagcgagaacttctttgtcaacttcctcaagcccaagaatttctcccccctgctggctttgatcggtattctgctcattatgggctccaagcggcagcgccgccgggacgtgggccgggtgatgatgggcttctctattctaatgtacggcatggagctgatgagcggtgcggtgtctccgctggcagatatgccgggcttcacccacttcatgactgccttcaccaatcccttcctgggtgtgctggtaggcgccgccttcaccggcatcatccagtcctccgccgcctccgttggcattttgcaggcactggccatgaccggctccgtcacctacggcatcgctatccccatcatcatgggccagaacatcggcacctgcgttacggctctgatctcctctatcggcgtcagccgcaatgccaagtgggtgtccgtcatccacatctccttcaacctcatcggcaccgctctgggtctgctggccctgtttggcggcgagatgttcctgaatctgcccttcctgacagagcccatcggcgctgttggcatcgcattctgccacacgatcttcaacgtctgcaccacccttgtgctgctgcccttcagccggcagttggagcgccttgccaacaaggtgatctccacggaggacaagccctctgacttcgccttcctggacccccggctgatgcggacccccggcgtggctgtcagcgaatgcgccgtcatgaccaaccgcatgggcgctctggcgctggaaagcatgcagctggctctggcccagttcatccagtatgacggcagccgggaggaacagattctggccaacgaggacaagctggacacctacgaggaccgtctgggcggctatctggtccagatctctcagcacggcacctcctccgccgatatgcgcaccgtctcccgcctgcttcacgccatcggggactttgagcgcatcggtgaccacgctctgaacctgcaggaatccgccaaggagcttcatgaaaagcagttgaccttctccaccattgcccgggaagaggtggatgtgctgacctccctgctggaggatctgctgaacagcgccctgcgcagcttccagtcggacgatccccagatggcccggcaggtggaacctctggaggagactatggaccttctcacggaggagatccgcagccgtcacatccggcggctccaaagcggcccgtgctccatccagctcggctttatcctcaacgatctgctgaacaatgccgagcgtgtgggcgatcattgctccaacatcgcggtcagcgtcattgaggagcaggaaaaacaggccgcctcccacgcctatctccacaatctgaagaagaatgacgagttctccttccagcttcagcagaacctgagccggtacgtcctgcctgcggaaattgcggaggaccaacctgccgaataa

SEQ ID NO: 1153 - DNA, 1353 bp, Unknown
  Unknown gut bacteria
atgaagcaaaaactgagttttaaagaatacatctatgtggccagtatgctgttcggcatgttcttcggcgcaggaaacctgattttcccggtttatatgggacaggtggccggacggaacatgtgggcggccgttcttggcttcctgatcaccggcgtgggcctgcctctgctgggcgtggctgccttgggcatcagccgcagcaacggcctttttgacctcagccataaggtgggccgtccctatgcgttcttttttacctgcgccctttatctgaccatcgggccgtttttcgccattccccggtgcgcaacgacttccttcaccgtgggtctggagcagatcctgccccacgatgacaaaagctggctctacctgctgctgttctctctgctgtttttcgctgtgacgttggtcctttctctgcgaccgggcaagatcctcacttatgtgggcaaggtcctgactccctgcttcctggtgttcctggcgattatggtgttcgtgacgatcctgcatcccaccaccagcatcggcgcggtggagcctcaaggtgcttatgccgcacaacccttcttcaccggctttctggagggctataacaccatggacgccctggcaagccttgccttcggtatcgtggtggtgcaggtgatccagggtttgggtgtggaaaaggcggaatccgtggccatgaccaccgtccgctccggtattcttagctgcctgctgatgggcgtgatctacctgctggtgacgctgatgggcgtctggagccgtggggcgctggaagccgctcccaacggcggcacggcgctggcacagatcgcccagcactatctgggcaaggcgggcttgttggtgctggctgccaccgtgacgctggcctgcctgaaaacggcggtgggccttatcaccagctgcgcggagaccttcgtggggatgttccccaagggcctgtcctatcggaattgggtgttcgtgttcacgggcatttccttcctgctggccaacgtgggcctgaccgccatcatcacctacgctgtgccggtgctgatgttcctgtatcccctggccatcaccttgatcctgctggcgctgctgggccacttctttgaccatgaccgggctgtgtacgcctgggtcaccggcctgactctggtggcggctttctacgatctgctgcggacgctgccggatcatctccgtgcggtgctccatgtgaatggcttggtcgacactgtgggcaaggcgctgccctttgccaccatcggcctgggctggatctgccccgcgatcctggggctggttattggcctgattttccgggccgtccgtccgaagaaggcataa

SEQ ID NO: 1154 - DNA, 1212 bp, Unknown
  Unknown gut bacteria
atgaaagatcagctcaaatgggtcctcaatcatatgccaaagagtgacgatcagcatctggatgtgatgtccctgcccaatgtggccaaggcccgctccttccacgggtccttcccccagtactccatcacccctctggcgcagctggacggtatggcacagtatctggggctggcgggtgtgtatgtgaaggatgagtcctaccggtttggtctcaacgccttcaaggtgctgggcggctccttcgccatggcccggtacatcgccggcgagatgggccgggacgtgtccgaaatgaattacaactacctgaccagcgaagccttccgtaaggaattcggtcaggccactttcttcaccgccaccgatggcaaccatggccgcggcgtggcttgggcagccaacaaactgggccagaagtctgtggtgcacatgcccaagggcagcagcaagtcccgctttgacaatatcgccaaggagggcgccaaggtcaccatcgaggaagtcaactacgatgactgtgtgcgtatggctgctgcagaagccgcacagacggaacacggcgtcatcgtgcaggataccgcctgggacggctacgaggagatcccctcctggatcatgcagggctacggcaccatggctaatgaggccgccgaccagcttcgtcagtgcagcgtaaaccgtcccacccacgtgttcgtccaggccggcgtcggctctctggccggtgcggtggtgggctacttcgcaaacctgttccccaacgatcctcccaagttcgtggtgatggaggccgaggcggctgactgcctgtatcagggcgcgctggccaatgacggcaagccccgcatcgtcaccggtgatctgaaaaccatcatggccggtctggcctgcggcgaacccaacacgatctcctgggacattctgcggaaccatgtgtccgccttcatctcctgccccgattgggtcagcgccaagggtatgcggatgctgagttcccccgtcaagggcgacccccgcgtggtgtccggcgaatccggcgccgtgggcatgggtgttctggacgccatcatgtgtgatgacacctacaaggaactgcgggacgctttggaactggaccggcacagccgggtgctcatgttctccactgagggcaacaccgatcccgaaaagtatcgccgggtggtgtgggatggcgagtatcccaccgac

SEQ ID NO: 1155 - DNA, 1287 bp, Unknown
  Unknown gut bacteria
atgaatcgatcatcctttgtaagcaagctgttcacgccggtcatcacccttctggtgctggcctatttcggctatcagatctacggctatgtaagcgaccccttttccaccaccctggcctacacctatcaggtggaggatacggtggacatcagcggctatgtggtccggcaggagcaggtgctcaccggcgatgccggcggccttatgcggctgcggaaaaacgagggcgagcgggtcggcaccggcggggccgtggccaccgtctacgccgatcaggcgtccttggaccggcagaacgagatcgaaacgctgaataaccgcatcgagcagctggaatacgctcaggaatccatgctgggcgcggaggtcacgctgaagctggacagccagatcgcccggtccctgctggattaccggaccgttgtggcggcgggacggctggacgcggcggagagccgggggcaggaactgcggtctctggtcctcaagcgggattatacctattccggcaccgaggatctcagtgggcagctgcaggaattgaaaaatcagttgaaaaccctgcggtctcaggctgctaactccgtaaagaccatccggtctccccggtccggtttgttttccgccgtggtggacggctacgaatccgttctgacgccggacagtttgtccgcgctgactcccagtgctctgaataagctgtcccctgccgagatccccgccaacaccggaaagctgatcctgggggacaactggtattatgtgggcgtggtttccgcacaggaggcccagacccttcagacccgccagaaccgtctgggaaccggagagagcctgtccctccggtttaccaagaatgtagaccgggacctgtcggtcacgctgttgtccgtgggcgcggaggaaaacggccgctgtgtggtgactttccaggggaatacatatttgcaggaactgacgctcctgcgccgccagagcgccgagatcattctggataccaccgatggactgcgggtccctctggctgcgctgcgtgtggccacccagaccgttacggaaaaggacccggaaaccgaggagactgccagcaaggaggtcaatgtcaccggtgtttactgcgtctccggcgcaaaggcccggttcaagccggtagaggtgctgctcaccggtgacgattacgctgtggtccggtctgccggctccacggagaagctgcggctgcggcccggtgacgagatcatcgttgccgcacgggatctgtatgacggaaaagttgtttcataa

SEQ ID NO: 1156 - DNA, 1920 bp, Unknown
  Unknown gut bacteria
atggcagatcagactcaactgtaccacagcggcagcttgacggacggctggcggctcttcggcgcacaccctgccacagagggagacgtccacggctggtggttcaacgtttgggcgcctcatgcaaaggctgtttccgtagttggagattttaacggctgggacctgaccgttgatccacttacccaaaagggcgaattctggcagggattccttccggacctgcccgtctataccagctataagtatgccattaccggcgaagacggcagagttcactacaaggcggacccctacgggttccatacggagacccgccccggcaccgccagcaagctctatgacattgagcatttttcctggacggatgaggacttccgccgcaataagcagccggtgtaccatcagccgctgaatatttacgaggtccatctcggctcgtggcgggagcatgtaaacggcgagttcctgaattaccgggatatggcccggcagctggcggcttatgtgaaggagatgggctacaccgccgtggagctgctgccggtgacggagcatcctctggatgattcctggggttaccagtgcaccggatactttgcgcctacctcccgattcggtacgccggaggatttcatgtggtttgtaaaccaccttcacgaaaacaacattccggtgattttggactgggtccccgcgcacttctgcaaggatgagcagggcctttacgagtttgacggtacctgctgttatgaatatgccgatccccggaaacgggaacacgccggctggggtacccgggtctttgactacgggcggccggaggtggtgagcttcctcctctcctctgcccggttctggctggaaatgtaccacatcgatggtatccgggtggacgccgtggcctccatgctgtatctggattacgggcggcaggacggccagtggacccccaacatccacggcgggcgggaaaacctggaagcggtggaatttctccggaagctgaacaccatggcctttgaggtggatcccaacgtgctgatgatcgctgaggaatctaccgcctggcctctggtgaccaagcccgccgacgtcggcggacttggattcaatctgaagtggaacatgggctggatgaatgacatgtgccactatctgaagctggacccctggttccggcaggaccaccaccgggatctgaccttctccatgatgtacgcgttttccgagaattatgtccttcccatctcccatgacgaggtggtccacatgaagggcagcgtggtggggaaaatgcccggagactacgaaaaccagctccgctgcacccggggcttttatgcgtacctgctggcccatccgggcaagaagctgctgttcatgggaccggagatcggccagtggcacgaatgggactccaacggtcagttggactggtacttattggagcatgaggaaaatcagcagctccatgcgttcttcaaggctgccaacgccttctacaaggcggagagtgccctgtgggacattgattttgactggcagggctttgagtggctggtaccggatgacaatcacaacaacgtggtggtgttcctccggcgggatcaggcagggaacgagctgctgtgcgcggtgaacttctccccaaacgattatgaaaactaccgggtaggcgtaccgccccgcaagcggtatgtccccgcctttaccaccgacgcgccggaattcggcggcagcgggtttgcggatacgaagccgctgacggtaaaggacacgccctcccacggaaaagaacagtctgtcactctccggctccccgcgttcggggcggtattcctccggggagagggcagttttacaaagcgcggttcggcaaccaaggtgaaaaaagtgaaaaataggaaaaggagctga

SEQ ID NO: 1157 - DNA, 1503 bp, Unknown
  Unknown gut bacteria
atgagcgagtatgtcgtcgaactgaaacatattaccaaacgttttcctggtgttgtcgcgttaaaagatatgtctatcggcatcagacccggtgagatccacggtctgatcggagaaaacggcgcaggtaaatccaccttgatcaaggtgctcaccggcgttcacactccggaagaaggggaaatctttgtggacggccagaaggtcgttttcaaaaaccctgttcagtcccgcgaggcaggcatcgcctgtgtgtatcaggagctgaacatcgtcaagcagctgcctgtcacggataacgtttttatggggcgtgccgttaagaagggattgctgctggattatccccggatgcacgccgaggcggaagaagcgctgaaaacactgggacatccggagatcaacgtccatctggagtgcggtaagctgggcgtgggtcagcagcagatggtggagatcgccaaggctgtgtccctggatgccaagctcattattatggatgagcccacttcttctttgggtaaggaagagatcgagcagctgatggagaccgtccggggcctgaaggccaagggcgtggccatcctgttcgtgtcacataaactggaagagctctttgagctctgcgaccgtgtgaccgtcatgcgtgacggcgagcacatcatcaccgaggataccgtgaacctcacggaggactccctcatcaacgccatggtgggccgtactctggataacctgtatcccaaggaattcggcaccaagggcgaggtgtggctggaggccaagggcctcaacgaggccggcgtcctgcatgatgtcagctttaaggcccatgcgggccagatcaccggctttgcgggcctcgtcggcgcaggccgcacggagaccatgcgggcggtgttcggcgctgacaagctggacagcggcgagatctacgtcaagggcgagaaggtacatatcagaacgccgaaggacgctatcaagagaaagatcgccttcctgacagaggaccgtaagggtcagggcctggtgctcaacctggatgtgcggaccaatctggtcctggccaatatgaagggcttctccgacggtcccttcctgaataaggatcgcattgagcaggcgggcaatgacaatgtcagcgccctgaagatcaagaccccctccctgaatgaggtcgtcggccagctgtccggcggcaaccagcagaaggtggttatcggtaagtgggtcaataccgacgccgacatctttattttcgatgagcccacccgtggtatcgacgtgggcgccaagattgaggtttaccgggtcatgaacgatctggtgaaggccggcaagtgcgtcatcatggtctcctccgagctgccggagatcctggctatgagcgaccatgtggtagttatgcgcggcggccgtgtgatggctgatattgaccgggacacgccgcacttcaattccgaagacatcatgaaagcggcctggggaggagaattagactga

SEQ ID NO: 1158 - DNA, 1929 bp, Unknown
  Unknown gut bacteria
atggccattgtcaaaatgaaaaagctccatgttattgcaatggcagatcgcagggaagaacttctgaaaggactgctgcacctgggctgtgtggagatcagcgaacccggggaggtccttgcggacccccaatgggcgtcgctgtttcagcggagcggctcgtctctcgccgagcgtaagggaaagctagccgacgtcaacacagcgctggacgccatcaaacagtacgccaaactgaaggacggcatgttcatcaaacgccatcccatcacggaagcggaattcctggatgccggcgctgcggaaaaggctcaggcagcctgtgacgcggtgcgggagcagttggggatcctgaccaaggcccagagcgaggctggacggctggagagccgcgctgccgccctgaagccgtgggaatcgctggaccttccgctggagcgatccggcaccgctcacaccattttccgcttgggggtctgccccggtcagacggatgtgggcgccatccgcgttcagatggaagcggagggcctggcggcggagctgtatgagatcagcgccgacaaattacagaagtatctgcttgtgatcgtccaccgcggcgatgaggagaaaacacaggagctgctgcggcccttcggcttcagcgcggtgactttccagggaatgaccgggacggcggcggagaatatccgttctctggaacgggatctggaggcaaacaaaaagacgcaggatgacgccgctgccgccatcgcggccagtgcggaaaaccgggacgcccttcggatctacgccgaccggctccgggccgaggcagccaaggagcagtgcgccgagagtgtcctgacggatgaaacggtgctgtatttccagggctgggtcccggcggagcaggaaaaggccgtaggcgcgttcctgacggaaaagggctgcgcttgggaaacgctggaccccacggaggaggaaatccccgacgtgccggtgcagttgaaaaacaactggctcacgaaacctttgaacatggtgacggagatgtactccctccccagatacgacaatgtggaccccaaccccctgatggcaccgtttttcatcctgttctacggtatcatgatggcggatatgggctacggcctgctgatgttcctggcgggattcctcatcagcaaaaagtacgcgcccaagggcacggcggggaacctgttcggactgatgaccctctgcggcatcagcacctttatcatgggcgctctcaccggcggcttcttcggagacttcctgacccaggtggtcaagctccccaccgtcggcgatttcactttaccggctctgttcacgcccttggatgataccctgatgatcctcatcggagccatggcacttggcatggtgcagatcatcaccggtatggccatcagcttcgtgcggaagctgaaaaacggtcaggtgatggacgctgtatgggaagagctgacctggtgggtcgtgtttgccgggatcggccttatggccgctggcatgaccaacgtggtcctctatgttggccttgccatggtggtccttggaccggtgctgaccaacaagggcttcggcaaaattaccgggatcttcggttctctgtacaatcacatcaccgggtatttcggagacatcctctcttactcccgtctgatggccctgatgctggcgggcagcgtcattgcgcaggtgttcaacaccctgggcgccattcccggcaacatcatcgtgttcctcatcatctcgctggcaggcaatgccctgaacttcgccctgaacctgctgggctgctacgtccatgacctgcgtctccagtgcctggagtacttcggcaagttctacgaggacggcggcaagcccttcaagcccctgatggcggacaccaaatacgttgacattacaaaataa

SEQ ID NO: 1159 - DNA, 1782 bp, Unknown
  Unknown gut bacteria
ttgcggcagtttctgctggaaaacgtgtcgaaaacaggcggacacttttcctccaacctgggcgttgtggagctgacggtggcgatccaccgggtctttgacaccgcccatgaccgccttgtgttcgacgtggggcatcaggcctacgtccacaaggccctcaccggccgtcaggcgctgttttccacactgcggcagctggacggcctctccgggttccccaagccccacgaaagcgtccatgacgccttcatcgcgggccacgcctccaactccgtttccgtggcgttgggcatggcgagggcaaggaccttgcagcaccaggattatcaggtcatggcgctgatcggtgacggcgccctcaccggcggactggcctacgagggtctgaacaacgttggggcctccggtgagcatatgatcgttcttctgaacgacaacggcatgtccatcgaccccaatgtgggggctttgccgaatcatctttccaagctgcgcagcaaacctgcctactaccactttaagaaatggtatcggggcctctttggagagtctccctcccagtccgccatctatcgctttaaccatcggctgaaaaccagcctgaaaaagacactgtggccgggaagcactctctttgaggatatgggcttcacctatctgggccccatcgacggccatgacctgccccgcctgtgcgatatgctgacatgggccaaggagcttaccggccccgtggtggtccatgtccatacccagaagggtaagggatacgccttcgcggagcgggaccccggcaagttccacgggatcgcgccctttgatccggaaaccggacttttgaaaaaagcacccggagagaccttttcctccgtattcggcaagaccctcagcgattgcgccggggaggacagccgcatctgtgctatcaccgccgccatggaggagggcaccggcctgacggtattcgagcaggcccacccggagcgattcttcgatgtgggcattgcggagggtcacggcgtttccatggctgccggtatggccaagcaggggatgatccctgttttcgccgtgtactccacctttttgcagcggagctacgatatgctggtccacgatgtggctctgcaaaagcttcatgttgtccttggcgtggaccgggccggtctggtgggcgctgacggcgagacccaccacggctgtctggatgtttcctatctcaccagtattccggggttcacggtcctgtgccccgccagctttgcggaactgcggaccatgcttcatcaggcgctgtttgagatcgacggcccggtggcgatccggtatcccagagggggagagggcgtttttaacgcggacaccagcactcaggccgcagtgcgcatgagggacggctgtcaggcagtcctgatcacttacggaacgctggtggagcaggccctgtccgccgcggaggagctggaacgatccgggatctccacccgcgtggtgaaactcaaccgcatcgcccctctggacacggcggcggtcctccgggagacagagggagccaagacagtcctgattttggaggactgttttgaaaacggcagcgtgggccagcagctggctgcggccatggaagaggccgggcagagctgttctcacacgatcttgcaaaatctgaaggatcactttgccccggagggcacggtggatcaactgcggcatcggttcggccttgacgctgacggtgtggtaaaaacggtaaaggaggccatgtcctgtgagcaataa

SEQ ID NO: 1160 - DNA, 1284 bp, Unknown
  Unknown gut bacteria
atgaaaacctacaactttaaatatggacatgggtctgtgtccctttccctgaacgaagcggatattctggcggagctgcatggaacagagacgccgcccatcagcgacatccgttctgccctgttcgcctcgctggagcaacccatcgacagcgcgcctctgcgccagcgggtccgccccggagatcaggtggcgctggtgatcagtgacatgacccgattctggatgcggcaggatctggtgatcccccatctcgttgattatctcatcgacgaatgcggcgtacagccggagcatctgaccatcgtggtggccaacggcactcacatcggcggcgatgagcaggaactgcggacactggtcaccgacggggtctataaccgggtccgtgtgaagaatcacgactgcgaggccaaggatcttgcctatctgggcactacgccccatgagacaccggtgtggatcgaccgcactgccgcagaagcggatctggtggtctgtttaggcgccgccacccatcatgtgatggctggcttcggcggcggacggaagagcatcctccccggcatcagcggcttggagaccatccgccacaaccacgcctattcgctggacagcaccaagctccgcaccaatcccgccatcggaaacggtgtgttggcgggaaacccgctgcacgaggatatgtgcgaggcggcatcactggtgaacaacctcttcatggtaaatctggtgatgaacgccgacatgaagctctcgtatatcttctccggccactacctgacctcctgggagcgggcctgtactgccgtggatgacatttaccgggtggatattccctgccgggcagacgccgtggtcaccagctgcggcggctttcccaaggacatctccctctatcagggcaccaagaccattgacaatgtggaatccgcgttgaagcccggcggtacgctggttctgatgatcgaagcgccggagggcggcggccccgccgagtacttcgactggagcaagaatttacaggacggcaccattgagcagcgtctgcgggaggccttcaccgtggcgggctacatcttcttcctgaactgtgagcaggcccagcggtaccgcattttcatgtattcctccattgatccccagaccgttgcccccatgggcattcacgccttttccgatatggacgccttactgaaagccgcggaactggacggaaaatccacctatatcattcccaacgggtccaccgtgatcccccgggtgaaaggagaaacgctatga

SEQ ID NO: 1161 - DNA, 1569 bp, Unknown
  Unknown gut bacteria
atgtctgaatctaagcgcggcggcgcacaactggcgcgggccgtggaaaaagcgtatcaggcggggcaggatgactaccatctggaacccatggtcctggtggagaacggcaagcctgtaggcaagatcggagacggcgatgccgccgtgttctgctgccgccgcggtgagcgggagatcgagctgacggagctgttcaccgatccggacttcaacaaggtgcagcggaaccagctgaaggatctggatttcgtcatcatgaccatgtatcatgacaaattcaaggatctgcccatcgcctttgcgccgtctcatgtggtgaagcctctggctcaggtcctcagcgaggcggggaagaatcagttccactgcgcggagagcgagaagtatgcccatgtgacctttttcttcaacggcggcgagaacgcgcccttccccggcgaggatgacgtgtgcgtgccgtcccccaagggcattgactttgaccagaagccggagctgagcctgcctgccgtggcggatcaggtcatgggcgctttgggcaaatacgatttcgtggtgaccaacttcgccaacggcgatgtgatcggccacaccctgaataccgctgccaagctggaagcctgcaagcatgtcagtcactatctggatgtggtggtccatgacgcgctggccaagggctatgtggtggccgtcaccgcagaccacggcaacattgaaaagctgtacaccgccgcaggcaagcctgacggcgcccacaccaccaatctggtgcctttcattctgatggaccccgcccacagcggccccattgccctgcgggacggctgtctgggtgacgtggcgcctacggtgctgaatgtcatgggtatcccccagcctgcggagatgaccggcaaatctctggcggagggacacgatttcggcaaggaccggaagatgctgctcatcatctgcgatggttgggggctcggctccggcgatgacggcgacgcgatccatctggcggataccccctactgggattccctgctggcggagcagtcctggagcaagctccacgcctccggcgagcatgtgggcctgggaagcggaaaggccggcaactccgaggcaggccactccaatctgggcgcaggccgctgcgtcatgcaggatgacgtccgtctggacgccgctgtgaaggacggcagcttcaagaagaaccccatcttcctgcaggccatcgaacacgccaaaaagaacggcacggcgctgcatctgctggcgtatctcacttataaatcctctcacggctgcatcgactacccgttggccatctgcgagatggcccgggatgccggactgaatcaggtattcttccacatcatctttgacggccgctccacggaacccggctccgcacccaagctgctggcagagctggacgaaaagctggatgccatcggcgtgggccgcattgtggacggtgtgggccgcggcgtggcgctagaccgggacaagaactatgacaaggtgaaacgggcctatgacgccatggtggacggcgcaggtacccggtatgagtaa

SEQ ID NO: 1162 - DNA, 1563 bp, Unknown
  Unknown gut bacteria
atgagcgcatcaagagaaaaaaagctccggcaggatcagacggcctccggctatgtggatcccaaggcagaaaaggagctggaagaaaagaaggctgaaaagcgcagcaacgttctgtacagcgtcatcgccgtactgttcgtgctggtggtggcagccagcttcctctggagatccaatgtgatctcccgcaacgccacggccctgaccattgacggtgaaaagtacagtgccgccgaggtgaatttctattatcagaatgtttaccgcggcttcctgcagagcaattcctacttcatcagctatctgggtctggacaccaacgcctccctgaagagccagacggtgaacgccaccgccgcttccatgatgggcgtagaggaaggttcctcttggcatgattatatcatggacaacactgtcaagcagatgaccatggtccagcggggtctgaagcaggcacaggaggaaggctatcagttccccgccagcgtgcaggagcagtatgaggactccctgaattccctgaagacctctgcggaatccaccggcatgtccgtgaaggcatatctccagagaaatctgggtgccatcatgacggagaaggtctacaaccagcaggtcctgcggatgctgcagtatcaggcatacgcccagagctattccgacagcctgacctacaccgacgcggagctggaagccgcctatcaggcagatcccaagacctatgacaaggccgcctgggagtatgtggtcgtcagcggcgctgccgattccaccacggatgccgacggcaacaccgttcaggccaccgatgaggagcaggctgctgccaaggagaccgccaaggccaccgcagaagagatcctggccgcttacaacagcggaaagtctctggaatccattgccggcaattatgaaaaggccacctattacaacaccaccgacgccacttattatgacggcgttgtgggtaactggctctttgacgatgcccgcaaggacggtgacacggagattctggaagttggaaccaactattacgtcggtctgttccacagccgcggccgcgaggaatacaagaccgtggacatccgtcacatcctcatcacccccgaaaccggcaccaaggctcagggcgacgagggctatgaggacgagcagacccagctgaaggccgccgcccgcaccaaggccgaggaaattctggcccagtggaagtccggcgaggccaccgaggattccttcgcccagctggctctggaaaattccgccgacggctccaagtatgacggcggtctctacacccgcgtcaccaagggctgggccgtggaggagttcaatgactggtgcttcgacgcttcccgcaaggatggtgacaccggtatcgtggacaccacctacggttctcatgtgatgtacttcgtgggctacgatctgcccgcttgggcggcatccgtcacctccgatctgcaggagaaggccgcttccgagtggagcaccgccctgtccgaaaacgccgatgtgcagcagagcgacttcggcatgaagtttgtgggttaa

SEQ ID NO: 1163 - DNA, 1605 bp, Unknown
  Unknown gut bacteria
atgacgaaatacatttttgtgaccggcggcgtggtatccgggttggggaagggcattaccgcggcgtctctgggccgccttttaaagacaagagggctgaaggtggccgctcagaagctggacccctacatcaatgtggaccccggcaccatgagcccctatcagcacggcgaggtctacgtcaccgaggacggcgcggaaacggatctggatctgggtcactatgagcggttcatcgacgaggatctgaacaaatactccaacctcaccaccggtaaggtgtactggaacgttctgaacaaggagcgccggggggagtatctgggctccaccgtgcaggtgatcccccacatcaccaatgagatcaaggaatttgtctatcgggtgggtaagcagacggacgccgacgtggtcatcaccgagatcggcggcaccatcggcgatattgagtcccagcccttcctggaggctgtccagcagatctctctggaggtgggccgggagaacagcctctttatccatgtgacgttggtgcccttcctccggggctccgatgagcacaagtccaagcccacccagcattccgtcaaggagcttcagggcatggggatcaatcccaacctcatcgtcctccggtgcgacgagccgctggagccttctattttccagaaaatctccatgttctgcaatgtaaagcccgactgcgtcattgagaacattacgctgccctgcctgtatgaggcgccgctgatgctggagcagtcccacttttcctctgtggtctgccgggagttgggcatcgacgccccggccccggagctgacggagtgggaacacatggtggagcggatcaaacatgcggacagacgtgtgaccatcggtctggtgggcaaatacgttcagcttcatgacgcctatctctccgtggcagaggcactgcgccatgcgggctatgctctgggggctgaggtggacatccgctggatcgactccgagaccattacggaaagcgatgcggaggcggttttgggcgcgttggacggcatcatcgtccccggcggcttcggccagcgggggatcaacggcatgatcctgacggcgaaatacgcccgggagcatcgggtaccctatttcggcatctgcctgggaatgcagatcgctgtgatcgaatatgcccgccacgccgccgggatcgccgacgcggattccggcgagttcaacgagctgtgcgaaaacaaggtcatcgacttcatgccgggacagagcgacgagatcgacaagggcggcacgcttcggctgggggcttatccctgcgtgatccggcccggcaccaccatggagcggtgctacggcacgctggagatctctgaacgtcaccgccaccgctacgaattcaacaacgactaccgggaggccctcacctccgcgggactggtcctctccgggctgtcccccgatggacggctggtggagacggtggagctgacggaccagccgttctttgtgggcgttcagtatcacccggaattcaagtcccgccccaaccatgctcatccgctgttcaagggctttgtccaggcggcgctggagcgcgaaaacgcataa

SEQ ID NO: 1164 - DNA, 2550 bp, Unknown
  Unknown gut bacteria
atgacggtctttaccctggtcctgatcggcgtctgcacaacgctcatgctgctggggattttcatgaagtatgtgaatacatctctgctgccgacgctggaggtccgggcggaggactacaccatgtcccagagctccgtggtctattatcaggacaaggagagcggtcagtgggtggagttccagaaggtccacgggcaggagaaccgtgtcctgatcgacatcgacgatatgtctccctacctgtggcaggcggcggtgtccattgaggacgagcgctttttcagccatcacggcgtggactggaagcggaccctgggcgctacgctgctgaccctcaccggcagcaacgatagctacggcggttccaccatcacccagcagatgctgaaaaacatgaccggtgagaatcagaataccatcaaccgcaaggtcaaggagatcttccgggcgttggaatttgaaaaggacaacacgaaaagccagattctggagctgtacctgaatatgatctatttgggcagcggctgcggcggcgtggagacggcagcggaatactacttcggcaagtccgccaaggacctgacggcggcggagagcgcctgtatcatcgctatcaccaacaacccgtccctctacaaccccaagtatgaacggacctacacccggaaggacggcaccaccgtcactccccggcagttgaacaagaagcgccaggaactgatcctggacaagatgtctaaggtcatcaatcccgataccggcaagccctatctgacaaaagaggagtgcgaagccgctaaggcggagcctttgaacttcacagatacctccggagacgccagcgagctggtcaagaccgacggtatcgagatcaacaactggttcgtggagcagctcatcaaggacgtgaccacagatctggcccaggccaagagcatttcttatgaagcggcccagcggctggtgaacaacagcggctatcagatctattgcaccatggacccggatatccagaagatcgcggaggatgtctacgcagatctgagcaatttgaatgtacactctgccaagggccaccaactgcaatccggtatcaccatcatggacccctataccggcaacatcgtgggtatggtgggcgccatgggccccaagacccagaatctggtggacaactatgcggtccagaagcatcaggttggttcttctatcaagccgctgactgtgtattccgcagcgctggacgccggtgctgtgacaccggccaccacctttgataactaccccgtagagcttatgaacgattctccatggcctaagaactctcccaatacctacactggctggaccatgatcggcgagggcgtccggcgttccatcaacaccatcgccgttcagaccgtggaggcgctgggtgtggcggagtcctacgcttacgccacggagaagctgggcctcagcctggtgccggaggatatggccgtttccccgctggccatgggcggtctgacctatggcctgagcactgtggagatggcggcggccttctctgcctttgccaacagcggcgtttacaattcgcccaagatgtataccgaggtccgggacagcaacggtgagaccgtgctgaaaaacgagggcgagacccatgtggccatgaaggagaccacggcctacttcatgaaccagatgcttaccagcgtggtgaacgccggtaccggtacctccgccaagttcagcggcatgaccatcgcgggcaagaccggtaccacggataactccaagacccgctatttcgtgggctataccccctattactgcgccgccgtgtggacgggctatcccaagaccaatgagaagatctccgcctccggcaacccggccattaccatgtggaagccggtcatgcagaagatccacgagcatctggagaataagagctttacaaagcctgccagcggcttggagcaggtgacggtctgcgccgacagcggcctgcgctgcaccgatgcctgtctctccgacatccggggcagccgggcggttcaggtcacgggggcggcaggcacggctcccacggagaactgcaatctccacacctttgtggattactgcaccgagggcaagtgccttgcaacggacagctgcccctcctccagcgtcaagcaggtggcggtgctggactttgaacggacggaatacttccgggagggcgtccgcattggctccatcactaccgacagtgccaaaaatcccgacagcatgttccatctcattgagatgaagcgggccatcggtctggaacccacgcctacggcaagtggcggagagacctacccggaggtcatcggctgtccggcccatgccggcatgacgccggtggacccggatcaccccggcggtggcgttgatgatcccaatgatcccaactccagcccgtcggtcgacgatcccagcggcggcttcggggacgcgaacctgcccgaggaccccaccggcggcatcgtgatcccgtcggagcctccggccccggaggaccccagcggc

SEQ ID NO: 1165 - DNA, 1557 bp, Unknown
  Unknown gut bacteria
atgaaaaaagtacgtgtcattaccgctgaggaagcggccctgatggtcaaggacggcgacaccgtctccaccggcggcttcgttagctgcgcctgccccgaggcgctgaccaaggctctggaaaaccgtttcgtggaaaccggccatccccgcgacctgactctgttctttgcagccggtcagggccaccgggacggcaccggcggcgaccacttcggccacgagggtatgtgcaagcgggtagtcggcggtcactgggaccgcgccgccaagctgggcgagttggctctggccaacaagctggaggcctataacttgcctcagggcgtcatcacccacatgtaccgcgatatcgccgcccacaacatcggcaccatcacccacgttggcctgaacaccttcgtagacccccgtcacgagggtggcaagctcaacgagtgcaccaaggaagacctggtgaagctggtgaacattgacggtgaggagcgcctgctctacaagcccatccccatcaatgtgtgcctggtccgcggctcctacgccgatgaatacggcaactgcaccgtccaccgcgagatcggccctctggacgtcaccgcccagtgccaggccaccaagaactccggcggtatcgtcattgttcaggtggagaagatcgtccagggcggcaccctggacccccgcctggtgaagatccccggcatctatgtggatgccatcgtggtgggctctcccgaggacaacaaccagtgcctgggcatgccctatgacggagctctctccggtgagttccgcatccccgtggacgatatcccccccatccccatggacgccaagaagatcatcgcccgccgcgccgctatggagctgcctcaggacgccatcgtgaacctgggcaccggcgctcccgagaagattgccaacgtctgcgctgaggagggcatctccaacaagatgactctgaccgtggaagccggctccatcgccggtgtgccctacggcggcacccagttcggcggcgcagcaaactccatggccattctggaccacaacgtccagttcgatttctatcagggcggcggcctggacgtggccttcctgggcctggccgagaccgctcccaacggcgacctgaacgtctccaagttcggcacccgtctggccggcgccggcggcttcatcgatatcacccagaacgccaagaaggtcgtttactgcggcacctttaccgccaagggcctcaagaccgagtgcaaggacggcaagctggtcatcacccaggagggtgccaagaagaagttcgtcaacaaggtagagcagatcaccttctccggcgattacgccaacaaggtgcaccagcccgttctgtacatcaccgagcgcgccgtgttcgagctgcggcccgagggcgtgacgctggtggagatcgcccccggcattgacctccagactcaggttctggatcagatggagttcatgcccaaaatcgccgatgacctgaagctcatggatgagcgcatcttccgtgaggaactgatgggtctggctaacgactaa

SEQ ID NO: 1166 - DNA, 1257 bp, Unknown
  Unknown gut bacteria
atgcgtaagacacagaatccgcggaatatcctgtatctggtcctatccatcgtgatcgccgccggtatctggtactatgtggacgaattcaacggccgggtggtgacccagaccgttacggggatccccattgagtatatcaatcaggacgcactggcagacaatgggctgatgctggcggaaggcgaggacagcggtaccagcaccaccatcgacatcacctttaagggaaaccggcggcacattgttcagctggatcgttccaagatccgggtaacggccaatctggccagtatcacggaggccggcgtccagagcgtgaagccggatctgacctatacggaccggaaattcaactccggcaatacctcggtagaggagcagagcctctatatggccacggtcaatatctgcgaactgagccataaggaagtggagctgcgctgcgagctcaccggcaatgtggcggagggctattccgccggtaaggtccagctttctcagaccagcatcgccgtccggggccaggaagaggaaattgccaaggtcagctatgccaaggtgatttttgacatcggcaagaataccaaggagaccgtcacggcggatctggattatcagttctatgatgaggacggccaggtgctgaacctctccggcatccatgccgaggcgggtcagatccaggcgactctgccggtgtacgtcaccaaggagctgaagctgacggtggacttcaaggaagctcccggcgcacagctggcggacatgatctgggccatcaagccggagagcgttgtggtttccggtgacgcctctgttctgaacgatatggattccattgtgctggacagctttgatctgctcagcgtgaccacggaaagcaccagccacagctacgccattctggtgccggacggctgcgagaatctcagcggcgtgacccgggccacactggagatcggctatccggataagacggtggcggatgtgaccactcacaacatccgggtggaaaacgcctcggccagccggaacgtggagcttctgacacaggaactctccgtgcggatcttcggcacagcggcggagatggagggcatcaccggtgaagatgtggcggtggtggcggatctcagcgattacgcggtggcctccggcacctatatgatcccggctcaggtccgggtgggagacggaaagaccatcggcgtttccgggacctatcagattcaggtccgtattcccgaatcctga

SEQ ID NO: 1167 - DNA, 711 bp, Unknown
  Unknown gut bacteria
atgaagctgcctctgatcgattaccgtcagttccgtctgagccggctgaataccccgcagttccggcatctgaagctgctgctgttctggccgattttcagtctggtattctgttatctggaaaactaccgccctgccgtctactacgcccccatgcgctgtgcgctggatcattggatccccttctgcaagtggttcgtcatcccctacgcgttctggtttctctttgtaggagggatgctgctctacaccttattttataacattcccgctttccggcggatgatgtggttcatcatcctgacgtactcctttgctctggtgacctaccttctcttccccaactgccagcatctgcggcccacactgctgggcggcgacctgctgacgcggttcaccgcaaagctgtacgccgcagacaccaacaccaacgtctgcccttctattcacgtcatcggctcctttgcggtgtacttcgctgcccgggacatccggcgcttccgcgccaagggctggcggctgggctttctgaccatggccgtgctcatcagcctgtctaccgtattcctcaagcagcactccgttctggatgtgctggcggggctggctgtctgcgccgcagcctatcccctgatctatcgggtacctgccggagccgcttctctgatccctgccggaagtcttggccgaaagcggtccccggagctgtaa

SEQ ID NO: 1168 - DNA, 1005 bp, Unknown
  Unknown gut bacteria
atgaaagcagttgtagttggcagcggcggctggggcacggccctgagcatggtgctctgcgacaacggacatgatgtgaccttgtggtcccatgacccggcgaaggctgcggagatggcaaagacccgggagaattccaagctgaagggcgtccggctgccggacagcctgaagatcagcggagatctggactgcctgaagggggcagaactggtgatctccgccacgccgtctttcgccgtgcgggagacgggaaagaagatcgccccatacctgacaccggagaccgttctggtcagtgtttccaagggcatcgagcgggatacgaacctccgcatgagccagattttgacggaagtcaccgggaacatctgtaaagtagctgccctttccggtccctctcacgcagaggaagtaagcattcggatgcccaccggctgcgtgtccgcctgtccggatctgaaagtggcccggctggtacaggacgctttcatgaatgactatttccgggtctataccagtgaggatatcgtgggcgtggagctgtccgccgccatgaaaaacgtagtggctctggcctgcggcgtatgtgacggcatgggctatcaggataatacaaaggctttgctgatgacccgcgccatggcggaactgacgcgccttggcgaaaagctgggcggcacccggcagaccttcggcggtctggcaggtatgggcgatctgatcgtcacctgcacctccatgcactcccggaaccgccgggcgggcattctgatcggacagggaaagtccgcacaggaggccatggcggaggtgggcgccgtggtggagggctattacgccgcggaaagcatctaccagctctctcagcgggagggtgtggaaatgcccctttgccgcagcgtctacgaggtcctttatcatggcgtggccgtgcaggatgtggtgagcagcctcatgcgccgggccaaaaaggacgaactgacagagaccacctggctgtaa

SEQ ID NO: 1169 - DNA, 2574 bp, Unknown
  Unknown gut bacteria
atgtacgatctgcattccatcttgatccaactgaaaaaagaggacacaccgctccatggcgtcatggtgcggtgtgtccgttgtttttatcagtggctggaccccaccgtgtgggaaggttcagcgctgtttgagctgtgggcgcaggaattggagctgatctacggtgatctgcgccaacggctctctcccaatgcaaaaaccgacgccgggtccttgggtgatcggtttggttttgacacaccgccggaattgccccggctcctgcaaagcatccagaccttttacagtgtgctcatcaagctcatcgcctggaacaccctccggggtgcgacccccgaaccgcctctgacggagcttctctccggcagggcctttgttaaccggggtatccgcaatttctgcggggatgactggtatatctggccgctggacgtctgggacccggcactggaaacccagtgtgaggaattgcgggcctgtctggatgcctttgacacctgtccggaaggcagcaccctttccccggacagtctcagccgcatctacgaaaccgtggtccccccggcccttcgccatgccttgggggaatactacacccccggctggctggcggaacggaccctgcaaaatgccgtcagcgccagcggacggcaggccggagatttgcgctttctggaccccgcctgcggctccggtgcctttttgatccaggctctccgcatgatccgggcggatacgccccaagaccctcccttatccgatcaggtggcaggcttcgacctccacccattggcagtcctgacgacgaaggtcaattatctggccgtcatggcccgccagccactgccggaagcggggctgtttcttcccatttaccgctatgacgctctgaatatccccatcctccggggggatacactggtgatcgacaccggctgtggtctggcatgtgatgttcccctgtccctctgccgtcaggcagtgaaaatgcaccccgatccggaggaatttctttccatgccggaagcacgcggtctgctcacctctctgcccccgaatgggcggcgtcttttggccggtattttgctgaaccgtatctgggcgttcttccatcaaaaggcagatatagtcatgggaaatcccccatgggtgaactgggagtacctgtccccccggtatcgggccgggtcccagcatttgtgggggaaatacggcctgttgcaggtaaaaggcccccggctcggtttttccaaggaggatgtgtctaccctgttcacctgcgccgcgttggaccgctttctcgtccccagtggacacctcagctttatcttgcggcaggccaccttccgctccgcccagaacggcgccggattccggcggtttcatctggacggccccagtctggattttcgggtgctggaggtggaagaccttggccgcatccggccctttgacgggatctgtacccctgttgcgctggtactcatccagcgggacgcccgccacgttttccctgtcccctaccggcactggcaggcaaagcccggcttccggcgggcggtccggtcaccggacgcgacgattgcctccgttcttccctttgtacggatggaggacatgaccgccgctcccgcccaccgggaggatcccggctccgtgtgggtcagtgctcccagtgggctgtccccggtgctggacgcccttttaggcagcaatccctatcaggctcggaccggtgtattcaccggcggggccaacgccgtctatcagcttcagattctggaacggacaggcaatgccctgcgggtcactaatctggcggaaaaggcccaccgcaaggcccccgccgttacggcggagctggagccaacctgcgtctatcccctcattcagggcagcgacctctcccagtggagcgtccgcagccgtgcttggctgctgtgcccccacacggctgaaaccaaaatctatcccctcgcggaagcggatttgcgacaggatctgccgctgacctacgcctacctggcccggttccgggatcttctggaaacccggaaaggcttcgccgggtgggaacgggccatccaagagcgttacttctacgcgctgctgcgggtgggaccctatacgttttcccgctacaaggtagcgtggcgctacatcgcccgctccttcatcacggcggtcatcgcaccgatgcaggacccctatctgggagaaacgctgcccctgcccaacgaaaaggtggtctatgtgggcactgactgccgggaggaggcctattatctctgcgggattctcagctccgctccggtgcgctgctgcgtcacctgctacatgaaccccaccagcatttccgctcatgtgctggacaagctgcatattccggcctttgaccccgcggacagccgtcatctgtccatcgccgctctctgcgaggagggccaccgagcctcagaccctcgctgtcaggacgccgtccggcagcagcttgaccgggctgtagccgcgctttacggcctcacttccgcggatctggacaccgtccggtccatgctggaaaagatttga

SEQ ID NO: 1170 - DNA, 777 bp, Unknown
  Unknown gut bacteria
atgctgttttccgaccgtccccgcacccactatgaaaaaacgctggcccacgaggtcatctgccagctgcgctttcccaccattctctccatcaacaatgtggagcctgccgattttcaggagcgtatccgggaggattttccccagtacgcccggaagcaggacgttctgcctccccagatcgtcaacggtaagccagagtctcagcctcccgtcaccaactaccacttcctctctcaggacggcagatggaagctgaatctcaccaaggacttcatcgccctgtccacgctgtcctaccccggctgggaggaatttgcccggatgctggataagcctctggcggcgttcatccagctctacaagcccgcctattttcagagggtgggtctgcggtatctcaacatcgtctcccgcaccaccctcgatctggaggatgtctcctggcgggaactgttcactccggcctatctgggccccatggcggaagctgatctggcggaggaccgggtcgtcaactgcgcctgcgacacgcagttcaagctggattccagctgcaccgccaagatccacgccggtatcggccgcttgaagaccaacattcccaacgcgcctcaggacccggaggggaagttcattttcgacatggaccgctccatgggcggcaacaccgcctgcggtctggccgccgccgcgctggaaaccctccacggtcactcctcccgggtattcgagggggccatcaccgaccgtctgcgagatgccatgggccggtaa

SEQ ID NO: 1171 - DNA, 891 bp, Unknown
  Unknown gut bacteria
atggcatcaaaaaagccctctggtctcggcagaggactcggcgccctcttaggcgacgatgtgatgaaaaccgagtccagcggcagtctgtcacttcccatttcacaggtggagacctgctcatcacagccccggaagcgctttgatgatgaatctctccaggaactggcggattccatttcacagcacggcatcattcagccgttaaccgtgcgaaagctgtcatccggctactatcagatcattgccggagaacgccgctggcgggcagcccggctggcgggcttacaggaggttccggtcatcgtgatcgaggccgatgcccgcaaggcggccgagctggccatgatcgaaaacctccagcgagaggacctgaatcccatggaggaagccgccggttttcagtcattgatcgaatcctaccacatgacgcaggaggaagccgcccagcgggtaggcaaatcccgcagcgccgtgaccaatgccctgcggctgctgggactgacgccctccgtccgaaagctggtggaggagggcaaactctccgccggtcacgcccgggctttggttcccctctccccttccctgcaggaaagcgcggccaacgccattgtcagcggcggactctccgtccggcagacagaggctctggtcaaacggctttccgccgagaagaaagaggcgcaggccaaggaccctgacgaggtggattatctggcagaggcccaaaatgagttgaaggcccggctgtgccgcggtgtgaagatcgttcccggccgcaaaaaaggtcggatcgagctggaatattacggcgtggacgatctgaacgacctgctggacgctttggctgtcatcaagatctcacaattaaagaaaggacctcaggcatga

SEQ ID NO: 1172 - DNA, 1089 bp, Unknown
  Unknown gut bacteria
atggaacagcgcgcctatcaaaaatggacccggggtctgcttttggggcttgtgcttgtgctgacggcctgcgccgccgtggtatacagggtggacccctgcttttactaccggatgcctacggaccgggagcctgttttcttcagtgaacgctaccagacggcgggtatcgtccgcaacaacccggcggacgtggtgctgcttggctcctccatgaccgccaactgctacggcagtcagcttgagactgttttcggcggcacgggcctgcggctcaccattcctgacggctatttcagtgaattcgatcaggtgatggggctgctgatgcggacccacccgcccaagcgggtgctgttcgccatggataccaatattttcacccggtctcctgacggtgttaccggtgcaatgcccgattatctctatgacgccagtaccatcaatgacgtgaaatacctgttgaataaggacgtgctctattacagcctctacgccctgatggcccagcgctgggacgagggcgaaacgctggacaagggattttcgtggatggataccgtctggtggaaccacatgaccgccttggaggaatatacccggccggacatcgcaccggagccgatgccccgggacggcctgctggcggacgccgccaaaaatctggcggtggcggcaagctgggcggagcggtacccggaggtggaatttgatttttacttttccccttacagcatcctctattgggacaagatcggccgcatgggagagacggacgccgtgtttgcggcgctggagctggcctgtgaaacgctgctgccctacgagaacgtcacccttcacggactgctgtttgaccgggatatcatcgagcacctggactactactgtgactacgttcaccactccgacgaggcgggggcgccggcgctggaaaagatccattccggtaccgatcggctgaccgagaaaaattatcgggaaactctcgccaactggcatgactttgtggtaaactacgactacgataaattctgggacgattactactggtatcagttccatacaccggcaggcgcaaagacctga

SEQ ID NO: 1173 - DNA, 1290 bp, Unknown
  Unknown gut bacteria
atgtcacataccgctgagatcattgccgtcggtacggaactgcttcttggaaatatcaccaacaccaacgccagcgagatctcacgggcgctgtctgctgttggcgtcaatgtgttctggcataccgtggtaggggacaacccggaacggctgcgggaggcgctggacatcgcccggaagcgggcggacgtcatcctcaccaccggcggccttggccccacctatgacgatcttaccaagcagaccgtctgcgagaccttcggcaagccgctggtcctgcgggaggatgtgctggagcatattcggacttattttgcccggaacgtccacctggtcatgccggaaaataaccgccagcaggcggagtttcccgccgattgcgtgatcttcgacaatccggtgggcaccgctcccggctgcgcctttgaagcggagggggtgcacgtgctgatgctgcccggtccgccctttgaaatgcggaccatgctgcaaaactgggcggtcccctatctgcggggactttccaaggaggtcattgtgtcccatgacattatgaccttcggccttggggaaagccctatggaggatctgatgcgggagcggatctcccggatggaaaatccatccctcgccacctacgccaagcccagcgaggtccggctccgcgctaccgccaaggcggacagcgcagcggcggcggaggccatgctggtcccggtggtaaaagaggtgacggattatttgggagacgtggtgtacggcgtggatatccctaatctggaaaccgtctgcatgacacacctgaaggaaaagggctggaccttcgccacggcggaaagctgcaccggcggccagatagccgcccggatcacggccctgtccggggcctccagtgtgtatcggggcggcgtggtgagctactggaccagcgtaaaggcagaggtgctgggggtgccccagacgcttttggaccaatacggcgccgtgtcggaggaatgtgcccgatccatggcggaaaatgcccggcggatcaccggagctgacattggcctgtccgtcaccggcgtggccggtccggacccggacgagcgtaacaacccggtgggactggtgtatgtgggtctggcgtcccccgatgggacgtggtgccggaagctggagttgggcaagcgccgccgggatcgcattcaggatctggctgccaaccacgcctacgatatgctgcgccgctgcctgactggactgccggtggagcaaagcggcaccggaaaacacatggaaaaactgtaa

SEQ ID NO: 1174 - DNA, 1260 bp, Unknown
  Unknown gut bacteria
atgaaatttacctcgacggaagcgacgccagcgccgcacgttccgccgggagtattgcggctcaccggagccgccaaggaggatatccccatgtatcgtattcaaaccatgaacaaaatttcccccgtaggtctgaaccgattcccctctgagctgtatgaagtcggggatgcggtacaggacccccagggaattttagtccgctccgccaagctgttggacttggaattcaaccccagtctgctggccattgcccgtgcgggcgtaggggtcaacaacattcctctggaccgctgcgcagcggcgggtatcccggtgttttccacccccggcgccaacgccaacgccgtgaaggaactggtgatctgcgccatgctgatgggctcccgggacattcccggtgccatccgctgggtccgggaacaggcagcctccggggtggatgtctccaccgtggtggaaaagggcaagtctgccttcatcggcccggagctttataaaaagactttgggcattatcggtctgggagccatcggctccatcgtggccaacaccgccatctctctgggcatggatgtgtacggctacgatccgtttttgtccgtggataccgctttgcggtgggaccgccacgttcatgtggtaaaggatatcaacgatctttataagcggtcggattacatcaccatgcacatccactatacggaaaagaccgcccacatgatcgacgccagcgccatcgccgccatgaagcggggcgggcgggtcatcaatctggcccggggcgagatcgtagacgatgaagccatgctgacggcgctggacaccggtatggtggccgcctacatcaccgacttccccaacaaccgtctcctgacggctccccacgtcatcgccatgccccatctgggggcttccaccccggaaagcgaacagaattgcgccgccatggcagtagatacactgcgggactatctggaaagcggcaacatccgctccagcgtgaatctgccggagatgaccatggaccgcagcggtgtccagcggctgtgcgtcctgcacaagaacgtccccggcatgctggcaaacatcaccagtctgtttggccgggacggcgtcaacgtggaaaatctgagcaacaagtcccgtggggattacgcctataccatggtggaccttggcagcaaggtgggtgacaacgtgatcgaggatgtgcgccgcacagccaacgtaatccgggtccggtccttggaatggtaa

SEQ ID NO: 1175 - DNA, 867 bp, Unknown
  Unknown gut bacteria
atgttaaaaacgaagaataagcatctgcggtatgtgatcacattttttgcggtcctgtgttcttcgctgctgcagacgtttgtgatcgaaagctttgtccattccgccggactgctttccggcggctttacgggcgttgctattttgatcgaccgggcggcatcgctttacggcgggtccatctccacctctctcgcactggtggcgctgaatctgccggtggcggtcctctgctaccgcagcatcagcccgagattcacgcttttttcccttctgcaagtaggcatgaccagcttattcctgaaatacttctctctgccgccgatttttgacgatattctgctcagcgcggtgttcggcggcttccttatgggcatcagcatcgtgctggccctgaagggaaacgcctccaccggcggcacggactttatcgcgctgtatgtctccaataagaccggaaaatccatctggtcctatgttttcgtgtttaacgcctgtattttgtgcatctttggctatctgttcggctggctgtacgcaggctactccatcctgtttcagtttatctccacaaagacggtggagaccttccatcaccgctacgaacggctgacgcttcagatcaccacccaaaaggcagaggagatcatggcggcctatgtgagcgggtgccggcacgggatgtcctgcgtgaaggcggtgggcggatacagccacaaggatatgagcgtcctgcacactgtgatctccagctacgaggagagcgacatcgtgcacctgatcttgcaggtggacccccatgcgatcatcaacgtgctccgcacggaaaacttctacggcggcttttaccgggccccgttggattga

SEQ ID NO: 1176 - DNA, 1365 bp, Unknown
  Unknown gut bacteria
atgacattgcaggtttcgcctcagaccaaacgggtctttcacctctcgctgcccatcttcgcagagcttctcttacagcttctggtgggcaatatggaccaattcatgatctcccacttcggctccgccgccgtggccgccatcggcaacggcaatcaggtgatgaacgtggtcatcatcgtgctcaccaccatgagcaccgccgccaccattctcctgacccagcacatcggcgcaggccgggtcggtaaggaatgcagcgagatcgtcaccgtggccgttacggtcagcgccgtattcagctttctggtgggcctgttcttgcttttagagccggaactggtctttcagctcctgcggacgccggaggacgcctttgacggtgcctgcctttacacccgcatcgtaggcggtacggtactgcttcaggggctgtatatccagctctgcgccgttctgcggagctacaccctgctgaaagaggtggtggtgctctccgtttccatgaaccttctgaatgtggcaggcaacgccattctgatcaacggcttcttcggcttcccgcaaatgggcgtggctggcgccgccgtatccaccgtgatctccaaggctgtgggcctgacgctggcctgcatcacgctgaaacgcaaatgcaccgtccgtttttccctgcaatatctgcaccccttccccgcaaagaccttccgcgccctgctgggcatcgccctgccctccggtacggaggccctgtcctacaacgtgtcccaaaccttcatcctccgcttcatcaatctgatgggtgcggcggtggtcagcgccaaggtctatggcagtatgctggccaacgtggcctatgtgtactccatcgccgtggggcaggccacccagatcattctgggctacatgatcggcagccggaagctggacgaggtcagcggccgtgtctggtccaccatccgcatcgctctggcggcctccgagctgctgacactgctgatcctcattttctgcgatcctatttacagcatcttcaccgatgatcctgtgatccacgcgctgggccggcagatcctttatgtggagttcggcctggagatcggacggtccatcaatatcgtcatgacccgctgcctcaccaccgccggcgatgtctggtaccctgtgggcgtgggcattttcagtatgtgggtcgtagccgtaggcggaagctggctgctgggacacgcgctgaactggggtcttgtgggcatctggatcgccatggcctgcgacgaatgtctccggggtgcgctgtttacgatccgtttccggagcggcaagtggaaggagacccgactggtgtctgattcaacgaaaggaacctga

SEQ ID NO: 1177 - DNA, 1752 bp, Unknown
  Unknown gut bacteria
atggaaacctccggttacagcgcccgccagcggcgggccatcaatcaggtgtggactgcctgcggggactacaaatttgaaccgcagtttctggccatgcagtctgacggccagcctgatctttatatgaactgcgtcattgggttggtccacaaatggtttggggatgagcttcccaagcagttgttcgccgcttgggcgggggacgcacggcaggccgtgtacgatgaccttgcgtggctggctctggaaaacgccgcttatgagaaggaattaccgaagcgtcccgctttagcagcactgcggcaggcccatgcttccgcgttttttgaatcggaatatcagctttcccggcaggagtggatggagaaaaaacagctggtgtacgccatacagtccgccagatggaaaaccgtgcttgggcagagactgcctgtgctgaccccttgggaaaagggactgtcggaggctcttgcctgtcccggtaccatgagtggagaggaggtagcagcggcgatccggactgccttccaaaaatatctccgctttgacggcaccgcccacgccaaaacgccccttaccctccatttcggagagcggtgggcgccgctgctgacgaagctgttcaccacggagatggtccgcaccgacgatctggccatcggccgatctgcggcggtgggagaaaacggcatggtgcgggcgtccaatgccctgcgctcccatttacgttccaatgagcgggaaaccgaggatcgggactatgtggaacgctgcttcggccgcagtctgtacgctcccaaggaattggcgctgatggagcagcgggactgcaccggaaaccatctgggctgccacctctggttcacccgtggggagccgtcgcccgacaaaccggtcagcgccgatgcccagcggctttttcaacaggcagaggagcaggccaagcgaaaccgggccgcttacgtcaaaaacagcgacctctatcagagcgccctcctgcggctgacggagcagatccgcaactgcatgctgatccaccagcagccggacgccgtctccgcccggcagggccatctggacagccggcgggtctggcggctgccagtgctgggagacgataaggtgtttttgcgcagcgacgaggaaagcacccccggctttacggtggacctgctgctggacggctctgcctcccggcttcactgtcaggaaaccatcgccgcccaagggtatattctggcgaaaagccttgcggactgcggcatccccgtccgcgtcagcagcttttgcagtctccggggctatacggtgctgcgggtgctgaaggatttcggtgagaaaaacggagaacggaagatttttgactacttcgccgccggctggaaccgggacggactggcgctgcggatggcagcggagctgctgaacaccgccccggcagacaagcacctgctgattctgctgacggatgccagccccgacgacagccacaagatcctccctaccggcaaggtccccctcagccgggactatgacggtcaggtaggtgtagaggacacggcggacgaggtccgggccttgcggcggaagggtatccgggtggccgccgtctttatgggggagaacgccaacgttcccaacgcccgtgctatctacgggcaggatctggctcccattcgccggatggatcagctctccgccgcggcgggacggctgatccaaacggagatccgggagctgtccggctga

SEQ ID NO: 1178 - DNA, 1701 bp, Unknown
  Unknown gut bacteria
atgggatttatgaccattgacggtcagcgggtggaatttaccaacgaacccaatgttctgaccgtaatccgcaatgcggagatcgatataccgaccctttgttaccattccgaactgtccatttacggtgcctgccgtctgtgcaccgtagaggatgaccggggcaagacctttgcctcctgtgcggagccgccccgggacggcatggtgatctacaccaataccccccggctcatgcgctatcgccggacgatcctggagctgctgctggcggcccacgaccgggactgcaccacctgcgtgaaaagcggcgagtgccatctgctggaactggctcaccgcatgggtgtggaccggatccggttcaagaaccgggaggccaagtaccccatcgacgaaagctctcccgccatcgttcgcaaccccaataagtgcatcctctgcggcgactgcgtccgtatgtgcgacaacgtccagtccgtgaacgccatcgactttgcctaccgcggcaccagcacgctggtgaccccggccttcaacaagaccatcgcccagaccaactgcgtcaactgcggtcagtgccgggtggtgtgtcccaccggcgcgatcagcatcaagaccaacatcgatgaggtctgggacgctttggcggaccccaacaccattgtggtggcgcaggtggctccggcggtccgcgtggcgctgggcgacaagttcggcatccccaagggcgaaaacgtcatgggcaagctggtcaatgccctgcaccgactgggcttccatgaggtctatgacactacctacggcgcggacctcaccgtgatcgaggaggcggaggagctgctggagcggatctccagcggcgccaagggtcccctgttcacctcctgctgccctgcctgggtcaagttctgcgagacccggtatccggaactggcggacaatatttccacctgccgctctccccagcagatgttcggcgcggtgatccgggaatactaccgcaatcctgagatcaatcagggcaagaagctggtgtcggtgtccatcatgccctgtaccgccaagaaggaggagatcctccgccctgagtccatgaccaatggccgacaggacgtggactatgtgctgaccaccaccgaggtagccaccatgatccgcaagtccggtatccgctttgagaatatcgacggcgagtccaccgatatgccctttggcatcggttccggcggcggcgtcatcttcggcgttaccggcggcgtgacggaggcggtgctccgccgccttcagaccggccacagccgggtggaaatggatcgcatccgcaccagcggcgtccggggcgatgacggcttgaaggaactgacctttgactacatgggcaaggagatccgcgccgcggtggtcaacggtctgggcaatgccgacaagctcgtcaagcgcatccagagcggcgaggtcagctatgacttcgtggaggtcatggcctgccgccgtggctgtatcatgggcggcggccagccggtcggcgccggtccccggacccggaaggcccgcgccaagggtctgtatgataccgacgtcaatatgcagatcaaaaagtccaacgagaaccccatggtccttgctctgtacgagggcctgctgaagggcaagacccatcagcttctgcaccgtaatctgggcgttaccgagaactga

SEQ ID NO: 1179 - DNA, 1371 bp, Unknown
  Unknown gut bacteria
atgatccaaaccattcgcaaagcatggggcatccctgagctgcggaaaaagatcgtttttactctcctgatcctgctgattttccgtctcggcaacgccatcatggtgccctatatcaaccgggacgctctggccctgcagatgcaggtctggggcaccggcctgctgggcctttacaacgtgatgagcggcggcgcctttgccaccgccaccgtgtttgccttgagcatccagccttatatcaacagttccattatcatccagctgctgactgtggccatccccgctctggagcggctggcccgtgacggcggcgaggaaggtaagaagaagatccagtccatcacccgctacgctaccgtggcgatcgccattctccaggccattggctattacttcatgatgaagaattacaacctcctggagcaggacggcatctgggtggcactggtcatcatcgtgactctgatcgcaggttcctccttcgtgatgtggatgggcgagcaggtcaccgagttcggtgtaggcaacggtatctccatcattctgttcgccggtattctggcccggatcccctctatggtttccggcatgaaggacggcatccagagatggtccgccatcaacgcaggcactctgactgcggagaccctgacctctgccggttacaccgaggcacaggcgcaggcttacctgaacggcgcgctggctccttggagcattgcgctgctggtcatcggtatgctggctctgatcgcattcattgtctttatcaatgacgctgagcgtcgcattcccgtgcagtacgccaagcgtcaggtgggccgtaagatgtatggcggccagagcagcaccctgcccatgaaggtgaacatgtccggcgttctgcctatcatcttcgcccagagcattgcttctctgcccatcaccatctggaccttcatcggtatgcccaaggaaggtactgtgtcctacagcatctacaatgccattgatacgaagtccgtcatctacatggtggtgtacttcatcatgatcattggtttcagctatttctactccagcatccagttcaaccccgtggagatctccaacaacctgaagaagcagggcggcttcattccgggcttccgtcccggccagcccaccgtgcagttcattcagaaggtcctgaaccggatcaccatgttcggtgccatctatctgggtatcgttgccatctgccccctgatcgtgggcaagatcattgacaactcttctctggccatcggcggcacctccgtcatcatcgtggtgggtgttgcgcttgagaccgtgaaggcgctggagaatcagatgctgatgcgtcagtacaagggcttcctggaataa

SEQ ID NO: 1180 - DNA, 1629 bp, Unknown
  Unknown gut bacteria
atgaaaaaacatcccctattgcggacggccctgctggtcatgaccgccgccgcgctgctgtgtgtcagcgctctggctgttgaggacggcgcatccaccaacagcatgtacggtaccttctgggcactggtgccccccgtcatcgccatcaccctggccctcatcaccaaagaggcctacagttccctgttcatcggcatcaccgtgggcgctctgttcgcccagaatttctcccccatcggcgcactggacatgatcgtcaatgacggcctggtggcagccatttccgacaatgccggcatcttcctgttcctggtgctgctgggcatcatcgtggccctggtgaacgccgccggcggttccgctgccttcggccgctgggcatcaaaaaacattaagaccaaggtgggggcttcccttgctaccttcctgctgggcattctgatcttcatcgatgactatttcaactgcctcaccgtgggcaccgtcatgcggcccgtcaccgacagccatcggatctcccgtcccaagctggcctacctcattgacgccaccgccgcccccgtgtgcatgatcgcccctatctcctcctgggccgccgccgtttcctccaccgccgagggtctggacaccggcatcagcggcatccagctcttcatcaaggccattccctacaacctctactccctgctgaccttcgtctttatcatcgccctgtccttcatgcagttcgattacggtcccatgcggacctatgagcgcaaggcccaggagaccggtgacctctccgctctggaaaacgcagaggatgaagccgtgaaccccaagggcaaggtcatcgacctgctgctccctgttctggtgctgatcgccgtgtgcaccaccggcatgatctatgtgggcggcttcttcggcgtggatgcctggggcggcaccgactgcgccggagactttatcggcgccttcggcaacaccgacgccttcatgggtctgccctggggcggcatcattgctctgctcttcaccgtcatctatctggtggcccgccgggtcatcaccttcaaggacgccatggcctgcatccccaagggcttcaacgccatgatctcccccattctgatcctgaccctggccgtctctctgaaggctaccatcacctctctgggcgccagcatctatgtccatgacctcatggaaggcgccgccgctacgctgtactctatgctccctgccgtgattttcgtggtggcctgtattttggccttcgcctccggcacctcctggggtaccttcggcatcctgatccccattgttaccgctattttccctgcttccagcgagctgctcatcattggtatctccgcctgctgtgccggcgctgtgatgggtgaccactgctcccccatctccgatacctccatcatggcctccgccggcgcccagtgtgaccatctggaacacgttgccacccagatcccctatgtgctgacggtggccggtgtctgcgtggttggcttcatcgtggccggtttcgtccagaacgtgtatattacctggaccgtcagctttgcgctgatgctgtgcgttctgttcgtcatccgcagcttggagcgccgcaaggccgcgtaa

SEQ ID NO: 1181 - DNA, 2181 bp, Unknown
  Unknown gut bacteria
atgaagaagttcctgtctgtgctgctggcattggctatgatcttctccctgacggtcacagtctctgcggacgagaccaagggcgagatggacggctatgtagtagtgctgcacaccaacgatgtgcacggcgctatttccggctatgccaaggtggcggccttgaagaaagcctatgaggctgagggtgcctatgtcctgctgatggacgccggcgacttctgccagggcgatcccacggtcagcgtttctcagggtaaaacggctgttgaactgatgaacatggccgggtatgacgtcatgacccttggcaaccacgagttcgactacggctatgacaatctggtgaatctctccaaggaagccaagttccccattgtggcagccaacgtgctctatcaggggaaggtggcattcaactccaaccagatcttcaccacgccgtccggcgtcaagatcggcgtgttcggtctggagacccctgagaccgcaaccaaggcacaccccgctaagatcaagggcgtgaccattctgggtgacaagtccatgtttgactgcgcacaggcgcaggtggactccctgaaggcggacggctgcgattacatcatctgcctgggccatctgggcatcgacaaggaatccattggcaaccgttccacggacctgctgaatgttgtggacggtatcgacgtgttcattgacggacactcccactccaccatgaaggacattgccgaagtgaccgacaaggacggcaaggtcaacggcaccctcctcacgtccaccggcaccaagctggccagcgttggcgttgtgaccatcagccccaagggcaaggtcacggctatgagcgctcctaccgagggcatgactgccgaggataaggacgtggctgccagagctgccgccatcaagaaggagatcgacgacgactacggcaccgtgttcgccaagaccaaggtggagctggacggcgtgaaggccaatgtccggacccacgagaccaatctgggtgacctcatcaccgacgcgctggtttggggcgcaggcaagaacggcaccaaggtggacgcggctgtcaccaacggcggcggcatccgggcctggatccacaagggcgacatctccaagctggacgtgaacaccgtgctgcccttcggcaatacactgagcatcgtgaaggtcaccggcgcggaactgctggaggctctggaggcttcgacctactgcacgccggattccatcggcggcttcccccaggtcagcggcatcgtctacaccattgacggcaccaagacctatgacgcgggcgatgtgtatgaaggctccacctaccacgcacccaagaccatccgccgtgttacgatccagtccgttggcggcaaggccttcaacctcagaacggtctacaccatcgctaccaatgacttcctggctgccggcggcgatacctattacgcattcaagaccgcttccgtcaactacgatctgggtatccccatggacgaggtcgtgatggattatgttaagaccgagctgaagggcgttgtgtccgctgagaattacggcgaggccggtgaccgcatcaccatcatcaagggcctgccctttacggatgtggatccttccgccgcctattacagcgcggtgaagtactgctatgagaacaatatcttcaagggcgtcacggatacgatgttcatgcccaacaacaccatcacccggggccagatggtcacggtgctgtggcggatgaacggctctcccgagcccaagaacgccaatcccttcggcgatgtggccgctacctctcccttcgtcaaggccatcgcctgggcggctgagaacaagctgaccaacggcatcaccgagacgacctttgccccggcacaggccatttcccgtcagcagttcctgaccatcctgtatcgctacgcacagttcatgggctatgatgtgtctgtgggcgaggacactaatattctctccttcgaggacgtgggtgaggttggcgagtatgccatccccgcgatgcagtgggctgtcggctccggcgttctggcggctgaaaagaccctgacgccccgcgccgcggcgcctcgctgcaacgtggcagagttcctggccaacttctgcatgaaggtgatccctgctgccgagatgatgcccaaggctgcctga

SEQ ID NO: 1182 - DNA, 1917 bp, Unknown
  Unknown gut bacteria
atgaagcacgtcatcatcggcacggcgggccatgtagatcacggcaaaaccgttctggtcaaggcgctcaccggcaccgatacggaccgcctggcggaggaaaagcgccggggcattaccatcgagccggggtttgccagactggactggccggacggcacgcaagcagggatcgtggatgtgccgggccacgaaaaattcatcaaaaatatgctggccggggcggggggcattgaccttgccatgctggtcatcgccgcggacgaaggcgttatgccccagaccgtagagcatctggatattctgtctctcttgggtgtccaaggcggcttggtggtgttgaccaaggcggaattggtagatgatgactggttggaatttgttcggagacaggcgttggagctgaccgagggcacctttttagagggtgcgcccattctgtcagtctccgccgtcaccggtcagggaatcccggaactgcgggacgccctgtaccgcttggtacaggaggcacgggaaaaaagcgcgctggcacccttccggcttcccattgaccgggtcttttccgtggacggcttcggcaccgtagtcaccggcacccttacggaaggggctgtccaggtgggggacgctgtggaactggtcccctccgggctgcaaagccaggtgcggaccttgcaggtccacggtgaaagcgtggacgccgcctacgccggtcagcgggtggccctcaacttgacaaatctgcaaaaaccggagatccgacggggggacgcggcggtaagacccggcagcgtccggccttcccggatgctggatgtgcggctccggtgtctgagaaccgccaaacgcacggttttgaacggctcccaggtccatctgtaccacgggacctccgttcatttggcaaaggcggtgctgctggagcgggacgaattgcggcccggagaaagctgccttgcccagctgcggctgacggagccgatggccgtcaaacagggggatcggtttgtcattcgattctactctccggtggagaccatcggtggcggaacggtgctggaccctcggccccttcgccacaaacggcatgacctagcggtgctggacagcctgatcctccgggaacagggctccggcagtcaacggctgctgcaagctgcggaggaattcggtgtttcactgccagatagcagccagttggcggagcgttccggtctggacactggtactgctgtatccttgctggcagacctgctgaatcagggaaagctggcggagccgctgccgggccgctacgcagcggcctcggcgctggacaccctctgggaccgctgccgggaattgctgtccgcctaccaccaaaagcacccccttcacgccgggatgcccgccgccgaactgcggcaaaagctgttccggcagatcactcccgctgagggcgatgcgcttttggaggtttttcgggcggaggggcggatgaaacgcgccgaaaaccgttgggcgctggcggagttttccattcggctcaccaagcggcaaaccgccctccgggacgcgctgttggagcgcttcctccggggtggcccggagccggacaccatcgaagcggtgctggacagtattcctccggagcgccgggaggaggctcgtcaggtgctggaaagcctgctcaccggcggagagctggtacggctgtcaccggagctgtgctggcaccgggaggtgttccaaaaggggctggatatcttgcggacgctgtgtgctgaccacggcgctgtcacgctggcagaggtccgggacgctttagacaccacccggaaatacgctttgctgtttttagaagcctgcgaccgacggcagatcacggttcgagagggtgactgccgtcgcttgaatactgaatttcatgactga

SEQ ID NO: 1183 - DNA, 1020 bp, Unknown
  Unknown gut bacteria
gagctcaacagctacatcggctccggccagccttgggatctggacagcagcagcggcggcgtccatatcctgccgccttacatgggcagcaagggcggcacctggtataagggcactgccaacgccatctatcagaatatcggcttcatcgaccagtatcagccggagtatgtggtgatcctctccggtgaccacatctataagatggattattccgaaatgctccgccgtcacaaggaatcggacgctgcctgcaccatttccgttatggaggtcccctgggaggaggccagccgcttcggcatcatgtcggtggatggggaggatatgatcaccgagtttgccgaaaaaccccgccagcccaagagcaatctggcatccatgggcatctatgtgttctcctggaaagcgctgcggcgctacctcacggaggatgaggcggatccgggttccgaaaatgactttggcaagaatatcatccccaagatgctggcggacggccagcggatggcggccttccgcttccagggctactggaaggacgtaggtaccctcacctccctctgggatgccaacatggatatgctctctccggaatccggcctggacctgtctgacgagtcctggcccatttacgcccgcagcgtagacgcgccccccatttacatgggcggcgccagccgtgtgagccacagcgccatcaaccggggctgtgacattgaaggcaccgtggaaaattctgtgctctcccccagagtcaccgtggaaaaaggcgccaaggtcagctattccgtgctcctccccggcgttacggtggagacaggcgctgtgatcgaatacgccattatcggcgagggctgccacatcggtaaggactgccgggtgggcggcgcaccggattccgctctcgatgggaaatgggatctgacggtgctggccccggattgccagttggaggatggccgcgaggtggcccccggcatcatgctggaccaccatggtaaggaggtgctgaaatga

SEQ ID NO: 1184 - DNA, 1350 bp, Unknown
  Unknown gut bacteria
atggctaacgaagatcttctgctgcggcagatgccccattcgttggagggcgagcaggccgttttaggctccatgctcatcgacgagggctgcgtcaaggacgtgatggataagttggtgccctcggacttctacctgcggcagaaccgggagattttcgagaccatctacaccatgttcacctacgcccggcctattgacggcatcaccgtctgcgaggaaatgcaaaaggccgggacttatgacgaaaataccacccgctcctatctggcgcagctcatggagatcacccccaccagcgccaacgtgatggagtatgtggccatcgttcgggataaggcgttgctgcggggcgttgctcaggcggcgggggagatcacggtgctggtgcaggagggcatcggagaagccgctgccattctggaagctgccgagcagaagatctacgccgtccgccgcggccagagtgcgcaggatatggtgccgctgcggatggtgctgccggatgtgctggaccggctcaacgagatgagcgagagcgaaagccgacttccgggcctgtccaccggcttgtccgctgtggaccggaagatcagcggcctgaataaatcggacctgatcctgctggcggcccgtcccggtatgggcaaaacctcctttgcgctgaacgtagcactgaatgtggcgaagtctgagaaaaagaccgtagccatgttttcgctggaaatgtcccgggagcagctggcgacccggcttctcagctccgaagcctgtgtggagaacacccggcttgttaccggctctctgcgggagacggactgggagaagattgccgccgctgccggcgtattgaatagagtggatatccgtattgacgataaccccatgctgagcgtggcggatatgaacgccaaatgccgccggatcgacagcttgggcctggtagtcatcgactatctgcagttgctgacctccgcatccggtggacgaagcggtgagaaccgtcagcaggtggtcagcgaaatgtcccgtatgctgaaggtcatggccaaggaactgaatgtgccggtgatctgcctgagccagttgtcccgtgctaacgagaagcgggacgataaacggcccatgctgtcggacctccgtgaatccggcgccatcgagcaggatgccgacatcgtaatgttcctgtaccgggacgattactataacgaggattccgaaaagcggaatattgccgagtgtatcgtagcgaaaaaccgtcacggcgagactggcaaggtggagctgcggtggatgccggagtacaccacctttgccacgctggaaaaccgctatgatgaggatgactga

SEQ ID NO: 1185 - DNA, 879 bp, Unknown
  Unknown gut bacteria
atggaaaaacgaacaaaacgatggggtgaccggccggatgcctactggatccgggatctggacgggcttcacgccatcatgccccatctgatgaataagcgcaccgacgccgaggtctacgtcaatatggaatttgacgtgacggaggtcctgcgctatatcgaggaaaagaaccggggagaggacgaatacaagaccaccctgttccactgtatcctcatggccgttgccaaaaccgtatacctgcggccggatctgaaccgctacatctccggacggcggtattaccagcgccacgagatcacccttggctttgtggcgaaaaagcggtttgaggaccacagtgaggaaaaactggtggtggccacagccccggaggattggaccctgaccgctgtgacccgtcaggtggtggggaaggtccacaaggcccgaacggagaagagcggcggtgccaacggtgccatggatatcctgaagatcatgccccgctggttcctgatgcttttcttctgggggctgaaaaccctggatttctatgggaaggtgcctgctgtgctgaaggaggatgaccccaactttgccagcgtgttcctcaccaacctggggagtatccaatgccccagcgtgtaccaccatttgaacaattacggcaccaattccatcatgatcgccattggcaccatgcacaaggcggagaagatcgccgctgacggcacccgccaggtgcgggacgtggtggaactggggatcaccttggacgagcgggtggcggacggcttctatttcggccgttccctgaaaatcgtgcagcacctgatgagccacccggagctactggacagacccttgaaggaggccatcgaccttgactgctga

SEQ ID NO: 1186 - DNA, 2553 bp, Unknown
  Unknown gut bacteria
gtggtatgcctggttctggcactgtgcgtatttgtcagctattttggaatcagcgcgatcttcattgactggctggctgttctcatcaagggcctgctgggctatggctactggctgtttggaccggcgctggtgctggcgggctgcattctgctgttccatcatggacggcctgtgactctgcgggtgaccagcgcgctgctgctgccggtgctgctgggaacgttgtgccacatgctgctggtgaaggaggcatatacttcctctattgggatcattccggccatgtggaaagacggcgtggccttgaaatgcggcggcgtgatctccggcgcactgggccaggggtctgtggctgtattttccaaaatcgcgtcaataatcatctttacggtgctgtttgtggtgttgctgatggtggcgctgcggctcaccgtgggggccttgatcgagaagcaccgggagcggcccaagtacgaggaggagccggaaccggagaagcctgtcagagaggcgaagcggccgcaggagaccgttgctgccatcccggcagaaagcgcccggtcccggattgatattccggtggacgatccggtgaatgctccggcacccaaaccggaaaagactggctttacccgctttttccggcataagtccgataagcagaaaaccccggcgcaggtggtggcacagtccgggactgcggaaccggtggtcagcgtgatggaggacgagggcgatccctttgccaatgcgcgggtccatccgtctcccgcaccggctccggtgcctatcggccagcagcccccggccaaggcaatccccaccatggagccggtggtggtgtctacgccggcggagcagcaggagaatgccccggttcctgccgcagtaaatactcccgcgcaggggacggcgcctgttgccgcacctgctgtgcaggagccgctgtccaaaaaggcggcggctcaggctgtggctgcggagacggctgcggtcacggcagaaattgccgaaaatatggcgggaagcgaggcggaataccgctacccgccggtgagtttgctgcatgaaaacggcggagagaaccacatggctgccggggcggagctgcggaacaattcccgccgccttgcggagactttggccagcttcggcgtggacgccaaggcgggcgatgtgatccatggcccgtcggtcacccggtatgagtttaccttggatcagggtgtaaagctctccaagatcaccaatttgcaggatgacatcgctttggcgctgggcgccagcggcgtccgtattgccgccgtgcctaataaaatctctgtggtgggtattgaggtgcccaacaagacggtgacgccggtgctgatccgggatgtgatcgagtcccgtgactttatggagcatccttccaagacggctttcgccttgggccgggacatcggcggacggaatatcatcggcaatattgaaaagctgccccatgtgctgatcgccggtaccaccggctccggtaaatccgtgtgcaccaactccctcatcatcagtctgctgtataagtccacgccggacgaggtgcgctttatcatggtggacccgaaaatggtggagctggccccctataacggcatccctcacctgctgatcccggtggtgacagatccgaaaaaggcggcgggcgccttgcagtgggccgtgtttgagatgatgaagcgctataagaccttctcggaaaacggcgtgaagaagctggaggagtacaacaagctggccaccgtcagagaggatctggaaaagctgcccagcgtagtggtggtcattgacgagctggcggacctgatgctggtggcggcgaaggaggtggaggaatccatctgccgtgtggcccagatgggccgtgccgccggtgtgcatctggtgatcgccacccagcggccctctgctgacgtcatcaccggcttgatgaaggccaacatccccagccggatcgctttcgcagtggcatcctctctggaatcccggatcattctggacaccaccggtgcggaaaagctggtgggtaagggcgatatgctttacgccccgctgggtgagggaaaacccacccgtgttcagggctgctttatctctccggaggagatcgaggacgtggtgtcctatgtgaaggagaccggcgaggccaactactctcaggaggtcattgcccagatcgagcagtccgtccaggagaaggagaacaagggcagcaagggcgcgtccgctgccgccgatacggaaagcagcgacgaggacgagctgctgcccgccgctgtggatgtggtgctggaaacgggacaagcctctgtgtctatgctgcagcgacggctgaaactggggtattcccgggcggcccgcttggtggaccagatggaagaacgggggatcgtggggccatttgaaggctccaagcccagacaactgctcatcacccgcgcacagtgggacgaaatgcagatggggggcgctccagcagttgaggatgcgccgccgtttgacacaggcgatgaataa

SEQ ID NO: 1187 - DNA, 3087 bp, Unknown
  Unknown gut bacteria
ttggccgaattgtcccggaactgcacgctggatacctggtcccagggaaagactgtgatcctggagaacgatcttgacctccacagtattgacttcactccgatccccaccttcagcggcacattccaaggcaacggacacaccatctccggcctgacccttaccggcagtggcaacgtccggggcttgttccgctacattcaaaacggcgccaccgttcaggatctgacggtcatgggcactatccaccccaatgggcatcaggatgatctgggcctgctggccggcagcaacgccggacggctcttaaactgcatcgcctccggcaccgtcatgggtgataaccgcatcggcggtctggtaggcgtcaatgaaaccagcggcgagcgggtgggctgtgccttctccggcagcgttaccggcaaacattccaccgccggcgtggtgggtgaaaaccgcgggaccctgacccgctgctccaacagcggcagcatcaacacccacgatctggaagacgatcccaagaccgactatacaaatctggcccagctgaactccatggaaaacgtcccggcttatacggacgtcggcggtgtggcgggctattccaagggcaccatccagagctgctccaacagcggcgcggtgggctacgcccagatcggctataacatcggcggcattgccggccgcagcaccggctggctggatggctgcgtcaacaccggcaccgtcagcgggcggaaggacgtgggcggcatcgtgggccagctggagccggaggttttgcagaccttcagtgaggatttcctcgacaaactgttggcccagctggatacgcttcaggatatcatggaccgcaccgccaaccacgccgacagcatttccgactccgtccacgcccagatgaacaatctcaccggcaaggtccgggacaccaaggacatcgccaaggaactgaccgatgccatgacggactgggccaacggcaacattgacgaaatcaatgaactttccgctcggatctctcaggcgctggacgatctggcagacattctggatgacacaggcagtgcactggacgcattggacgctctgctggatacgctggaaaaagttcggaaggatctgaccggcggcaatgacgcggcagaggattttcagaaagcccttaccaatctgcgggatgcccgggacgctgcccgggagacccataaggcagtcacatcagcagcaaaagatgttctggatgccatcatcagcggtaaggatcctcaggaagctctggatcatctgaaggacgtactggggaattacagcaccgccctccggttggtcggcaccgctatggagcagatgcggcaggcgctgaatgctctgcccgcagatatttcccggctgaaaaaagcgctggaggatctgggggatgtggagaacgctgcccacaaggccctgaaccgactggatcaggtggtccgcggtctggaagaactgacacggaagcaggctgacaagcctgaaatcaaaatagatcccatcggatctgatcttacggaaaaaggcaaccagcttcaaaacgccatggacgcccttctggacagcggtgaagctctgaaccaactgctcagtgactctgccgacaccctcatcgccgatctaaaagcggtcaacaaccagttccgctccattacgaatctgatccgcagcgaaaaaagcgactggaatcaggatcaaagcaagagtaaggaagatcagatccgggatcatttccaggacctgtccgattcctgcacccccgccaagcagcatgacggccggatctccgcctccgaaaacaaaggcgagatcaccggcagcacaaatttaggcggcattgtgggttccgtgggaattgagattgacttcgatcctgacggcgatacgaccaaagtcggcaactattctttggatttccactatcagacccgcgcccttctgaccgactgcaccaacagcggtgctgtcaccgggcggaatgactatgccggcggcatcgtggggcaggcgtatatcggtcagatcaccggctgccagagctacggtgccgtctccaccgacggcagctatgttggcggcattgcgggccggtccgacagcagcatccgcctgagctgggccaaatgcaccctttccggtgaggattatgtgggcggcatcgccggttatggcaaaacgctctccgactgccgcagtctcgtcaccgtggacggcggcgcgtacaccggtgctatcgcgggagatgtggacgaggatggctctgtgaccggctgcctgttcacccacgaaacgctgggtgccatcgacggcatcagctacgccgggaaggcagagcccgccgccttcgacgttctctgcgcaggagacactgttcccaagaccttctcccagatggaactgaccttccgggcggacggcaaggtggtagcggtagtccccttccagtacggacgggggattgacagcctgccggagatcccggcgaaaaagggtttctccgctgtctggcctgatctggactatacccatctcatcgccagtcagacactggatgccgtctacacaccttacacctcctccctgacggatgacacccagacccttccccagatcctggtggatggcagcttcagcagccgggccaccgtcagccacacttcggaacctgtctcctggacagatgcgaagggcactgcccgcaccggcaccgccgttaccgtcacggtggacgatccggatatgaccgctatctcctacacggtccactaccggctcccggaggacggcaagcgctatgacctctgggtcaagacggaaagcggctgggaaacgcaggacagcaccgtggacggcagctatctgctgttcacctccgaccgggaaaccgtcaccttctgtgtgcaggagcggaccgccagtcctctgctgtgggtcttgctggcagttctgatccttttggctctaatgctggtggtgatccggatccgcaaaaagcggggccgccaaaccatacggagccgcctgcggaaggcccgtcagaaaaaatcgtaa

SEQ ID NO: 1188 - DNA, 1149 bp, Unknown
  Unknown gut bacteria
gtgtatgcggtggaaccgtatggagaggagttttttgtgtcataccattatttactggatctggcgttgattttgttaagtacgaagctgctgggccttctgacacagcggtttcagatgcctcaggtagtgggcgctttgctggcgggcctgatccttggccctgcgggactgaatgttctgacagaaactgaatttatttcccagctcagcgaattgggcgtcatcgtgctgatgttctccgccggtatgggaacggacatcaacgagttgaaaaacagcggcaaggctggcttttgggtggctctgctgggtgtgatcgtgcccctgctcatgggtacggctctggcatggggcgctgccgccgcaggcttgatcgagagcaacggtatgctggaaaatgtatttgtgggcacgatccttacggcaacctccgtcagcatcacggtggagaccctgaaggagatgggtaagctggaaacgaaggtaggcaacaccattctggcagcagccctgatcgacgatgtgctgggtcttgtggcgctgactctggtcagcagtctggccggtggcggggagagcgttggactggtcctgctgaagatcctggccttctttatcttcgcggctggggccggtgtgggggccaaccgcctgttttgctggatgttgaagcggcagggaggctgggccacccaccgcaactccgttctggcctttgtgctctgcctggtgatggcctactgcgcggaggagttttttggcgtggcggacatcaccggcgcctatgccgccggtctggccgtggcctgcacccccaagggaacctatatccagtccaagtataatccgcttggctatctgctgctgacgccggtgttcttcgccgccatcggcatcaacgtcaagctggacggcgtcagcggcgggatgctggcattttccgtcctgctgctggtgatctccgttatttccaagctggcgggctgcggcttgggcgcaaaactctgcggctttacggagcgggagagcattcaggtgggtgtgggcatggtctgccgcggcgaggtggcgttgatcgtagccaaccggggactgtccatgggcgttctcagcagtgcgatgatgacaccggtggtcatcaccgtg

SEQ ID NO: 1189 - DNA, 1158 bp, Unknown
  Unknown gut bacteria
atgagacctgtaaaatcatatatcgccaagcgatttcagaattccgacgccggactgagtctggacaccgacgcgctggcccggtattcggatatcattgatctcagcatcggcgacacggactttatcaccgatgacgccatcatcgacaccgccttccgggaagccaaggccgggtacacccactatggagatccgaagggtgatccggagctgatccgctccgtctgtgacgcatggcagacggatttcaagcagcccctctccccggatcacgttctggtcaccgcttccagcagcatgggaatggcgctggtgatgctgtccgttctggaccccggtgatgaggtcatcgtcttttccccctacttctccctctaccgcacccaggcggaactggccggcggtgtgtgcgtggaggtccccacctatgcaagcgagggatgggccattgacgaagcccgtctccgggcggccatcaccccccgtaccaagcttatcgtgttcaacaatccctgcaaccccaccggcatgggctatgaccgctccacgctggagctgctgggccgggtggcggaggagcatgacctgctgatcgcggcggatgagatctataccacctatctctatgagggggacttcatccccctccgcacgatcccagggcttgcccaccgggtcatcaccctgaacagcttttccaagaattttctcatgaccggctggcgggtgggcgtagccatcgcggagccggagcttctggacgtcatgagcaacaccaacaactccctgatctatccggccccttccctctcccagcgggccgccatacaggcgctggcgatccggcagaccattcgtgagaaatacgttctggcctaccgggaccgcattttctacgcggcggaccggatggagcagatcccctacctcagtctggtacggcccaagggcaccttctacctcttccccggcattgagaaaaccggcctcagcgccgaggacttctgtcaggcgctcctggaacgggcccatgtcctggtcacacccggcacgctgttcggcagcactggcgccggacatttccgcattgcgtgtacggtggggctggaccgcctgaaggaagcctttgaccggatggagggcctgtccttctaa

SEQ ID NO: 1190 - DNA, 1227 bp, Unknown
  Unknown gut bacteria
atggaaaaaaagaaaaaactgtccctgccggtacagatctttattgctctggtactgggtatcgttgtcggtctgatgttctacttcaccggcgcagccggcttcaccaccagctacatcaagcccttcggtgatatcttcgtcaacctgctgaagttcatcgtggtgcctgtggtgctgctgtctatgatcgacggcatcatctccatgggcgacatgaaaaaggtaggcgccgttggctggaagaccattctctacttcatggtcactaccgccgtggcctgcgtcatcggtctggtcctggcaacggtgttcaacaacgcgggcctgttccccaacctcagcgaggccgctcaggccgccgagtacgaggccaaggaatacgccggcttcatggcaactctggttgccattttccccaccaacatgtggaaggcgtttaccgaagccaatatgcttcaggtcatcgtcattgccctgctgttcggcggctccattctggctgccggcgagaagtccaagctggtccgggacatggtgacctccgcttatgccgtggtagagcggctgatggaattcatcatctccctgagtcccattggtgtgtttacctacatgacctgggtggttgccacccagggcgctgagatcctcggctctctggcgctggtcattctgtgcgcctacatcggctacattctccacgccgtgctggtctattctgtttccgccaaggcgtttgccggcatcagccccgtcaagttcttcaagaatgcttccgcggctatgatcttcgcctttacctccacctcctccgccgcgaccctgccggtctccaaggagtgcgccgatgctctgggcgctgaggacgatatttcctccttcgtgctgcctctgggcgccaccatcaacatggacggcaccgccatctatcagtgcgttgccactgtgttcctggccacctgtgccggtatgcagctgaccctgagccagatgatcctcattgtggtcaccgctacgctggcctccatcggcaccgccggtactcccggcgccggtatgatcatgctggccatggtgctggaagccatcggcatccccgtggcttacattggcctgatcgtggctgtggaccgtctgttcgacatgggccgtacctgcctgaacgtcaccggcgacattgcctgttccctgtgcgtcaccaagtgggagagcaagaagaagtaa

SEQ ID NO: 1191 - DNA, 1203 bp, Unknown
  Unknown gut bacteria
atgaagttttccagtaagatcttgaagtgccagttatctccggttcgtaagttcaatccctgcgcagatcaggcagttgccgcaggccggaccatttatcatctgaatatcggccagccggatgtaaagaccccggagtccttctatcaggcggtccgggaattccgggagccggcgctggaatacgcacctgcctccggcctgcccgcctatatcgacgctgtgcggggctattacgccaagctgggcgtgaagctggagcgggaggacattctggccacctccggcggtggtgaggccctggaattcatcatggcctgtattctggacgatggcgatgagctgctggtgccggagcccttctacgccaactacaataccttcacgtttatgagcggcggcgtgatccatcccattcccacctccgctgacaacggctaccgctttgcggaccggaagctgatcgaatcccagatcaacgagcgcactcgggcaattctggtcaccaaccccggcaaccccaccggtctggtgctgacccacgaggagatgcgggtcatcgcggacgtggtcaaggagcatgacctgttcctggtggcggacgaggtgtatcgggaatttatctacgatgacgagcccatgggtaccttctgcgagctggaggacatcaaggatcatgtgatcgtggtggattccatttccaagcggttttccgcctgcggtgcccgcattggttccatcatttcccggaaccgggaatttatggcggaggccatgaaactgtgccagggccgtctgtgcactgccaccctcgatcaggcgggcgccgccgccatgtacgagcatgtgcagccttcctacttcaaggaggtccgggacgagtacaagaagcggcgggacgctgtggtagaggagctgaataagatccccggtaccaagttccacacgccggacggcgccttctacatgatggtaacgctgccggtggacgatgtggaaacgcttcagtatttcctgctggaggaatttgaggacaacggtgacacggtgatgtatgcccccggcagcggcttctatgccgatcccgccgatggccgcagcgagatccggatcgcctatgtccacaactgcgactatttgcgccgagccattcagcttttgggcaagggcattgccgcctataacgcaaagcgaggcgtttga

SEQ ID NO: 1192 - DNA, 876 bp, Unknown
  Unknown gut bacteria
ttggaggaaaagaacatgaaaaacaagatttttgccactctgctggccctgacgctggccctgtccctcaccgcctgcggcagcaagtccgatgactctgccaaggccgacaccaccgatgacgcgcagaccgagcagcccgccgagccccaggagaccgtcactctgaacgtagctgcctctcccaccccccacgctgagatcctgaagcagtgcgtacccattctggccgagcagggcatcgacctgcagatccacgagtacagcgactatgtggtgcccaataccgccgtggaggacggcgatgaggacgccaactacttccagcacgtcccttatctggatgacttcaacaccacccgcggcactcatctggtgagcgtcaccggcgtccacatcgagcccatgggcatctacgccggcaagtccgactctctggacaacctacctgacggcgcatccgtggccgtccccaatgatgccaccaacgaaggccgtgccctcctgctgctggaagctcagggtctcatcaagctggctgacgactccaacctctcctctacccccaaggacatcgtggagaatcccaagaacctgaccttcaccgaggtggaagccgctaccatccccagcatcgccagcgaggtggatctcgccgttatcaactccaactatgcgctgggtgctggcctgaaccccgttgaggacgctctggctctggaatcctccgactccccctatgtgaacgtgctggtctgcaaagagggcaacgagaacaacgccgccatccaggctctggccgaggccctgcactccgacgccgtgaagaactacatcgccgaaaactttgacggtgccgtcatcgccgttgattaa

SEQ ID NO: 1193 - DNA, 1554 bp, Unknown
  Unknown gut bacteria
atgtcccataggaatcaggaacgcacggagcggcggatctccgccgcggccagtctgatgctctgcgccctgacggtgctggcgcagatcgcggtgacccttctgctgacccgtttcctgaaagaaaaggccagctttgtgtacggatttctccagctgatcggcgcggtggtggccattcgggtttaccaacgcagcggcagtccgtcttataagctgagctggatgtgtttgctgctgattttgccagtggcaggtatgctcctgttctgcctgtggggcggcacgcatcaggctaagcagctgagtttgaagccggtgccgccgatcccccagcgggagagcgcaaaaatgctcagcgacctgaatcagaccgccctgacccgccgcagccctgcgtggggccgcttggccgcctatctccagaagcggcaattctggctgtaccgcaatacggacgccgcctatttcggtgagggggagtccttcttccgggatctggtggagcatctgcggcaggcggagacctatatcttcatggagtattatattttggcggaggggactgtctgggacgagatcttcgccgtattgaaggaacgtgccgccgccggggtggagatccacctgattatcgacgatttcggcaccttgacccgtctgtctgacgggacgctgcaagccatcaaagacgcggggatcgaggtggagatcttcaaccccgtccaccggtatatcaaccgcctgtacttcaattaccgtgaccaccggaagatcactgttatcgacggttatgtggcctacgccggcggtatcaacatcggagacgagtacgccaaccggatcgagcgcttcggctactggaaggacagcaccgttcgcctgacgggggacggggcctggggctttgctgtgcagttcatgcagatgtggaagatgctgggccgtcattttcccaacgaggacgattactaccgctcccgccgggaaggtccggcggtggagggcttctgccagccctttgaggatgggccgctgaataacccggacaatccggtggaggctgtgtatcttcagctcatcgcctccgctaaacggatgctgtatatcaccacgccgtattacgccgtggaggaatccatccaggaggcgctgtgcatcgcggcggacgccggggtggatgtgcggctgatgatccccgctatcccggataaaaaactggtgtatctggtggcggagacctactggggagaactgctgcgtcacggcgtcaagatctacaaatatacccccggctttgtccatgccaaaagcgtcatggcggaccgggaagcggccctgatcggcagcaccaatatggactaccgcagcttccagcttcactatgaggacgcggtgatgctctaccacatgccggtgatcgaggagcttttggaggatatggaccacatcgtggaggacagccagctttatacactggaggactgggagaaccgcccgtggctccggcggatgacggcgtccattttgaaattaggagccatctggctgtaa

SEQ ID NO: 1194 - DNA, 882 bp, Unknown
  Unknown gut bacteria
atgaatgtaacgttcgcgcaggtcagcggctgggtcgtccggtatctgctgaccattcggatttcagatatattggatattgccatcatggcatttgtcctctataaaattttcacactggtgcagagcaccaaggcggccagtctggtaaagggactgctgatctttttggcggcgctggtgctgtcctctgccctgcatctgaacgggatcaattacatcatgacccgcatggtcaatctgggcctgctggccctcatcattctgttccagccggagatccgccgggtactggagcaggtgggcagccgccgtctggtggctttcttcatccatgaggaatccgccagcacgatggaacaggccatcggacagacggtgctggcatgcacggaaatgtcccagagccgtaccggcgccctcatcgtctttgagcgggagatcctgctggacgatatggtccgcagcggcacggtgctggacgcggcagtgtccgccgagctgctgaaaaacattttcttcgtcaaggcccccatgcatgacggcgcggtgatcgtgcgccgggggcgggtgctgggcgctggctgtatgctgcccctgagcaagaacgtgaacctctcccgcgacttgggtatgcgccatcgggccggtatcggtatgagtgaaaactccgacgccgtggtggtcatcgtctccgaggagaccggctccatttctgtggccatcggcggaatgctcaagcggcatctcaagccggagacgctggaaaatctcctgcggaacgaattgcttccccgggaggaagacagcgaggaccgtctgaagttcaacctgctgaacctcctgcggagcaaaaagaatggaggcgaggaagatgcgtaa

SEQ ID NO: 1195 - DNA, 1059 bp, Unknown
  Unknown gut bacteria
gtggcttacaaaaaattggaggaatttattatgttaggtacgatcaatcccgaaattctgtttctgcagcaggaagaccagatcaaggccggtcttttggatatgaagatgatcctgaaaatcacggaggatacctataaaatgctggggcagggccagatccagaatcccccgaaggtccatctgggcatcccggaggggacggagtgggaatccttcttcaacaccatgcccagctacatcggcggcgatctgaatatcgccggcatcaagtgggccgccgagtccaagaagaacgccaccacccccggcatcccttacggcatcgacatttccatcctcagcgaccccgtcacggtcctgcccttctgtattcaggacggcaccatcatcaccgccatgcggacctctgctgtggcgggcctgcaggcaaaatactgcgccccctccgacaccgataccgcgacgctgatcggcgcgggcgtcattggccggaccatgatcatggcgatctgcgaggcgatccccacggtcaagaccatttacctctgcgatctggatctggaaaaggcagagcaggtggccaaggagtccgagggcaagtacggcgtggccatcatccccacctccgacagcaaggcggcagcggcaaagtcccagctgatcgtgggcgagaccaccgccagaacgcccttcatcgacaagagctgggtgaagccccacagcgccatcgtctgtgtttccaacgaggccacgacggacgtggtaaaggctgcggacgtgaatgtggtggattactggaagcagatcatcaccttcaagaacaaggccatcacgcaggtgttcgacgccggtgagattaccaaggaggaagtgctggaaaccagcgacctggtgctgggcaagccctgcagaacctctgacgagcagttcatttacgcttgctctctgggtctgggcgcgctggacatcaccgtggcctacgccctgtaccagaacgcggtcaagctgggccttggcaccaaggtcaagctgtgggacaagcctctgtgggaataa

SEQ ID NO: 1196 - DNA, 1296 bp, Unknown
  Unknown gut bacteria
atgtctacactcttatctgtttccattgcggttctggcaggacttctgatgacgcgcgtattcaatctgtggcgattgccggacgtaactgcgtatctggtggccggtgtgctgatcggcccctatgttctgggcagtatgcatattaccggtctggggctggtctcagccgatgcggtaagcagtctgcaactggtctccgaggtcgcgctgggcttcatcgccttttccatcggaaatgagttccgtctggaggacctgaaatccacgggcaaccaggctgccgtcatcggcgttgtccaggccttgaccgccaccctgctggtggacgccgcactgctgacggtccacatgctgctgccggaaaagctgtccgcagctcaggcgattaccttgggcgccattgcgacggctactgcgccggccgccacgctgatggtggtgcgccagtataaagcaaagggtccggtgaccaatctccttctgcccatcgtcgcactggatgacgcagtgggcctgatcgtgtttgcggtcagcttcggcatttccaaagcgctggtcagcggcgagttggatctgatctccattctgctcaaccccctgctggagatcgttgcgtctctggcattgggtgccgccgcaggctggctgctgaccaagctggaggtcctctttcattccaatacaaaccgcctgaacatgaccatttccctcgtttttctgacggtggccctgtccatgtcgcacattacccttgggccggtgactattagtttttcctctcttctggtatgcatgatgctgggaacggtgttctgcaatctctgcccccagtctgccgatttgatgaaagccgcagacaaatggacctctcccctttttgcgctgttcttcgtcatcagcggcgcggagttggagttgggcgtctttacggattgggccatcgtgtgcattggtctggtctacatcctgttccgctctgccggcaaatatatcggtgcctttgccagctccaaatatatgaaatgcggaccggagatctgtaaatatctggggatcaccctgctgcctcaggcaggtgtagcgctgggaatgtgcacaaccgctatgcagcttggagagcagggcggattgatccgcaacatcaccctcttctctgtgctgatctatgaaatggtcggtccttttctgacccggcaggccctgatggccgccggggacatccagcctctgtccgccgaggtctgccagcgccgtccggctcgggtacgctccgccaagcggagccgggcgtaa

SEQ ID NO: 1197 - DNA, 1689 bp, Unknown
  Unknown gut bacteria
atgtccacaaaggcctattatcccagagccgagatcggtcccggccaggtgggtttttctaagacccgttccatcatcgaagctccgttctacggcaacaatgtcatcaaggtcaacaccttgaaggaagcctatgagctggccaaaaattctcccggcaccgtggtcaccgatatgcccgtctaccggggcgaggaattcggtctggagccggacgccaaggtcctgctgttcaacgacggttccatcaccggccgctacgcccccgcccgccgcatcaccggcaagcccggcgtggacaccgccgccctggataagatcgtcatggacgccgtgtacgacacccgctggaagaccatgtatcacgccgaggtgttcatcggtctggaccccgagttcatggtgaaggcccatctgctgatccctgagggtgaggaaaacctcctctacaactggatgctgaacttccagtatatgtccacggaatatgtgaagatgtacaagaactccaagcctgtaggcgacggcaaggagcctgacatctacatcttctccgatcctcagtggaccggcgcccccggtcaggaaaaggtctgcgaccccaagtgcctgtgctatttcaacacggagaccaactgtgccgccattctgggcatgcgctacttcggcgagcacaagaagggcacgttgactctggcctgggccatcgccaaccgcaatggctacgccagctgccacggcggtcagaaggaatacaccctggcggacggccacaagttcgtctctgccgtgttcggtctgtccggctccggcaagtccaccctgccccacgccaagcacggcggcaagtatccctccatcaaggtgctccacgatgacgccttcatcatcaactccgatacctgcgcctccattgctctggaacccacctatttcgacaagaccgccgactatcccgtggattccccggacaacaagtacctgctgacagcgcagaactgctccgccacgctggacgaggacggcaaggtggtgctggtcactgaggatatccgcaacggcaacggtcgggccatcaagtccaagctctggtcccccaaccgggtggataagatcgaatcccccgtcaacgctattttctggatcatgaaggatcccaccatccctcccatcgtgaagctgaagggcgcgtctctggcctctgtcatgggcgctacgctggccaccaagcgttcctccgctgaacggctgaaggagggcgtggaccccaatgctctggtggtggagccttacgccaaccccttccgcacctacccgctggtgaatgactacgagaagttcaagaagctggtggctgagaagaacgtggcgtgctacatcatcaacaccggtgacttcatgggcaaaaaggtccagaaggaggatacgctgggtattctggaatccgtagttgagggccgtgcggaattcaagccctggggccccttctccgacattgagatcatggagtgggacggcttcgtgcccgacctcaccgacaagggctatgtcgcccagatgcaggcccgtatgcaggaccgcctgaactacgtggagggcctgaaggacgctgagggcggcttcaatgccctgccggacgatgctgccgacgccatccgcaaggtggtggagcaggctaacagcctgtaa

SEQ ID NO: 1198 - DNA, 1122 bp, Unknown
  Unknown gut bacteria
atgagccaagagaagaatgagaagctgggcttcagcaagaagagctccggcgtggttctgaaagatgtgaccaaaattttccagcagcccgataccggcaaggacttcgtggctgttgaccatatcaatcttgagatcaaggacggcgagatggtgacattgctgggcccctccggctgcggcaagaccaccaccctgcggatgatctccggttttgagtatcccaccagcggcaacgtgttcatcggagaccgggacgtagccaagatcccccccaacaagcggggcatctccatggtgttccagtcctacgccctgttcccccacctgaacatctgggagaacatcgcctacggtctgcgtgtggccaagatccctcaggatgagatcatccgccgcaccaatgacgtagtggagctgatgcagctcaaaggcatggagaagcggttccccaaccagctctccggcggccagcagcagcgtgtggcgttggcccgtgccgtggtcatcgagccttccgtgctgctgtttgacgaacccctgtccaacctggacgccaagctccgcgagagcatgcgggatgagctccgcgccctccagcagcggctggggatcacctctctgtacgtcacccatgaccagtccgaggccatggccatctccgacaaggtggtcatcatgaaggacggcgttatctgccagcagggcactcctcaggagatctacgagcagcccgccagccgctttgtggcaaacttcatcggcaaggccaacttcatcgacggcatcttcaagggccgtgacggcgaggccgcgctggtggagattggtggaaagaccttctccatccccgcccccggcaagatggagggtgtggaagtgggcggtgcctgctgcctgacggtccgccccgaatccttcctgcttaccaaggatgccggtgctctccccggtaccgtttcccgtgccacctattacggcgccaagatcgagtacgaggtcatgctgaatgagcagcccatcatcgtggaggtctacaacccccagctgacggagcgtttcagcgtgggcgatgccgtcaccatgagcctgatcgagggctgcgtccgggtcctgaagtga

SEQ ID NO: 1199 - DNA, 1425 bp, Unknown
  Unknown gut bacteria
atgatgcggagcgcaaagaaaacctacgagatcgacatgctgcatggcgcgatcctgccgaagctactgcgcttcgccgtcccgctgaccctctccaccatgctgcagctgctgttcaacgcggcggatgtggtggtggtcggccgctgggccggtgacaattctctggcggcggtgggttccaacacctccctgatcgccctgctgaccaatatgttcttaggattgtccatcggcgccaatattctggctgcccggtacttcggcgctcacgaggatgaggaactcagcaaaacggtccacacctctattctgctctccctgtacagcggcgtgttcctgacagtggtcggtattctgggtgcccggaccattctgatctggatgcagtgtcccgccaatgtgctggatctggccacgctctacctgcggatctacttcgccggcatgaccgccaccatgctctacaactttggcgccgctctgctgcgggccagcggcgatacccaaagacctctctattacctgttcgcatccggcgttgtcaacgtgatcctgaatctggtctttgtcatctacttccacatggatgtggcaggcgtggcattggccaccgtgatctcccagtgcatttctgccgcactggtggtccgctgcctcatgaaggagaccggtcctctgcggctggacttccggcagctgaagatctaccccatcaagctcaagcagatcatgcaggtgggcatccccgccggaattcagggaatgctgttctctctggccaacgtgacggtgcagtcctccgtcaactccttcggtgaggtcattatggccggcagctccgccgccatcagcattgagcagttcatttattccaacatcaacgccttctatcaggccaacgtggcctttaccagccagaattacggcgccggtgactatcggcgcatcaagaagatcgctatgatcagcgttgtgaccggcgttgtgaccacagagcttctgagcgttctggccgtctatttcggcccgcagcttctggggatctattcccccagcgccgaggtggtggcagccggtatggtgcgcctccgctggattgccctgttctacggtctggacgccattatggatgtgatcgtcggttctctgcgtggcgtggggtacaacattctgcccatgctggtcacgctgatgggcgcctgcgcctcccggctcatctggctgtctaccgtattccggcttccagcctaccaccggatcgagatggtttacatcgtctatcctctctcctgggccctgacggccaccactcacctcatctgctatttcttcgtttcccgaaaggtgggccgggaacttcgtgcccacgaagcggagctggccgcccgtatggaagaaagcccggagaaagcagactcctga

SEQ ID NO: 1200 - DNA, 1425 bp, Unknown
  Unknown gut bacteria
atgggcggttattttggagcgatctcccaccgggatgtgggactggacgtatttttcggcacggactaccactcccatctgggtacccgccggggcggcatggtggtttacgggccggagaccgggttcgtccgggagatccacgatattgaaaacacccccttccgcacgaaatttgaaagtgcgctgcatgagttcaagggccacatcggcatgggctgcatcagcgacaccgacccccagccgctgctggtgcgctcccatctgggcctgtacgccatctgcacggtgggtatcatcaacaacatcgacgagctgatcgatacctatttctccgaccacgggcatcagttcatggcccagagcagcggaaaggtcaatgtctccgagctggtggcagccctcatcaatatgaaggaaaatctggtggagggcattttgtacgcgcaggagatgatcaaaggctctatcacgatcctgctgatgacgccggacggtattctggctgcccgcgaccggctgggccgcctgcctgtgctggtaggcaagcacccggacggcagcctgtgcgtatcctttgaatccttcgcctatcacaagctgggctatgaggatgcttacgagttaggtccccgtgagatcgtggccctgacccggaacggctatgagaccgtctctcctccgggtaaggaaatgaagatctgcggctttctctggacctattacggctaccccaactccaattatgagggcgtcaacgtggaggtcatgcgctatcgcaacggcgagatcatggctcgcgacgaggtggcccagggccggctccccaaagtggactatgtggcgggtgtgccggattccggcgtcccccacgccatcggcttcgccaaccgcagcggcaaaccctttgcccgcccctttgtaaagtacacccccacctggccccggtccttcacccctgccaaccaggaggtccgcaaccaggtggccaaaatgaagcagatccccgtttccgagctgattcaggggaaaaagctgctgtttgtggacgattccatcgtccggggcacccagctccgggaaacggtggacttcctctatgagtccggtgcggaagaggtccacatgcgctctgcctgcccgcccattatgtatagctgcaagtacctgaacttctcccggggcaactccgatatggagctgctggcccggcgggtgattcaggagctggagggtgacgagggccacaagcatctggatgagtactccgattcctccacggagcggggtcagtgcctgctcaagtccatctgtgaaaaattcggttttgattctctcggttatcagtctttggacggcgtgctggaagccatcggcatcgaccgggataaggtctgtacctactgctggaacggaaaggaatga

SEQ ID NO: 1201 - DNA, 1695 bp, Methanobrevibacter smithii
atgaatcatgacaaaatgacaaatatcagtgcaaaaagaggatttttatggccatcctttgaaatatattccggagtttccggatttacagattatggacctcttggagccagcttgaagaataatataatgcagaaatggagaaaacaatatgtttctggagaagggttttatgaaatagaaggccctactgtaatgcctaaagaagttttaaaagcatcaggacatgttgacaactttacagatccaatgaccaaatgtgaagaatgcggagaagtatttagagcagaccacattattgaagaagttattggtgaagatgtagaaagcctggaaaatgaagagcttgaccagatagttattgacaatgccatcaaatgtccggaatgtggcggaaaactttccaatatctggaattacaatttaatgtttaaaaccatgattggagccaaaggtgacaaagtaggttatatgagacctgaaacagctcagggaatttttatattattcaaacgtcttgaaagattctttagaggaaaacttccgtttggagttgttcaacttggaaaagcatatagaaatgaaatttcacctagacagggagttattcgtttaagggaattcacacaagcagaagctgaaatatttttaaatcctaaagacaaaagcacccctaaatttagccagatagctgatgaagttttacgcttaaattcccaggatgttcaaataaataacagcgaacctttagagattactgcccgtgaagcacttgacaaaggaattgtagctaatgaaatgttagtttatcagttatacttagccagaaaatttttaaatgaaattggtatccccaatgatgttttaagattcagacaacacttacctggagaaatggctcattatgctcttgactgctgggatgttgaagttaaaaccgacaaatatggctgggttgaaataatcggaattgctgacaggggagattatgacttaacatcacacagcaaatacagtaatgatgatttaaatgtatttattgaatatgatgaacctaaaacagtgaaaaaaacagttgtaaaacctaatttgtccaaattcggacctatattcaaaggagattcccctaaggtaaaacaggcaattgaagaagctgatgtagatgaaatcaaacaggcaattgaaaatgatggaaaatatgtagttagtctggataaggattatgagctaacttccgatttactgcttttcgaagatgttgaagaagaaatctccggtgaaaaaatagttcctcatgttattgagccttcatttggtattgaccgtattgtttattctgttttattacattcatttaaagaaacagacgcaaaagattactttaaatttgcaccttctgttgctcctgtccaagtgggaatttatcctcttgtaaacaaagaaggtcctcgtgaaatagctattgaaataaccgacaaattaagagaatcaggatttaaagttgaatatgatgtaagtggaacaattggtaaaagatatgccagagcagatgaaattggtattcctcttgcaataactgttgattttgacagcttagaagataataaaataactgtaagaaacagagacagtgaagctcaggaaagaatagctattgatgaaataaaagattatttggaagaatattataaatga

SEQ ID NO: 1202 - DNA, 1095 bp, Methanobrevibacter smithii
atgaaaacaactgttagtgtaattaaagctgatattggaagtgtgtctggacactgtgtagcacacccagatttaatggatatttgtgatgaagttttagcagaagctttagatacaaatattttaactgattattatatctcccgttgtggagacgacattgacttgattatgactcatagaaatggggaagaaaacgaagaagttcacgaaactgcttataatgctttcatgaaagctactgaaagagcacgtgaattaaaattatatggtgcaggtcaagatttattatctgacaccttttctggaaacattaaaggtatgggtccaggtgttgctgaaatggaattcaaagaaaggccaagtgaccctgttttagtatactgctgtgacaaaactgaacctggtgcatttaacttacctatttttaaaatgttcgcagatccatttaacactgcaggtcttgttattgacccaagtttacatgatggattcaaatttgaagtatttgatgtaattgaacacagaaaagttatcctaaactgtcctgaagaaatgtatgatttacttgcattaatcggttctactggaagatatgtaattaaaagagtatggaagaaaaacggagaaattgcagcagctatcagtactgaaagattaaacttaatggctggagaatacgttggtaaagatgaccctgcagctattgtaagggcacaatctggtttcccagctaatggtgaatgtgtagaaccattcgcattccctcacatggtaagtggatggatgagaggttctcacaacggtcctatgatgcctgtatctgaaagagatgcaaatccaattagatttgacggaccacctagagtaatcggtttaggtttccaagtatctgatgctaaattaattggtcctgttgacttatttgatgaccctgcatttgatcctactagggaagaatctgcaagaatcgctacctacatcagaagacacggtccatttgaacctcacagattacctgctgaagaaatggaatatacttcattacctggtgtaatggcaaaactcgaagacagattcgaagatatggaataa

SEQ ID NO: 1203 - DNA, 1458 bp, Methanobrevibacter smithii
atgagtaactatttgattcctcttatggtagtagttcctatgctttgtgcaatacttgtaaatgcttttgctaaatttaataaatctattaaagtattaacatttgtagttgctatctgtttaccgattattccattgctttccaattatggattgcacttctttggaggatatactccgatgttggataatgcaactggtgtaatttatcatccggctattacttatgcttttgacatgctgcaacagatattcatagtggcagtaggtttaataacatttttagtagcttttatttacttgtcaaaatataaaaaagcatccggacagtatttgttcttattgttcatgggtacagcatctgtaactgcattaatgcttactgatgatatatttaacatgtttgtattctttgagatacttgcattggttcaagtaggtattgtaattgcgtctcctatggattacagttatgaaatggctcttaaatatatgattttaggatctattggaagtccgataatgcttttaggaatcggattcttacttgcaagtactggtaatattaacatttctgatataattgtggctcttcacaatggaactttaagttatacctccccagtatttttaatgtcatttgctttaatattcttcggatggttatatgcttcaggtttgcctccgttccatattataaaatccggaatgtacagtaaagcagaacctcatggtgcagctttgcttcaaacatttacggttatttcaatgatttccattgtattgataatgtttagaatattccatgaattgccaatatttgaactgttattggttttgttttcagtattggctatgattctaggtgtttcactggctttaactcaaacagacttcagaagaatgatcggttatttggcagttggtgagcttggttttatcggtttaggtattggtcttggaactcaatttgcaattactgcaggtcttttccaggcacttaatgaaataattactactgcattattatttataggattcggacttattgcttatgtaactaaagaggaagacacccgtaaattgggaggattgcttgcttatcatccgaaagttggtttaatgcttttatttggtggtttggcaatggctggtgttcctccattcagcggattccaaagtaaattaatgcttgttcaagcttcattaagttgcggatatccggaattatccattcttgcggttatagtaagtatagctacatttgttgtatttgttaaaacattttatggaatgtttttaagaccaaaaccaaaaggtttggaagtccctgacaatgaggttcctaaatccgctgtatttgcaatggttgttttattggctttaattattatattgggtctttgcccaggtcttgttacaaatggaatttatgagtttgtaggaggtattttatga

SEQ ID NO: 1204 - DNA, 1065 bp, Methanobrevibacter smithii
atgggaaattgtgcaagttctcttattcaaggaatacattattatgatggaaaaaatcctgatgatgcaataggattgatgcattgggatatcggaggatattcaccttcagatattgatgttgttgcagcttttgatattgatgctagaaaagtaggtaagagcattgatgaagctatttttgcaaaaccaaattgtacaactatttttcaagaagaaatcccaaaatatgatgtttgcgtaagtatggggcatgttttggatggtgttgcaccacatatgtctaattatgacgatgattacacttttgttgttagtgatgaagaaccagttgatgttgttgaagttttaaagaaaagcggtgctgaaattttagtgaattatttgccagttggatctgaaaaggcagcaaggttctatgcacaatgtgctcttgatgcaggaattgcttatgtgaattgtatgcctgtttttattgtaagtgatgatgagtgggatgctaaattcagacaaaaaggaattcctattgttggagatgatattaaggcacaaattggagctacaataactcacagaacattagctaatttatttaaagataggggagttaagctggacaggacttatcagattaacacaggtggaaacacagactttttgaatatgcttaacagggacagattagactctaaaaaagaatctaaaactgaagctgttcaggctgttgtggctgaaagaatggatgacagggatattcatattggacctagtgattatgtcccatggcaggatgataacaagttatgtttccttaggatggaaggccgtacttttggtgatgttccaatgaatattgaacttagattaagtgttgaagactctccaaactctgcaggctgtgttattgatgctgttaggtgctgtaagcttggtttagaaaggggtattggcggtcagttaacttcaatttcttcttatgtaatgaaacatcctccagtccaagttactgatgatgaagcttatgaaaatgttgaaaaatttatttctggcgatttggaaagataa

SEQ ID NO: 1205 - DNA, 1785 bp, Methanobrevibacter smithii
atggttaataaaaagatagtaaccatcttccttctactttttttaataacatcaacaatctcttgtgtttatgcagatgacgatgacagaagctattccattacacaggcacttgtagacattatagttgatacaaacggaatgctccatataactgaaacctttgattattcatttgacggaacatttaatggagtttacagagacatacccctgaaagagggagaaagtatttcaaatattcatgtatcagcagaaggtgcatatacaaaagtagagcaacatcaggaagatggaactcagcatataaaaatttatttatattcagatgctgccaaaacccaaccaataagtgatacaaatgttaaagtccatatcagctacgatatgaaaaatgtagtgactgtttatcaggacactgcatctctacagtatcagctttggggagaccagtgggcagtaggagttgatgaattaataacaacaatacatttacctaatgataatggtaatgaatactggttaaatcctacaaaatataccaaaaccagctcattagacggaaatacaataacttcaaccagcaattacatagattctggaaacttttacgagattgaagttttaatgcctgaaagtgactttgcaaactcaccaaatgcaatccatattgataaagcagctaaaaaagaaatagaacaacgttacaatgattatcaggcaaatgaaaaaatgtgggacaatatcggatcacttataggaatactgtttattataagtccagtaattccattttttatttaccgcaaatatggtgtagaacctaaagttaattatgaaggaatttatgaaagggatcttccaagtaacgaccccccagctgtagttaatgcattaatccaaaaaagagacaatattggaactcctgatttaaaaggatttgaagctacaataatggatttgattaatcgtaaaatatttaaaattaaatcaaatgaagaaaaacatttaattatagaattagatgaaacaaactacgacagtttaacattagatgaaaaagatgttttcgatatcttcaaaacaatagctaaagacaatctcttggatttaagtaatgttaaagattatttatctgatgaacataatgcggaatggttcaacaacagaatcaaatcatggaaaaatgatgttgcctacgaacatttatcaaaatccagattgaaacaattctttaataacgaaggaaataaaatagctacttactattcaatagcttgtataattattggagttctgtttggttcattattctatctggaaaatggtttaaatacaactggaggaacaattggacttataggatcagtatttttatttatttcaggatttgtgatttacatgttgcccgaagatatcttcggacaatggacaaaagaaggcagactatatatgctaaagtggaaaaactttaagaagtttttaagtgacaacagtttaatgaaagaacaccctcctgaatcaatagttatatggaatcaatatctcgtatatgcaacagctcttggagtagctgataaggtttacgaatccatgaaactgcatgttggtgaaggaaacattgatgacgattatcttgattcatactactattatggaacaggatattacatgatgcataatgcaatagataccggaatacaaacagcaaatgcaaattcagacagctccggctttggtggcgttggtggaggttccggcggaggaggtggaggagcattctag

SEQ ID NO: 1206 - DNA, 1233 bp, Methanobrevibacter smithii
atgaaatatgtaatttttattcctgacggttcaagtgactatccaatcgacgaattggacggcatgactccacttatggcagctgatactccaaatattgataaaatggcaaaggcgggttttggaggtttaaccaataatgttcctgatgcatatactccaggttctgatgtagccaatatgagtattttcggatttaaccctgcagattactatacaggcagaggacctctggaagcaggcagcatgggtattgaaaccacagataaggacgtaattttcagatgtaataccattacccagaaggacaatcatatggatgattttaatgcaggccatattacctctgaggaagctgaaatacttatggacagcttaaatgattatttcaatggaaaatatgatgattttaaaggtagattctattcaggagtcagttacagacatctgtttgtatattcctgtgacagtgctgaagatgctaagctattggctgatttgaagactatgcctcctcatgatattgcaggtgagaatttggatgaaaacacctccggcgacagatgggatgaaaaattacccaaattcattaagaaaatcatgtgggaatcaggggaagttcttgaaaatcatgaagtcaataaaaaaagagtggaaaatggcaaaaaaccggcaaatatggtatggctgtggggtcagggagtaacaccaactttacctaactttaaagatgtttacggattggatgcagcagtaattactggtgttgatttgttaaaaggaataggtgcttttgcaggctttgacattattgatgttccaggagctaccggatactttgacacagattatgaagctaagggaaaatatgcaattgaagctttaaaaaaccatgatgtagtgtttgtacacattgaagctcctgatgaagcaggacatgcatcagacacagctgaaaaagttagagctattgaacaaattgacaagcatattgtaggtccggttttagacagtttaaaaggtcaggactttaaggcagctattttgcctgatcatccaactccggtttcagttggaacccacacaagagatgatgtgcctttgataatatattcttctgataaaacaggcgatgaatgtgaatcctttgatgaacagagtgttcttaaaggcagtttggataaaaaagaaggatataaattaatgtcaaggctaattaatgatgatttttag

SEQ ID NO: 1207 - DNA, 2016 bp, Methanobrevibacter smithii
atgaaagaatgtattgtaggattagcaggaaaccctaatgtgggtaaaactacagtattcaatcaattaacaggtatgcatcagcatgtaggtaattggccaggtaaaactgttgaaagagcagaaggccattttgatcatgatgatactcgctttgatgttgttgatttgcctggtaattatgcattaagtgctcattctattgaagaaatcgtttcaagagatttcattgtagatgatgattctgatgtgattgttaatgtagtagatgctgctaatttagaacgtaatttgtatctgactgttcaaatgatggaattaggtgcaaacttagtaatggctcttaatatgaatgattttgcaaagaaaaaagaacatattattgatattaaattaatggctgaattattaggttttccggttgttgaaattaatgctaaaaataaggatgggtttgatgaattattatctacagttaaaaaagtagctaataaacatattgatactactcaaaaattggtttacggtcctgaattaagagaacatttgggggatcttcaggcattaattgaaaaggacgttaatttaactgatgttccagcaatgtggacagcaataaaattattggaaaaggatgctattgtaatagaaaaagttcaaaaatccaaatattcttctcaaatattaagggaaactgataaagtagctgcacacttagcagatatttataatgaaggtgcagaagaagtaatagctaatgcaagatatgcatttattgatggacttatgaacgaagcagtaagtaaacctgctgtggaaaaaccaacagtatctgacaagattgataaatatttgactaacagaattttaggaattcctatatttttagttataatgtatattatgttccagcttacctttataattggagcacctttccaggatctgattgatgaaggttttggtttgttaggtgaagcaattggaggtctgttaggtgattcagtactttcatcttttattgttgacggtattattggaggagtaggtggagtattaacctttttgccgattattataattatgtttttattcataagtatcctggaggacagcggttacttggctagagctgcttttgttatggataaagttatgcataagttagttggtcttcatggtaaatcatttattcctatgattttgggattcggttgtggtgtgcctgctattatggctactagaacaatggaaaacgaatctgaccgtttgctttcaatgatgcttgttccgtttatgtcatgtactgcaagattgcctgtatatgcattgttgatttcagcatttttcgctgcaaatcagggtgaaatattattttcaatttatttattaggaattgttgttgcacttgttgttgcagctattcttaaaagaactatgtttaaaggaatgtcttccccatttgttatggagcttccgacatataaggttccatcattaaaaggtgtattattacatacctgggataaaactaaaggattccttagaaaagcaggaactattattcttgtagcatctatcattgtatgggttttaagtagtgtgccatttggtgttgaatacggatctcaggaaagtgcaattggtcaaataggtactgcaatagcaccaattttcgcccctctcggtttcggagaatggcaacctgcagtagcaatattatttggtttagttgctaaggaggttgttgtatctacattcagttcactgttcggtgtagaagaagagggttcgggtattgaagctgctgttcatgatttatttactccactttcagcatatgcatttatggcatttgtgctgctgtatgttccttgtttcgcagctatcggtacaatcaaacaggaaaccaacagttggaaatggccgttaactatgtctgttatcacattagcaaccggttatattgtagctcttataatatatcaaggcggttcgttactgggttttgcttag

SEQ ID NO: 1208 - DNA, 963 bp, Methanobrevibacter smithii
atgttgtatacaggtatgattgaagcatttattattgtatttattttatcagctgtaggttcactggttttaaatatggtatttcgcttttttggtaaaaaaggttatttgggtaacttgtatccaaatgtacgtggtggaattcctcgagctataggtttagttccatttattatattgtgtttctttttcttaccggaatataatacattagttttaattatgggtctttttgcatttttggatgatgttttgggaagaactccttctccaattggtattgaatggggtcaacttttcagaggtattggaatgctttttgttatgattgcaggattctattccggaatgggtttatcttcaattttcattgcattgctggtacagcctattaacatttctgatatgcagccgggatcaacctgtatggttacagtcatcatgtctgttgtaagtataatctgtatgctgattgtcgggtctccgcaagtttcagaattgcctgctatttacactcctttattattgataattgtttgtatagcatattctccattggattttgccggaaaaatcatgttgggggaagttggaaaccattcatttgcagttgcattgggaatttgtttctatttaatcggaggattctggtgggtaattgcactatcttttgtgactgtatgtcttacagcatttgttagaagaagcactcttaaagtatttttcaaccaaagattgggcattttaaatccgacatttggagatttcttcatggatgttttaactggtggaggattgggagatttattcagaagaatcatattaaaaacaaaacagtatgatgtggaaaatccgactttgataaaattaggatttagaagacttctttataatccttatgctccaactcatggcagtcatgaacagaaaaaatcatataaagtaagacttgacgggagttaa

SEQ ID NO: 1209 - DNA, 1503 bp, Methanobrevibacter smithii
atgtatgatttaattaaagaagctattgttgatgacgatgcagctattgaattgtccaaaatggataaaaatgtagttgaagttgttgatgcaatttctgaattgtctttagaagacacaatgaaattgggaatgaaatttaaaagatttccattaggctgtgacttgaccgaagcggttgttggaacatgtgcgtctgatttggaattaatggaattacttggaaactgccgtttatcagatatgttgggattgcctattcatatttgcgcatatgcatttgcagatattgctgaaaaacatggcatgcgcggtatcgaagtaatgagaaaggtgtatgacagtgttgatgttcctcttgatttagatcattttggtgaaaacggacctatgagacttccgcagaatattgtaggatgtggcggtgaatgttataataaaggaccggtttatactgaatgtccgagagatagaattcatgaaagattaattgataaagaaaaagcagaatcttcagataaggaagaatgggtaaaattatcatcttcagtagctattaatttaaccagtgaacagactggtgagggtcatgcggcaccttacagggaagcagaggatatagctaatctggctaagaaataccagagaggtcttgaagctatcatgtttattggtgacggttatgatgatcttattacaggatttgaaaaagctattggaataggtgctgatgtatttgtacttgaaggaggaccttataatggtgctaaaaatcctgttgaagcatttgcaaaagcagttgcagcttccagaatattatgtccaggtaaagtggtaggtactaatggtgcttatgaaagagaatgtagaataggtctcagatctggtctgaatgttattataactggttttccaaaaaaccatcacggatatatgtgcggatatgaacctggaactgccagaagaggcaaatttggtcttccaagaataatgcaaataatgaaagaggaagttcataatcctaatgttcaggttcctgttttaaaagaagaattaatcccacttacaacagcaattaaaatagctggaagagattatatctatccgaaaaagattggtgcatatactgtaggtgatgcacactgggctactttaattaattcaaaaatgtataaaaatcttactttaaaaaatgatttaaatgatattgtaaattctgttaacggaaatagtgtggcattacttggtgggaggttcctttcctgggtaatagctaatgaattggataaacaagttgatgaaattattatatctgatgcagacccatgggttcaacgtatgactgttgagaacttgcaggatgcattagatgcaactattattcctggagatggtgatgtaaatagtgctaagcaggcagatagttctattatctcttcaacagttccaggtatcagtaataaaattttaaataaagttcctaatgcatttaatattgtataa

SEQ ID NO: 1210 - DNA, 1494 bp, Methanobrevibacter smithii
atgtttgaaaagatattaattgcaaatagaggagaaattgcaataagagttatgcgtgcctgtcgtgagcttgatatccaaagcgtagctatatactctgatgcagatacaacatctctttatacaaactatgctgatgaaagctatcctttaggtaacccttctccagccaagtcttatttaaatatagaaaaaatcatagatattgcacttgaatccggagcagatgctattcacccaggatatggatttttagctgaaaaccctaaatttggtgaagcatgtgaaaaaaatggaattaaacttataggacctacaggtgatgtaatccatcaaatgggagataaaataacttcaaaagctcttatgaaaaaagctggagttcctgttattgaaggtactcctgaaggagttagtgacattgaggaagctaaagaaatagccagacaaattggatatcctgtaattgtaaaagcttctgcaggtggtgggggaattggtatgcgtgctgtttatgaagaagatgaattagtacgtgcaattgaatctacccagtctgttgcttctacaaactttggagactcaactgtatttattgaaaaataccttgaaaaacctagacacatcgaatttcagttattggctgatgaacatggaaatgttattcatgtagcagacagggaatgttccatccaaagaagacatcaaaagttacttgaagaagcaccttctccaattatgactgaagagcttagggctgaaatgggagcaagtgcagtaaaagctgcagaatatatcggctataccagtgcaggtactgttgaattcctgtacgacaacggccaatattacttccttgaaatgaacacacgtattcaggtagaacacccaattacagaacttgttaccaatactgatttgattaaagaacaaataaaaatagctaatggtgatgaactcagttacgaacaaaaggacatacaagtatcaggtcatgcaatagaatgtcgtattaatgcagaagatccgttaaatgactttgcacctaaccctggtaaaattactggttacaggtctcccggaggacctggtgtacgtttagacagtggagtttatatgaattataccattcctactttctatgattcaatgatttcaaaattagtaacctggggaagaaccagagacgactccatagccagaatgaaaagagcattaagcgaatacattattttaggagttaaaactacaattccattccataaagctatcttaagaaatcctaactttatcagcggtgacttaaacactcactttattgaccaatacaaaaacggtattgaaagtgaaatggttaatgtaattgcagaagatttggaaaatgtaaataaaatgaaatccactttcatgccaagtaaaaaaatagctgcaatttctgctgctgttggatcttacttaaatactgctaaaaaccaacaaatgaataaaaaataa

SEQ ID NO: 1211 - DNA, 2928 bp, Methanobrevibacter smithii
ttggggcattggataattattattaaggagggtactatgacaaaagactctaaaaaacagattatcattaaaggagctaaagaacataatttgcaaaatatcgatttagctattcctcgtgatgaatttattgtaataacaggattaagcgggtctggtaagtcttcacttgcttttgatacaatttatgctgaaggacagcgcagatatgttgaatctctctcagcttatgcaagacaatttttagggcaaatgaaaaagcctgaaatggaatatattgaaggtttgtctcctgctatttcaatagatcaaaaaaccacaaaagaaaacccaagatctacagtaggaactattactgaaatttatgattatcttagattattatttgcaagaatagggacaccccactgtccaaaatgtggaaaggaaatatctcaccaaacattgggtcaaattggagacagtataatagaagaaggggaaggtaaaaaaatacatattttagctccggttgttagggataaaaaaggccagcacaaggatgttttggatgatttgagaaacaaaggatttgtaagggcaagagtggacggtgaagttagagaccttgaagaagatattgaccttccgaaaacttacagacacagcattgaagtagttgtagacagactaaaaataagaaaggatgttgactttaaaagaagactggttgattctctagaaacagcttcagagtttgcagacggactgataaatgtactgttttcagatgatggcagagattatgagaaaaaatattcagaacactttgcctgtgtagactgtggaataaactttgaagaactcactccaaggatgttttcatttaatgcacctcagggagcatgtcctgaatgtaatggtattggagttaaaatggaaatagatcctgatttaattattccaaataaaaatcttacattaaatgaaggggcagttactccttgggcaaaatcaaataaaaaagaaaattattatcatcagatgctggaagcagtatctaaacattttaacttcagcatggacactccgtttaatgaattaaccaatgaacagcaggatataatattatatggctgtgacgataaaataccattttcatttaaacgtagaaataaatcttatcaagttaatcgtcagtttgaaggtgttattccgagaatggagcgtttatacattgaaaccaaatcaaattacagcaggaaatacatttccaaattcatgagtgacagaaaatgtcatgtatgtcatggaaaaagacttcgtcctgaggtactggctgtaactgttggtggaaaatcaatagctgacgtagtggaaatgtcaattaaggattcatatcagttcttcttgaatttggaacttactgacagagaacagttcatagctaaagaggttttaaaagaaatcagacagagacttaaattccttgtagatgttgggcttgactatttatcaatggcacgttcatcaggtacactgtctggtggtgaagctcaaagaatcagattagctactcaaataggctccggattagttggtgttctatatattttagatgaaccaagtattggtcttcatcaaagagataatgtaaaacttattgaaacactaaagagacttaaaaacttgggaaatactttaattgttgtagaacacgatgaagaaacaatattgtctgcagattatgttgtagatataggtcctggagcaggagaacacggtggaaaagtagttgcctgcggaactcctgaagagattatggagtcacatgaatctgttaccggtcagtatatttcaagacgtgaaacaataccaattccacaaacacgcagatcaggaaatggtgaatcacttataatcaggggagccagacaaaacaatcttaaaaatattgatgttgaaatacctttaggcaagttcacatgtgttactggagtaagtgggtctggtaaaagcagcctgattaatgaaattttatacaaagggttaagcggaaaattaaacaataaatttacctttgcaggagattatgataaaattgaaggtgtaagcaacattgataaaatcatagctattgaccaaaaaccgataggacgtactccaagatcaaatcctgcaacttatactggagttttcacggatattcgtgatttatttgcagaaactccagaagctaaagctaggggatataaacctggcagatttagttttaatgtaaagggaggaagatgtgaagcatgttcaggtgacggtattgtgcaaattgaaatgcactttttagctgatgtatttgttccatgtgaagtgtgtggcggcaaaagatacaatgaagagactttagacattcgttacaaaggtaaaaatatttatgaagttttggaaatgactgttgaagaagcattggacttttttgaacatatccctaaaatacataaaaaacttaaaaccttgcttgatgtaggtttgggctatatgaaaataggtcagccagctactactttatcaggtggtgaagctcaaaggattaaactagctaaagagctttcaaggtcaaatacaggtaacacattatatattttggatgaacctacaactggtcttcattttgcagatattaagagattgttgtcagttcttgccagattgactgatgcgggcaattcagttgttgttattgagcataatttggatgttattaaaacagctgattatattattgatttgggtcctgaaggtggagatggtggtggaaaagtaatagctaccggaactccagaagaaatagccaaatctggaacatacactggtgaatttttacaaaaaatccttagtgaaaatatcacaccttatgccaaacagcttgttaaagagaaaatgagcaagtaa

SEQ ID NO: 1212 - DNA, 1353 bp, Methanobrevibacter smithii
atgatgtgtggacttgaaatccacgtacaattagaaactgaatcaaaattattttgtgattgtccaacaaattataaggaagcaccagcaaactcaaacatctgtccagtttgtttaaatcaaccaggtgctaaaccatatccaacaaatgaaaaagcaattgaaaatgcattaatgatttctttaatgcttaactgtaaaatcgataaaggtttcacctacttcatgagaaaacattacgattatcctgatttgccttcaggataccaaagaacttcagtacctatcggttacgaaggagaactaaatggagtcagaatcagagaaatccatatggaagaagaccctggccaatacaaacctgacagaggtactgttgattttaaccgttccggaattcctttaattgagattgttacagaaccggatataaaatctcctgaagaagcaagaaccttcttaaaagagctcatccgtgtattgcaatatagtggaggggctcgtggagaaggtactatgagagctgatgtaaacatctctattgaaggtggaaacagagtagaaatgaaaaacatcaactccattaaaggagcttacaaagcattgaaatttgaacttgttagacagaaaaaccttatgaaaagaggagttgaaatcaaacaagaaacacgtgcataccttgaatctcaaatgattactgtaggtatgaggttaaaagaagatgctgatgattacagattcattccagatcctgatttgccaccaatggaaatctccgatgctcaaattgaaaatgttttagaaataatgcctgaagcaccgcacaataaagtaagaagatttactgaagaatatggaattgatgcagaatctgctaaagtgttaacttcagaacttgacctggctatagcttatgaagcagtagctaaacaagtggatcctaaatttgcttcaatgtggatgagagatgaacttaaaagagtattatcctataacaaacttgattttgcagatagcggaatattagttgaagatattgtagaacttttagaaatgcttcaaaataaagaaataaccaccaaagcaggccaaagaatcattgaacatatgccaaacaataaacaaactccaaaagcaatagctgaagaattaggtttgcttggtgttgtaaaagatgatgaagtgatagctgcagtaaaacaggctatcgaagaaaatccaaaagctgtaaatgattacttggaaggacaaaaatcttcacttaatttccttgtcggccaagttatgagattaacaagaggaaaagcagaccctggagaaactgttaaaatcttaaaagaaaacatagaataa

SEQ ID NO: 1213 - DNA, 1374 bp, Methanobrevibacter smithii
atggagtatgatttaatgactgaaaaagttaacgaagaattaatggaaagcgtaattaaacaaatgaaagaggataatattaaatttatccgtttacaatttgttgatataaatggaactgctaaaaacattgtaattccatttaaagaagatgacatggcagaattatttgttgaagggatgttatttgacggatcttcaattgcaggattcgtaggaatcaatgaaagtgaccttgttctcaaacctgatatccacacttactcaagattatcctggaggcctgaagaatctgcagtatgtagatttatttgtgatgtctggactcctgacggaaaaccatttgttggagacccaagaggtatcctgaaaaaatctttagctaaaattggaaaaatgggattacaatataacataggtcctgaaccagaattctttattgtagatattgacgatgaaggatacccaatgccttacgatgaagcaggatactttgatgttgaacctttagataaaggacctgatttcagaagagaactaaccttaaacttagaagaattagatttcgaagtagaagcttctcaccacgaagtaggacctggtcaaaacgaaattgcatttaaatttaaagatgcattaaaaactgcagatgctgtaattacctttaaacaagctattaaagctattgtagacaacatggctacttttgaccaaatggattacagagtaacctttatgccaaaaccgttctttggtgtaaacggtagtggtatgcactgtcaccagtcagtattcaaaggagacagaaacctgttctctgacccaaacagcgaaaccggattatctaaagacgcacttcacttcatgggaggattgcttgctcacgctccagcattaaccgcaattaccaaccctattgtaaactcatacaaacgtttagtgccaggttatgaagctccagtatacagagcatacggtcttaaaaacagatctgcattaatcagagtacctgcagctcgtggtaaagcaactcgtattgaatacagagcaccggacccagcatgtaacccatacttagcatttgcagtaatgttagaagcaggtattgacggtattcaaaataaaattgatcctggagaacctaccgaaatcaacatctactcattaaccgaagaagaaagggaagctatgggaattcaagttttaccatccagtttatgggaagcttaccatgcacttgaagaagacccattgatattatccactttaggagaccacaccagtgaaaaattcctagagctcaaatacaaagaatgggacgaataccgtgtacaagtattcggatacgaacaaaacaaatatttagatatttaa

SEQ ID NO: 1214 - DNA, 1071 bp, Methanobrevibacter smithii
atggcaacatttaaaggatttgcaatgaaaaaactgaatgaaactggttgggttgaaaaagaagtcccggaatgtggaccattagacgcaattgtaagaccaacatgtgtctctccttgtacttcagatatacatacagtatgggaaggagctatcggagatagaaaagatatggtcttaggtcatgaagcagtcggtattgttgaagaagtcggcagtttagtgaaaaatatcaaagtaggagacaaagtaattgtacccgctattactccggactgggatgatgaagctgcccaaagaggttatccttcacaaactacagaaccattaggcggatggaaattttcaaatttcaaagacggtgtttttggagaaagattccatgtcaatttagctgatgctaacttagccctaatgcctgaaggattaactgatgaagctgcagtaatgcttgtagatatgtggtctaccggtatgatgggatctgaaaatgcaaatataccattaggaggaagcgtattagtaattggaatcggtgctgtagggctttcagcaattgcaggtgctgctcttttaggtgctgcagatatttatgctgcaggaacccgtcctgtttcagtgaaagttgcaaaagagtacggagctacagaaattatcaattacagggaagctccaattgatgaacaagttagagaagctacaaatggagcaggtgttgactctgtaattattgcaggaggaaacttaacaaacacttggaaagaagctgtagctagtacaaaagccggaggaacaatatcaaatgtaaactacttaagtggagcagatgatgttttaattcctagagtagaatggggttgtggtatgtcaaatatcaatatcacaaacggattatgtcccggaggacgtgtgagaatggaaagattatcccgccttgcacttaccaaccgtgcagacccagaactcttggttacccacaggtttaaaggtcttgaaaaaattgaagatgcattatacctaatgaaagacaaaccaaaagacctgattaaaccaatcgtaaaaatagattaa

SEQ ID NO: 1215 - DNA, 2457 bp, Methanobrevibacter smithii
atggaagaatttttaaaaaaatacaatacttcagaagaagggctgagttctaatgaagtaacaaaacgccaaaatcaaaatgggctgaatgaattaaaagaaaaaaagaaaaaaagtgcggttatgctctttttagaacagttcattgatgttttaatagctctccttattgttgcagccattgcagcatattttgttggagacgttatcgactcatgtgtaattttaatagctgtacttttaaatacagtaatcggattcatacaggaataccgttcagaaaaagcaattgaaatgcttaaaagcgttacaacatcatatgcagttgttagaagagatgggcaggtgcaaaaaattgatgcaaaagaattgaccattggagatattgtaattcttgaagagggagacaagattcctgcagatttagtacttattgaaaccaacagactgaaagttgacgaatcaaatttgaccggagaatctgcacctgttgaaaaatctccaaaagaagaagcatatatggattcaaatgtaactttaggaaacggagtgggaattgtaactgccataggtatggacacatcaataggaaaaatagctgaagtgattcaggaagaaaagggagaaactcctcttcaaaagaaaatggacaaacttggaaaaacactttccgtaatagctattattgtttgtgtatttatattcatttttgaattattcagaggaattcctattgttgaaacatttttaacagcagtttcacttgcagtagctgctatacctgaaggtttgcctgcagttttaacattgacattagctttgggaatgcaacaactgaccaaatccaatgcaattgtccgcagactgctttcagtagaaactttaggttcatgtactgttatctgcagtgacaaaacaggaacattaactgaaaataaaatgactgtcagagatgcatttttctataatgaaaacaaatctttagaaatcaatgcactttgtaacaattccacaatcagagacggcaaaactatcggagatccgacagacggtgctgttttaaaatacagtcaggacaataactattttaaagaggatttgcaggaaaaattccctagagttgatgaaatcccattagacagcagccgtaaaatgatgaccactatacatgaaaatggtgaaaagtatttggttctcactaaaggtgctccagaaatcattatcggcaaatgtaaacacatagataacaatggaagtgttgaaattcttgatgattctgtaaaggaaacactaactgaaaaaataaatgaaatgagtgataatgcattaagagttttgggaattgcatataaaaattccgaaaatattggagacaatgtagaaaatgatttgatatttacaggacttgtcggaataattgatcctccaaaggaaaatgttgacaaatcaatagctgcatgtaaaaaagctggaattaaagtaagaatgataacaggagaccatctaaaaacagcagcatctattgcccgcgaaattggaatcctgacagacgggaaagtaattgacggtgaaactctggataaattaagtgatgaagagtactttgagatggtagacgacatacaagtttatgcaagagtaaaaccagagcagaaaatgagaattgttgaaaccctaaagcaaaaaggcgaaattgtttcaatgacaggggatggagtaaacgatgctcctgcacttaaaaatgcatctataggagtggctatgggatcaggtactgatgttgcaaaagaatcaggagatatgattattcaggacgacaactttgaaacaatagtaactgccattcgtgaagggcgtaaaatatacgacaacattaaaagatttgtcaaattccaggtatcaacaaatgtcggagctattttaacaattgtcggaacaagtattttcatgcttccggtgccatttaaccctgtacaactgctttggattaacattgtaatggacggacctcctgcccaaactttaggaatggaaggtagcgaaagaaatattatgacaagacagcctgaaacaggagatattctgaataaaaaggtattgataaaaatatttattgcaggtcttgtaatggcaataggttcaatagcgctgttcagctacaaattggcaattggcgcaagtcaaaagcaggcaatgactgtagcatttaccttatttgtaatgtaccagttattcaatgcatacaattcaaaatcaaattccgccaaaaaaagcacttacctttatttggccattatagcatgtttcatattgcaggtattgattgtatatatacctgaactgcaaataatattcagaacaaccagcatcggacttacagactggatattaatattcataattgcagctacaatattagtgtcaaacagaatagcaaacaaaattgtggtagaatga

SEQ ID NO: 1216 - DNA, 1167 bp, Methanobrevibacter smithii
atgaacacaaatgaacttattgaagctgaagataaatattttattaacacttttgcaagacaaccaattgttttagaccatggtaaaggtgtaaaagtatgggataaagatggaaatgaatatattgatatgtttgcaggaattgctgtaaatgctttaggacatgcgcatcctaaattagttaatgcacttcaaggccaagttgaaaagcttattcatgtttcaaacatttactataatgaaccagctattgaatatgctaaaaaattacttcctttaacagaatttgacagattattctatgcaaacagtggggcagaagctaatgagggagctattaaattagctttaaaatacactggtaaaagtgaaattattacagctaaagactcttttcacggaagaactttattgacattggctgctactggtcatgaagaatatagagaaccttatttaaaaaatctcccacaaggatttattgaagttccatataatgatattgaagctattaaagaagctatcagtgatgaaactgcagctattatgcttgaaccaattcaaggtgaaggtggagtaaatgttccttccaaaaagtattttgatgaaatagcggaaatctgtgctgaaaaggatattcttttaattttagatgaagttcaaacaggttttggaagatgtggaaccctctttgctcatgaactttttgatataaaggcagatatcatgactatagctaaaggtgttgggggaggagttcctatgggagcatttcttgcaactgaaaaagtagctggcggttttgcacctggagatcatggaactacttttggtggaggtcctttagtatgtgctgcggccaatgttgttttagatactattttggatgaagatttattggaaaactccaaaaaagtcggtgcttactttaaagataaattaaatgaactaaaagaaaaacatgataaaatagttgatgttagaggacacggattgatgattggtgttgaattgtctgaaagtggtgctagatatgttgataaattaagagaaatgggattcttaattaactgcactgcaggcaatgttttaagatttgttccgcctcttataattaccaatgaggaaattgataaatttgttgaagctttagacaaagctctttaa

SEQ ID NO: 1217 - DNA, 1386 bp, Methanobrevibacter smithii
atggctgatatgaccaaaggaaaacatgcaaatattgaattaataactggagaccctaaaaaagctattaataaattagcttggcctatgatgctatcaatgcttcttataatgctttataatttagcagatagtgtatgggtatcaggacttggagcagatgctctagcagcactaggttttataacaccactatttatgattattatcggacttggaaacggaataggtgccggtgcaaactcattaatcgcaagagcatttggggctaaaaaagacgaattagcaaataatgctgcactgcactctgttgtattaactgtaatcataggaattgtaataccaatcatattacttccgttaatacctgaaatagttgtaattatgggtggagccagcgttacagaattatgtatggattacagtaaagttacatttggattattgattgtatttttattctcatcagtactttcatcaatattaaggtcagaaggagatgtaaacagagctacaatcgcaatagctattactgcagtattaaatataatcatagatccgatttttatatattatttaaatatggggatagctggggctgcatgggcaacagtaatctctgcaggaatttcatgtattgtaatggcttactggatatgggttaaaaaagacacctacatgaatttaagctttgatcaattcaaaaaaagcaaaggaatcatagttgaaattatgaaagtagctataccttccactgcagagcaattaattatgtccggacttacaatggcaataaatgcaatgcttgttatagtttcaacaacaactgcagtagcagtatatactgcaagtatgagaattgtatcaatggcaatgattccattaatgggaatagctactgcacttttaacagtagcaggagcggcatacggtgcccgtaactatgaaaaattaaaaaccagtttcacatacagtatcaaattcggattggttatttcattgattttaggagctctaacattcatatttgcaccacaaatcgcattgctgttctcatattctgcagcaacagcatatcttacacctcaaattgcatttgcacttagaatattctgtttcttcttaatattcgtaccgttcggtattgcaggatcatttgtattccagggagttggaaaaggaacatcttcattactaataactatcataaggtcattatttgctgaagtagtctttgcatacatgtttggaatagtgttaggttacggagaaatgggtatctttgcaggagtaattattggaagctttatcggttccatgtttggttacagctgggcaagattattcattaaaaaacttaaaattaaatttggtcataccgactaa

SEQ ID NO: 1218 - DNA, 1380 bp, Methanobrevibacter smithii
atgaggcaattaataatgtcagataaaaaaagattattcgggacttttggagttagaagagtagctaatgaagttttaactcctgaatttgcatccagacttgcagcatgttacggatcagtagttcaaggaacagtagctgttggtggagatacaagaacaagcagtcctatgttaatggaagctgtaaaagctggacttttatcttccggttgtgatgttgtagatttaggaattctgcccactcctggagtccagtatggagttcgtaagtattatgacggcggagttatgattaccgcttcacataatcctccaaaatataacggaattaaatttttagatgaattaggtattggaattcctgatgaaatggaattggaaattgaaaaattatattttgatgaagaaccgaaaagagctcattggagtgaaattggccagttataccacaatgacaaaattattgatgaatacatcgatgaagcaatcagcaaagtagatgttgaagccattaaaaaagctaatttgaaagttgttgttgactgcggttccggagcaggatcatacactgccccttacctgattagaaaattgggctgtgatgtaactactctaaactgtcaggcagacggatttttcccaggtcgtgaccctgaaccaattgaagaaaacttacaggagctaattaatgttgtaaaacagttaaatgcagatatcggacttgctcatgacggagatgcagacagaaccatctgtattgatgaaaaaggaaactttgtacttggagacaaaacattttcacttgttgaaaaacagatgcttaaagaaaacaacggaggtacaatagttacaactgttgcaacttcacaggcaatttatgatattgctgaagagtacaacggcaaagtaatagctactgctgttggagatttacttgttgcccgtaaattaaaagatgaaaatggtttatttggtggagaagaaaacggtggtttaatcttccctgattttgtttatggaagagatgcagttatgactgtggctaaaatacttgaaacaatagctaaggagaaaaaaccgttatccaaactggttgaagaacttccggtttactatgcaacaaaaacaaaaattgaatgcagtgatgacttgaaagatgaagttatgaacaacatagcggatgaaataaaaaccactactgattttgaacttgataccactgacggtgttaaaatcctaaaagaagacggatgggtaattatcagaccatcaggtactgaaccaatcttcagatgctttgctgaatctgactctcaggaaaaggcagatgcaatgactgagtggggattaagtttaattaaaaaatacaaacattaa

SEQ ID NO: 1219 - DNA, 2319 bp, Methanobrevibacter smithii
atggcacattatattgaccaccctttaataaaatctaatgctatcgaggctaggttataccaacaggttttagctgctgatgttttaaaaaaaggaaatacaatgattgttgcacctacagcattaggtaaaactatagtagctactttagtggcggcagatagattggaaaaagttaaaaactctaaaatattggtattggctccaagtaaaccattagctatacagcatgaatctacttttaaagaatttttgactgttccttgttcatcaattactggtgctgttaaaactgatgaaagggttaaaaggtgggaagaatctcaaataatctgtgcaactccgcaaactgttgaatctgacttattaaaaggaagatattctctaaaagatgtgtctttagttgtttttgatgaatgtcatcacggtgttggctcttattcttacgtatatttggcttcaagatatgttaaagaatccaaatttaacttaattttaggactgacagcttctccaggttctgataaggaaaaaataaaagaagtttgtgataatttatatattcaaagtattgtagttaaaactgaagaggataatgatgtaagaccttattttaatccggttgcaatagattgggttagggttaaaatgagttctgagttggaaaaaatcaaaacacatgttgataaagctcttaagattcgtcttaaaggccttaaaaacatgggagttattagaacagtttcagttaacaaattagatatattaaaagcaagaggaagagttcaaagtgcaattgcaaggtctgtaaatcctaaaaaggaatgtttccaagctatttctattttaagtgcggttattaatatacagcattctcaggaacttattgaaacacaaggagtagttacatttaacaaatatgtggcaagattgcgtaagaagaaaacaaaagcggctaaatcattaattcaggaccctaattttggtaaggctatttatcttgcaagagaagctgaaaaacatggtttggaacatcctaaacttaaaaaagtaacagatattattaaaaaagaattgggacaaaacggtcaaactaaattgcagtctgacagatatgttaaagatgctgaccaaaaatcctcaaaaataatggtttttactcagtatagggattcacttgaaatgattcatcagaaacttgaaaaagaaggaattaaatctgccaagttctttggtcaggcttcaagagatggtgaaaaaggattaactcaaaaggaacaaaaagaaatcattaaagcctttaaaattggtgaatatgatgtacttctctcaacaagtgtagctgaagaaggaattgatattccggatggtgatttggttattctttatgaacccgttccgtctgaagttagaatgatccaaagaaggggaaggactggccgtaaacgttcaggtcgtgtgaaagttcttattacaaatggaaccagagatgaaggttattattgggcttcagttaataaggaacgcaggatgaaacatcagttaattgatcctgatgtattggaagagttaaattccaatgctattgaaagaatggaaaatgaaaaaagggtaaaggttttagatcctactcctaaaaaagaagaacttccggttgtttttgcagatactcgtgaaggtaattcaaaggttatacgtcatttatctgaaatggaaattgatgttaaagttcaggcaatggctgttggtgattatcaggtaagtgatgaagttgttatagaacgtaaaacagctaaggactttgttgattcaattgttgacaaaagactatttaaacaggcaagatctttaatggaggaatttaaacgtccgttaattattcttgaaggagatgacttgtataatggtatgattaatccgaatgcaattaggggttcgatagcttcaatagctctggactttggaattagtattataccaacaagaaatgctcaggacactgcagcaatgattaaaagaatagctattagggagcaaagtggtgaaaaaacaccaattcaaataagaacagacaaaaaacctgttaacttgtgggagcagcagctgtttataatagaatcccttccaaatataggtcctgttaatgctaaaaacttattggagcattttggaacagtagctaatattattaacgcgtctgagagtcagcttcaggaagttgaaggtattggtaaaaaaacagcagccaatattcgtaaggtagttgattccaagtatttatatttccaaaatgaaattaaagaaaaaaaattattgtag

SEQ ID NO: 1220 - DNA, 2331 bp, Methanobrevibacter smithii
atggtgacatatatggaaaagacttccgaaataatgaaagaacttgctaactccaagaaaatcaacgttgaaaaaaacaacggtattaaagaaagatttagctatgaaaaattattaaaatccttagtaatggttgaaactcctttctttgaatctgataaaattgtagctcaggttgtttcttcactttatgatggcattaaaaccaaagaaattaaaaaaatcgtatatgaatgtttagaagatattgatggtgaaatagctaacaaatacttagccagtacccaattaaaagtacgtacttccagagataccattgaagcatttgatttatccaaaatcgcaaatactttaattgaagaaacaggtgcatcccaagaaaccgcatttgaaatagctactgaagtctggaaagagcttaaaaaattaaatgtggaatacttaaccgcgccaatgattagggaaatggtaaacaccaaacttgtagaatatggattagaagacttaagaagccgttacactcgtttaggtattcctgtatacaacatcacttcattaattgaaaacggtaacagggacaatgcaaatatgattcacaaccctgaaagtatccacaaacatgtagctgatgaagcattaaaacaatatgctcttttacaaatgcttccgtcacatttagctgatgcacatatgtccggagatatccacattcacgatttagaattctttgcaggaagacctctaaactgtatgcaacacgatataagaactttcatcaaatacggacttaaagtagacggaaccggagatcatacatctgttgcaggtgctccaaaccacatggaaaccttaatgaaccatactggagaaattatgcttgcatcacaacaaaacatgtccggaggacaagctatgtccttatggaacgtatttgtagcaccatttgcaagaggcagaacctatgaagaaatcaaacaatctgtccaaatgcttatttataatttaaatatggcttatgcagctagaggttcccaggtaccgtttacaagtatggttttagaattcggagttccaaagttcttacaggatgtaactgcatacggtccgaaaggtcaagtcgtcggaacctatggtgattttgaagaagaaaccagattaatccaaaaagcatttactgaaacattacttgccggcgaccaagaaggaaaacctcatcttttcccaaataccatttacacactccgtgaagaaacattaaaaggagattatgaagaagacttacatttagtccatgaattatctgcaaaatacggatcatcctatttcattaatatgttgccggattacagaggcaaaatggcaaattatatgggatgtagaacctgtttacaagataattggactggtgactgggaacaagactgtttaagaacaggtaaccttgcatatgtaactttaaacctcccaagaatcggataccaatctaaagacgaatctcaagtattcgagtatttggatgaatacatggatttagctgcagaaacattaatgcttagaagagaacaaggattaaaatgtttaaatgacttccatatattaccattccttaaacaaaaagttggagaagacagctattacagaatccaaaattcaacattatcctttggttttgttggtcttaacgaaatgttattatccttatttggaaaaggtatcgaagataaagacgcgaacaaatttggtgtcaaatgtattgaatacttaaatgaaagagctgacaaattaaaagaggaaactggtcttagatggtctgttctccaaactcctgcagaatccactgcatacagatttgcaactcttgataaagagcaattcggagatcaagctatcgtacaaggtgacggaagtgctaattactacaccaactcatcacatgttccagtaaacactgatgtctcccttattgacaaaataaaaatcgaagaacaataccacagtttaactccaggaggacatatcttccacgcatttatgggagaatcctactccgatccagattcattaatgagtttaactaacaaaatagctaaaaaatcagatattggtttctgggcttacagttctgcattaagtttctgtcttaattgtaaaactttaatgaaaggtttaaacaacaaatgtccaacctgtggagaaagtgaagatgttgaatggtatgacagaattaccggatacgtacaacaagtaggacgtgcaaaatcatcatcaggtggttggaaccctggaaaacgtcaagagttaattgacagaagaagatttgaagatgaataa

SEQ ID NO: 1221 - DNA, 1023 bp, Methanobrevibacter smithii
atggaggtaattttcttggcatttaaagattattttaaatttaacaaagataaaacaacttttatgtttattgggggaaaaggtggggttggaaaaacttcaatttcttcagcaacagcattatggttagcagaacaaggtaaaaaaacattaattgtatcaactgatccggcacattcattgtctgactctttggaagtgcctattggccattatcctagggaaattaaaacaaacttatttgcagttgaaatagatcctgatgaagctatggctcaaaaacaagcagttcttgatgctcaaaaagctaattccacttcagaaagtttaatgggattagacttcttgtctgaccaaatggatattgcatcatcttctcctggtgctgacgaagcagctgcatttgaagtatttttatctgtcatgacttcaaatgaatatgatgttgtagtatttgataccgcaccgacaggacataccttaagattattatcattccctgatgtaatggactcttgggtaggtaaaatgatgatgattaaggccaaattaggttctgcagctaattctttaaaaaatcttattccgtttatggatgctgccgataatccacaaactagtgaagagctaaaaagaactaaagagcaaattgacgaagctaaaaaagttttatctgatcctgacagaaccacatttaaaatggttgtaattcctgaagaaatgtctatatatgaatctgaaagagcattaggtgccttagaaaactataacattactgtagatagtgtaattgtaaatcaggtaatgcctgatattacagattgtgatttctgccattccagacacagactacaacaaaaacgtttagctttaattgatcaaaaattcccagaacaaattatagctcaagttcctttatttaaagatgaaattaaaggtcaggaaaaattattgaacttagctaaaatattatacgaagaccaagataatactgaagttaaacaagaagctattcagctttaa

SEQ ID NO: 1222 - DNA, 1191 bp, Methanobrevibacter smithii
atgattaaaaaagaacttttaagtttaaaaagacatcctccaaggttaatttcaattttaatttttcctattatcatgattttgttatttggttatggtatgggtggagacatgactgatttgcctgtagttgttgtttctcaaagtcacggtgacttaactgatgtaacattggatactattaaaacaacggatcagtataaggtagtagaggttatggatgatgttgatgatgcaaaagagagagttgatagtggagaagtaaaagctgcaattatactgccggaaaattatgacagtaatgtgtctcaaaaggcggttacactgtatttggattcatctgatcaaatggcttcttcaacattggaaagtgtaactcaaggaatatttgctaaattatcaaatatggaagcatctaatgctatagtttctaatccttcatcacaggagttagaaaatagtaccagtccagttaatcaatctgaattagctactaatactcaaagtgcaaatgttacaaattcaattggacatacatttgataattttaaagatgatattgcacttcatattaacaaaatatatgggaatattaagtatattgactttttagttcctgcagttttaggaatgactgtaatgatgtcctgtatgatgggtatgggtgcatcaatagctggagaacgtgaaactggtgaattagctagattatttatgactccaacatcaatttcaactgtagttggaggtaaaattgcatctaaacttattgttgagttagttagggctcttatattaatattcatggctattgtattgtttaatgtaagtattaaaggaggaatcttacaaacattcattgttcttttctttggagcactatgttttgttggttttggtatcatgttgtctgcaagaaccaacactcaggaagattatactcaaatagtcatgccattttcaatgcctatgatgtttgtttctggtgtattctatcctattgaaactatgccttggattttacaaaaaatagcttatatattcccattaacttatcttaacgatgcaatgaggggagtaatgattaaaggtcaaagtttaggcgatgtatggttagatttagctatacttttaggattcactgcactgttctttatcattggagtcaaaagatttaatagagatatttaa

SEQ ID NO: 1223 - DNA, 1236 bp, Methanobrevibacter smithii
atgtctaaatataataaattattaatcggatttataatctgtatattatgtatcagcccgatagctggtgcaaatattgattggaacacatttcaaagtaatttaaatcatacaggatatgttgatgataattctgactttgttacaaatttatggtcatttaacatggaatcaccggttataggctcacctgcaatctatggggattttttatatgttgtttcacaggaaggtattttaaaagtaattgacatggaaaacggaactgaagactggtcatttaatttaaaaggagacagtaatgcaacacctgtagtaagtaacaatacagtatttgtaggaaataatcaaagttttaaagctatagatattgaatcacaagatattttatggaaatataatacttctgatgaatctattcagggggcagcttatgtagataatgatagtgtctatgtaggttgtgataatgggcatatttatggatttgacatggctgatggcaataaaacttttgaagcagatttaggtaatgatgaaatagtgtcttctccaattgttgttaacggatcactttatgttggttcaactaacggtaatgtttattgcataaatttaaataacacaaatataacctggcaatatgctacaggagatgcagtttactcttctccagcatatgcagatggtaaaatcataattgggtctgatgatgattcactttatgctttaaatgaaacaaatggagatttatgctgggattatgatttaaacaataaagttaaatcttctccgtgtattgatgagtataataacaatgtatacataggttctgatgaaggtaatttaacctgtcttgatttaagagatggaacttttaaatggagtcatgctactggagctccggttcaatcaactccagcaataaaagaagagttaattgcatttggttctaatgatggaacaggttatgttttaaataaatacactggtgaagaggaatttacttacaatccaggaaccatattatttaattcagaaataacttcttctcctgtaattaatggaaatagtttattctttgcagatcatagcggacatgtatattcattaaacattgataaaagtgaagtacctgcttgtgaatatttatattatacattagctgttttggttgtaatcttagttgtggttgttgttgtagttaaaactataaaaaaacataatagaagataa

SEQ ID NO: 1224 - DNA, 903 bp, Methanobrevibacter smithii
atggccggcaaaatagctgaactgaacccctgtgaaaactgtgaagatgttgcaataaaaaaattcagtccgttaaatgaattgattgactttaatgagcttgactcagattataaaaaatgcaaatgtgggaaacgacctatcgacattgtaatgagccatgtcttaaagataatgattgaagaggaaataattcctcaaaatgcaacactaagaagacacagccctgttcccctcccatgtttttattattctacacaaatggcacagtttattggtaaagattcattagtgttaatccatccggatttcaacaaaaaggttgccaaaagactgactgatgaagtagatgaagtcaaaggagttttaaaaggaaatcctcaggaagtcaacggcatgattgataaagattgccatgtaaaaaactttgaattgttgtcaggctgcgacaaccgttcagacgttatgagaacacttatcaaaaataatgatgaaatggaaaaaataatcataaacaaagaccagcacaaataccatattgaagtagctccaacaacagaagaaaaactcattaagcttcacaattacttggaaaacagcaatatcaaaaaaggaacagctattgatggaatgtgcggtaacggatcaattggaatctatttgctcaaatacggatttgaaaaagtaatattcaatgatgtttacagcgaagctattgaaaatctgaaatttaatcttgaagttaatgaaatactcggaaattatgagatttacaacaaagcatttgaagatttggaaattgaaaaatgtgatttgtgtgtaattgacagctatcctcaggcagatattgaagaaattatcaaaaaagccgaaaaaatagctgacaatgtgctgataatctaa

SEQ ID NO: 1225 - DNA, 942 bp, Methanobrevibacter smithii
atgttaaatcgaagtaaaatgttacaagaaatagataatttattaacctctgaaggttataaaacatctaacatttacgatcaaggatcatttgaccttgtagcacgtaaaaacttattaattttacttttaaaaacttttttaaatatagacagtattaatgaagccaatgctcatgaaatgaaacaattagctaatatattccttgcttccccgattataattggtgaaaaatcaagaaacggcattctggaagaaggagtaatctatgaaagatatgatattcctgctataagttttgaaaccttaaaaaatatgatactttacaaggaatatcctgaaatccttgcagacagaggaggatactttgttaaagttgacggtaatgttataaagcaatacagagaagaatattcattatcattaaaagatttggctgatttggctcatgtatcaagagcaacaatgtacaaatatgaaaatgaaattgtcagagccaatacagaaacagctatgattctcgaagaaatactaaatacaaaagtaacattggatattgatttattaaaaccgaccataagcgaagatattgaatacagtaatgttgaaggagcagatgatttatccaaacttggttacggtattttatctacaaataaaagtccttttgatgctgtagcaaaaatgaaaagctcaaaagacaaatcatcattattaactaatgttgagaaaaacagaagtgaaaaaactttaaaaagaatggctatcccattaaaagatttgtcaatgattacatcttcggaacctgtttttataataaataatgacaaaataaaagattcgcttggaaccattcctgtgattaaatcctgggaattgaaagaatttgaaaatccttctgaattattgaaaattattagagaaagaaaagacaacttgtga

SEQ ID NO: 1226 - DNA, 918 bp, Methanobrevibacter smithii
ttgtgtggaatagctggtatagtttataaagataaaaaattgcattgtgcaggtaatgacatgaccaatatgcttcatcaacttcagcatagaggtcctgattctgcaggttattcaatttatggtggaacaggtcttaaggatgatgagtacatcttaaaaattcaagtgaaagaacaaccaagattacttgaaaccgtgaaagatacaataaactttgtaactccaattcagagtgatgaagttcttccgtctgttggagattcatttatttacaaatgtaaagttcagttaaataacttttcagaacttaaaccgcttatctcaactgttgatacaattgatgatgttattgtaattaacggaagtcaggattttgaaatgattaaggatgtaggttctgtattggacattgcaaaaagatacaatgtgcgtgaggttaaaggaactcatgctataggccatacaaggttttcaacagaaagtggtgtggacagatatcatgcacacccatttgaaacttacattgttaaagatgtatctgttgttcataatggtcagattacaaattattggaatattagggatcctttagaaagaaaaggtcatgtatttgaaacttttaatgatactgaatgtttggttcattatattgcagataaattagatacaggttattctttagaagaagcactggaacagtctgtagaagatatggatggtcctttttcttatattataggaactccaaatggtattggaatagctaaagataaattaggtttacgtccgggagtaatggctgaaactgacgatgtttttgcaattgcatctgaagaggtatctttaagggaagttgttgatactcaaaatattgaacaaatttctcctggtgaagtaatggtgtatgaaatttag

SEQ ID NO: 1227 - DNA, 1278 bp, Methanobrevibacter smithii
ttgttagatataaaattattcagagaaaatccggaattaatttttgattctgagaaaaaaagatttagaggaacagaaactgctgaaaaagttattgaatatgatactttatggagagaaggggaaaaaagattaaacttcttacgttctgaaaaaaacagattatctaaatcatttaaaaaagctaaacaggaaggtaatttggaagaagtaattgcccaatctaaagaagtagctaatgaaattaaggaattaggacctaaaattgaggaatataaaaaattacgtgatgattacagatataaggtaggaaatatcattgatgaggatgtacctatttctgatactgaagatgacaataaaattgtaaaagaatacggtgaaattcctgaatttgattttgaaccgttaaaccatgttgatttaattgaaaaaattgacggtgcagatatgaaaacagcagctcaaatagctggtgcaaggttttattatttaaaacgggatattttacatcttaatttggctttaattcagtttgctttaaatgaattggaatctaaaggttatattccacttcaaactccgttttttgttaaaggggaagtggctgcagaaacttctgaattaggagaatttgaagaaactttatacaaagtggctgatgaagatttatatttgatagctactgcagaacagactttagcggcacttcacagagatgaaatcattgctcctgaagatttgcctattcagtactgtgccctttcaacctgttttagaaaagaagcaggatctcacggtaaagatacactgggaatattcagggttcatcagtttgaaaagattgaacagtttatttacacaactcctgaagagtccaaaaatgctcataaaaagttgcttgaagtaactgaagaaatatatcagaaattaggtctacattatcatgtagtagctattgtgtcctcagcacttaatgataatgcagctgtcaaatatgatcttgaagcatggttcccaggttccaaggcttacagagaattagtttcatgtaccaactgtaaggattatcaggcaagaaaaactaaaacacgttttggaaaagcaggttccggagatgcacaaacattgcatactttaaatagtactgcaatagctactgaaaggactatctgctgtttacttgaaaattatcagcaggaagatggcagtgttaaagttcctgatgttttagttccttatatgggtggaaaaactgtaattaatgcagttaaataa

SEQ ID NO: 1228 - DNA, 1299 bp, Methanobrevibacter smithii
atgaaattgaaagctataattttaagtgctggtgaaggttctagaatgaggccattaaccctcacaaaacctaaaacaatgttgccagtagctggaaaaccaattattcagtacaatatcgagtctttaagagataatggtataactgatattttgcttattgtacgttataaagaagaaattgttaggaattactttggagacggaagtgatttcggagtcaatatttcttataaaactcaaaaagactttttaggaacagctaatgctatttcatatggtgaagattttattgatgatagtattattgttttaaatggagatattatacttgatgatgagattattcatgaaataattaagaagtacaattatttgtcacctgatactttaatgcttttaactgaagtggaagatccttcagcatttggtgttgttgaaattgaaaacggaaatattaaaaacattgtagaaaagccaaaacgtgaagaagcgccaagtaatttggtcaatgctggaatttacatatttaataaggatattttcgataaaatccgtgaaacagaaatctctgaaaggggagaatatgaaattactgattcagtatctttacaaattgaagataataaaacagttatcggacataaaacttctaaagattggattgatgttggcaggccatgggaattaattgaagtaaatgaagaattaattggcaagcttaaaacagaaattaaaggaacagtggaagctggagcagttattcatggtgaagtatttttggatgagggaagtgttattaaggctggtgtttacattgaaggaaatgtatatattggtaaaaactgtgatataggtcctaactcctatattcgtggaaatacttactttggtgataatgttcatgttggaaatgctgttgagattaaaaactcaattattatggaaaatacaaatgttagtcatttaagttatgtaggtgactctgttataggttctaactgcaatatagcagcaggaacaaatatagctaatttgcgttttgataatgcaaccattaaaactaaaattaaaaatcagaaaatagacagcggaagacgtaaattgggagctattatcggggattctgtaaagactggtattaactcaagtttttctccaggtgtaaaagtaggccataactccactatcggatcaggtgtgctgttatacgaagatttaccttccgatacaagagtattggaaaaacaaactcatattattcaaaagaaaaagaaaaaaaaattaattaaatggtga

SEQ ID NO: 1229 - DNA, 1068 bp, Methanobrevibacter smithii
atgattgacggaataacaacatacggttctgatgaattaataaaccagataaagtatgcagaacctgtatttatatgtgtgataggtacaactgaaacttccaaaatacctggaatatccggagctggagcaacccccgaattaactgaatatacacctgcagcagatgctgaaataatggttcacggaagtgttcattgtatggacgaaatcccccaaacagtagttggagaaactgctgcaccaacaccatcaatgctaactaaagcatccctacaacttgctgatatcccatttgttatagtagatgcaggttccaaaattactcctgatttagaatgcaacagacttggaaaggaatacggaagagatatcagaactggaaaaggagttttaaatccattggaaatttatgaaaatgcaaaagaacttggatcaaagctttcaatgatgcatgactatctagtaatcggagaaagtatagctgcaggaacaactactgctcttggagtcttaagagctcttggatatgatgctaatgagaaagtcagtggaagtatgcctacaaatcctcatgatttaaaaacaaaagtagtggaggaaggattgaaaaatgcaggtcttaatcctgaaactgatgaaattgatgcaatgcaagctattggagcggttggagatccaacccttgcaggaatggctggacttgtaatttctacagacatcccaataattttaggtggtggaacacaaatggctgctgtttgtgcaattgtaaaatccataaaccccaattttgatttttcaaggataaacttagctactacagtttttgtagccaatgatgaaaccgctgatttatttgaccttataaaacagattgatgaagacatcacaatcaatattgtagaccctaattttgaagatgcagagtaccctggattaaaaaattaccttgacggttttgttaaagaaggtgttggggccggcggtgcaatgtttacagcattaattagaggaaactctgttgaaagattaagaaaaaaaatagaaaaggtttgcagtgaatag

SEQ ID NO: 1230 - DNA, 1479 bp, Methanobrevibacter smithii
atgttatggacagacaaataccgaccaaaaacactggatgaagtggttggcaataacaaagaaaaagcattaatccaaaaatgggtggataactggaaagcaggaaatccgcaaaagccattactcctagttggacctccaggaattggaaaaacaacacttgctcaagcaatagcccgagaattctcagaatacatagaactaaatgcaagtgataaacgttctcaggatgttattaaaagcactattggagaatcctcttccagcaaatcattatttggagatgactacaaactacttattcttgatgaagtagacggaattcacggaactaatgaccgaggaggagtaagagctattggagacattattaaaaaagcaaaacatccaatgattctaatagctaatgacttttattcaaaacgtattgcatcacttaaaacaaaatgtgatgttttaaaaatgagtaaagtcagaagcccgagtattaacaaattacttaaacaaatagccattaatgaaggaattaaagcaaatcctgcagcacttaaagaactggctaaaaaatctaatggagatatgcgttcagcaataaacacattccaagcactggctaatcaaaatgaagttcttgaactaagtgatattgaaaacataactacaaaagatgacaggtcaacaataatcaatggagttactgctgttttaaaaagtaaaaatcctaatcatgttaaaaaagcattgatggttgaagaagacccgacacttgtaatggaatacattgcagaaaatattccccgtgaatacacaaagaaaaaggaaatcaaaaaggcatataaaaatattgccaaagcggatttgtactttggaagagctagaagcagcagatactacggctattggaaatatgcaactgatttcatgggagttggagtcagtgatgcaaaagacgaaacttacaaaaagtttacaagaatcacttcccctacagtatttacattaatgggacgaaacagaggaaaaagaaacctcagagacagaatagctgaaaaaatgtctcaaaaactacatatttcacacagcgtagctatttcaatgtttccatatcttgaaatcatgtttgaaaacaatgaacttgcctgggaaatatctgactttttaggttttgaagaagacgaaataaaacgtttcagaaccagaaaaatacctaaaaaagttattgaaaaaatggaaaaacagaaagctcaaaaaagagttgaacaaagagatgcaagagctcaggaaatccaggacggattaatggctacaatcccacctcaaaaagaagttaaagaggaacctgctgaggaaatacaagaagaagttgttgatgaaataaaagaagaaactgatgaggaaatacaagaagaatctcaaaaagaagttgaagaaaaacctaaaaagaaaactgacaaacaagtttccttattcaacttctaa

SEQ ID NO: 1231 - DNA, 717 bp, Methanobrevibacter smithii
atggctgataaaaaagaaccagcagctggctggccggttattagtggagactacattgtaggggatcctgaaagtcctgttgcagtaacaacattagcttcacatattgaagcagaactttctggagcagcaatcgcaggtccatgtaaaacagaaaatttaggtgtagaaaaagttgttgcaaacattatatctaatcctaatatccgtttcttaattttagctggtgctgaagtacaaggacatattacaggtcaatctttcaaagcattacacgaaaatggtgctgaccctgataaaaagaaaattattggagcaactggagcaattccttttgttgaaaatgttcctttagaaggggttgaaagattccaacaacaattagaaataattgatttaattgacactgaggatgtcggtgcaattcaagctaaaattaacgaatgtgttgaaaaagaccctggtgcttttgaagaagaagctatggtaatttccgttgaaggtgacgacggagaagaagatgacggcgaagaaataaaagttgtttctgcagaaactgctttaattgaagcaagaatgagaaatatcaatactaaaatagatatggtgggatcaattcaaagaaaccttgcaggtaattatgctggtaaagtgcaaggaatcatgattggtttagcattctctttagtaattggagctttattcttactattttaa

SEQ ID NO: 1232 - DNA, 1383 bp, Methanobrevibacter smithii
atgaattatttagttattggtgcaggaaatgctggtaggcctgttgcaaggttacttaataatcaaaatcataaggttattataactgatccaaaacagttatctgattttaaacaagatgtgcaaagtattttaaaacaaatggaaaaagagggagttattttagatttaggcaatgataatccttctattgatggtattgataaagtttataaggctccaagtttgcctgacagtgcacctattgcaaaaaaagttgctgaagctaatttagaggttattactaatgaagatttctcaaaaatggtaaatgatttaattcctgttgatattattggaatcacgggaactatgggtaaaacaactactacatttattacaacaagcatttttaaacaggcaggttataaagtatggtcctgctcttctttagttaataatttagttagtgaagctattattgatggtatagttaaaggtaaagctcaaaattgtgatatagctatttttgaacttcctcatggaactatagggcttctaaatgaattggatattaaaattggtcttttaaccaatattgctgaagaccatctgtctgaatttggaggttctcttgagaaatatcagcaacgtaaattgattttggaaaaaatgagtgaaacatttattgcaaataattcctgcagggatattatagctccggtaaggggcaatgctctttattatgctttagatgatgattgtgattttattggaactgccggtgatgaaaaattaaccatcaaatattctaaaggggaatttacaacaccgttccacatggtcagctatttctttgaaaactctgtaggggccagcagtgttgctttaacttatggtgtttctccggaagatattactgatgcattatctgaatttaaaggacttccggcacatatggaggatgttggtgagtataatggaagaaaagttattttggattctgcatttttatatgatggaatgaaaatcactcttgagtactttaaagacgacaatgttgtactgtttctagatcattttgatacattatctaaaagggataagacagaagtcggtcagcttgttggacagtatgtggatgttataatagctagtggatttaatgaggttaaccaaacagttgagatggatgctgcatatgaagttttagatgctattgaaaatccaagtgcaattaaagtagctactagggatattactgaagcagctgcacttacattcaaatattccaaacctggagacattattctgcatatggggccacttatagcttatgatagaattaccactgttgaaaaaatcatgaaaggacttgaagagggaagtaaaaaatatgaatga

SEQ ID NO: 1233 - DNA, 1257 bp, Methanobrevibacter smithii
atggatatcaaagatgaaaacattattgaaataacaactgagctttcaagcgagtttgaagtagctaaagagctaaggaaatatcctaaagacactgttattataaaaaatgtaaaaagatatgatttgccgattatttccggaatctgcaatacaagagaaaaaatagctaaatctattaattgtgaagtaagtgaaattactcaaaaaatcatagaagccagtgataatccaattaaagtagataaatttactgatttttcagattataacactacagaagctaatttagataaaatacctattttaacacattataaaagagacggtggaaagtatattactgcaggtgtagtatttgcacgtgaccctgaaacaggtattcaaaatgcatcaattcacagaatgcttgttttagatgataaaagactggttattaggattgttccaagaaatctctacacatatttccaaaaagctcaaaaattaggcaaagatttggaaattgcaatagctattggaatggatcctgcaattttacttgcaagcactacttcaatcccaattgactacaatgaaatggatgtggccaatgcatttaaaaacggagaattgaccctgattaaatgcggagacctggaagttcctcaagcagacattattttggaaggtaaaatatctgtaagtgaaactacagctgaaggtccgtttgtagacttaaccgatacttatgacattattcgtgaccagccaattattaacttaagcaaaatgcatattaaaaaggacaatccccattatcacggaattctccctgccggatttgaacataaattattacagggccttcctcaagaacctagaatttttaaatctgttaaaaatgcagttccaactgttgaaaatgttgttttaacagaagggggctgttgctggttacatgcagctatttccattaacaaacaaacagaaggagatggaaaaaatgcaattatggctgcactgtctgcacatccttcacttaaacatgctgttgttgtagacaccgatgtggatgtatttgacccgcaggatattgaatatgcaatagctacccgtgtaaaaggagacagagatttaatgattgttcctaatgtacgtggatcttcccttgacccggtagctgaaagtgacggtacaacaacaaaaataggtttggatgccaccaaatccttaaaaaccctagataaatttgaaagagttagtttcggagagtaa

SEQ ID NO: 1234 - DNA, 1353 bp, Methanobrevibacter smithii
atggctatacatccaatcgaatacagatatggtactcccgaaatgaaatccatttgggaaactgaaaacaaattacaaagaaaactagatgtggaatctgctctagctcaggcagaaggaaaacttggtataattcctcaggaagtggcagatgaaatagcagctaaagctaataccaaatatgttaaattagaaagagtagatgaaattgaagctcaaaccaaacatgacattgctgcattagttaaagctattggagaagtttgtgataatgacgccggagaatatgtccacttcggagctacttccaatgatgttgtagacagttcaaattctttacttttaaatgattcaattgaagttttaaaagaaaaagtagaaagattaactaaaataatgcttgatttaactaaagaaaatatcgataaagtttgtattggtcgtacacatggtcaacatgcacttcctactacatacggtatgaaatttggtatttgggctgatgaacttcacagacaatatgaaagattagaaaatgctcaaaaaaatgtttgtgtagctatgatggacggtgcagttggtaccacagcagctcttggtgaagacggatggaaaatccacaaagaagtagctaatatattgggattgcctgcagctacaattactaaccaggttgttcaaagagacaaccatgtggaatttatttcaacattagctaatattgcaagtactttagataaaattgctctagaaatcagaagcttacaaagaactgaacttatggaacttggtgaatactttgatcctgaaaaacaggtaggcagcagtacaatgcctcataaaatgaacccaattacagcagaacgtatttgtggtgttgcaagaattgtaaaatcctttgtaaatgctgcacttgacaacaatccgctctggcatgaaagagacttaactaattcctcctgtgaaagaataatgtttccggaaagctgtattttaactgattacatcctcagtttaactattaaattaatgagcaatttagtattctatgatgaaaatattgaaagaaatttaaacttaactaatggattaatcatggctgaaagattaatggctgaacttacaagaagcggaatgggaaaacaaaccgcatacggaattgtaaggagaaatgctattaaagctaataaagaaggaggtcttttaggagaacttatcctagaagaggaagatgttcaaaaatacttaactcctgaagatgttgaaaaaattatgaatcctcatacttacataggttcatctaaaaccattattaatgaattacttgaacaatctaaagaatggtttaaatag

SEQ ID NO: 1235 - DNA, 3177 bp, Methanobrevibacter smithii
atgcctattgataaggatattaaaaaagtattaataatcggttctggacctattcaaattggtcaagcagcagaatttgattattctggttcacaagcatgtaaatcactaagagaagagggaattgaaactgtccttgttaacagtaatcctgctactattcaaactgatatggatatggcggatactgtttataccgaaccattaactcctgaaattgtctcagaaattattaaaaaagaaaatgtcgatgcaattttaccgactatgggtggacaaacaggattaaatatcgctacaggacttggagatttaggtttacttgacggaattaaagttttaggttctgatattcagacaattaaagatgtggaagaccgtgatttgttcggtcatttcatggataaacttaacgaacctattccaaaatgtcatgctgtagaaagtgttgaagaagctatagaagcagtaaaagacattggctatccagtaattgtaagacctgcatttacacttggaggaaccggtggtggagtagcttacaatgaagaagaattaattgaaatagctactcatggattggatatgagtttcattaaccaggttcttattgacgaatctgttttaggttggaaagaattcgaatatgaagtaatgagggataaagaagacacttgtatcattgtatgtaacatggaaaacatagaccctatgggaatccacactggtgaaagtgttgttgtagctcctgctcaaaatttaaatgatagggattcacaggcattaagggatgcttctattaaaattatcagagctttaggtattcagggaggatgtaatattcaatttgcagttaatccggaaaccggagaatacaaggtaattgaagtaaatcctagggtaagtagaagtagtgcacttgcatctaaagcaacaggttatcctatagctaaaatttcttctaaaatagctttgggaatgactttagatgaaattaaaaatgatattactaaagaaacacctgcttcctttgaaccggctattgattatgtagttgtaaaaatcccaagatggccatttgataaattcagaggaatcaaccgtgaaataggagttcaaatgaaagctaccggtgaagtaatggcaatcggtagaacatttgaagaagcaattcaaaaagctattagatcacttgatatgggtcatgacggatttgaatatgttgaatacactgaagatgatttggccaatccgactgatgagcgattattccagttatattcagccattaaagacggaatggatttggataagattcagaaattaaccaatattgacaaatttttcctatacaaaatcagaaacattgttaattttgaaaatgaagttacagaagaaaaattaaacgatgctgacttcctgagaaaagctaaacagatgggatgttcaaacaaaagattagccgccctatctaatcagactgaagaatacattagaaacttacttaacagattcaatataaaacagtcctataaaatggttgatacctgtgctgcagaatttgaagctaaaacaccatattattacagtacatatgattcaggtaacgagctcaaatcatccaataaaaagaaaatcgttattttaggtgcgggtcctatcagaataggtcagggtattgagtttgattactgttgtgtacattcctcacttgctctaaaagatgagggaattgaaactattttaatcaacaacaatccggaaactgtaagtactgattatgatatttctgataaactgttctttgaacctatcacttttgaagatgtgatgggtattattgatcaggaaaaacctgatggagttattgttcaatttggtggtcaaacttcaattaatttggcagtaccattagctaatgctggagttaaaatattgggaactccatatgaaagtattgatggtgttgaagacagggaattatttgcaaaattattaaataaattgcatattcatcaggcaccatatggaacagctaattcctttgaagaagctcgtgaaattgcagagagaattactttccctgttttagtacgtccgtcatatgttattggtggaagggctatggaaattgtttatgacaataatgagcttgaaaaatatatgaaagaagctgtaaaagtctcacctgaacatccgattttagtagacaagttccttgaagatgctattgaattggatgtggatgtattgtgtgacggtgaggaagtatttatagcaggaattatggaacatattgaggaagcaggtgttcactccggagattctgcttgtgtaattccaccgcaaactattcctgaacacattctcaacactattcgtgaatacagtactaaattagctttggaattggatgttaaaggtttaatgaatatccagtatgcagttaaacttgatgaggaaatggtttacattattgaagctaatcctcgtgcaagtaggacagttccgtttgtaagtaaagctattggagtgccattagctaaagtagctacatggattatgactggagctaaattaaaagactttaatttaactaaagaaataaaaatagatcatgttgctgtaaaagaatctgttttcccattcttaaaacttccggaatccgatacagtacttggacctgaaatgaaatccactggtgaaagtattggtgtagatgaaaactttggaatggcattttacaaatcccagcttgctgcaggtatggatttaccaaaagaaggtaaaatcttcatcagtgtaaaagaacaggataaaaagaaaatccgtccaattgctgaaaaagcagctaatttaggttttgaacttgcagcaactagcggaactgctgatgcggcaaagggtgttgacattgaaaaaattaaaaaagtatctcaaggatctccaaacatcagggatgcaattttaaacaaggaaattgacctgattatcaacacttcagaaggtaaacagtctgctcaggacggatatataatcagacgtttagctattgaacttggtataccttatgttactaccttgtctggagctagagctgctttaaatgctattgaagctgttcaaaataatgaaattacagtaaaatctttaaatgaacatattgatggagaataa

SEQ ID NO: 1236 - DNA, 1263 bp, Methanobrevibacter smithii
gtgacggttttgaatattacagaaaaaatattatcagctaaagcaaaaaaagaggttacacccggagaaattattgaaattccggttgatttagctatgtctcatgacggaacatcaccaccagctataaaaacctttgaaaaagtagctaccaaagtctgggacaatgaaaaaattgcaattgtatttgaccataatgttcctgcaaatacaatcggatctgcagaattccaaaaggtatgcagagacttcataaaaaaacagaaaattactaaaaattacatacatggtgatggaatatgccaccaggtacttcctgaaaaaggactggtagaacctggaaaagttattgtaggtgctgactcacacacatgtacttatggtgcatatggagcattttcaacaggaatgggggctactgatttagctatggtttatgctacaggtaaaacatggtttatggttcctgaagctattaaaatggaagtcagcggagagttaaattcatacactgctccaaaagacatcattttaaaaatcatcggtgaagtgggaatagccggagctacctacaaaactgcagaattctgcggagaaaccatcgaaaaaatgggagtagaaggcagagctacaatatgtaacatggctattgaaatgggagctaaaaacggaataatggaaccgaataaagaagttatccaatatgtttcccaaagaaccggaaaaaaagaaagtgaattgaatattgttaaatccgatgaagatgcgcagtattcagaagaaatgcactttgatataactgatatggaacctcaaatagcctgccctaatgatgtagacaatgttaaagacatctccaaagttgaaggcacagctgttgaccaatgcttaatcggttcttgtacaaacggcagattatctgatttgaaagatgcttatgaaatcttaaaagataatgaaattaataatgatactagattactaattcttccagcatcagctgaaatttacaaacaggcaatccatgaaggatacattgatgcatttatagatgcgggagctattatatgcaatccaggatgcggaccatgtcttggaggacatatgggagttttatctgaaggtgaaacctgcatatccacaacaaacagaaatttcaaaggaagaatgggggatccgaaatcctcagtatatctggctaattcaaaggttgttgctgcttcagctattgaaggagttattacaaatcctaaagatttatag

SEQ ID NO: 1237 - DNA, 1584 bp, Methanobrevibacter smithii
atgaaacattggattgaaaatatagctgaggaattaagtaaaagagatactgataaacatgtaattgcaagtggaacctcaatatcaggttctatccatattggaaactcctgtgatgtatttatagctaatgcaatcggaaaaaaattacgtgaattgggaaaagaagctcaaactatttggattgctgatgaccatgacccacttagaaaagttccatacccattacctgaaaattacgataaatatcttggaatgccttactcaacaattccatgtcctgacggctgttgtgataactttgtagaacactttgaaaaaccatttttaggagttatggatgcatacggtattgaaatagaacacaaatccggatttgaaatgtataaaagcggagtctacaatgactacataagaaccgctctggaaaatgtagacagaatcaaggaaatattcaatcaatacagaagagaacctctagcagatgactggttaccatacaatccaatttgtgaagaatgtggaagggtaaataccacttatgcatatgattttgatggagacatcatcaaatacagatgtgactgcggtcatgaaggtgaaatggacattaaatccggaaatggtaaacttacatggagagtggaatgggctgcaagatggaaaatatttaacgttacctgcgaaccattcggaaaagaccatgcagcaagtggaggatcatatgatgtaagtagcattatttcaaaagaaatatttgactacgaagcaccatacccagttccttatgaatggattactttagacggagaagctatgagtaaatctcatggagtatttttcagcccggaacaatggttagctatcggtcctgctgagagtcttaactattacttattcagaagcaaacctatgaaagctaaagatttctcacctaaaatgtcatttttagacttcatggatcaatttgacaaagtagaaaaagtattctacgatgaagaagaagcaccatctgaaaaagaaggtaaaaaattcaaaaaaatctatgaaatagctcaaataaatgaaggcagtcctctaccattcagaccgccttacagattcttagttaatgcttaccaaatagctggaaacaatttagaaaaaatatttacaattcttaaaaacaattcccaattaactaaaagctttaaaaacaaagaattcagtgatttgaatgaaacagaattaaaacaattccaggaacgtgttgacaatgttgttaactggttagatacttatgctcctaaatttgtaaaattccaagttcaggaaaaaagtgttccaaaattaccattaactgacgaacagacagaattcttaggcaaattagctgatttaatggaatcaaaagaatttaacaaagctgaagatttacacgatgcaatgtacgaaattcttgaaggtcaaggattaaaacctcaaaaaggattccaagctatttataaaatgattttaggtcaaaaacaaggaccaagagcagcatcattcttattatctcttgacaaagactttgttgttaaaagattaagacaggaagcttaa

SEQ ID NO: 1238 - DNA, 1221 bp, Methanobrevibacter smithii
actattgttatattattattgaaggtgttaaataatatgagttatgaatggagaagtacatctattaagataatattggcattattctttatttctttacttttattcgcattttcttttgtaaatcatactgcatacactggtgaatcttttgcaaaggattataatttgcctattggtcagtctatgtttgaaggggattccattttaggtgaaaatcaatcaattcaagtacctttgttaggtaatttgccttttatggctcatcagattaaaagtcttgatttgcagggtatactaataactttaacaactggaactgttccatttgactttactacaatatccactgaaggtatagattcttatggtaaggcacagggatttgaaggtcctggttatttgacttatgaaggtaatcaattagctgttaaagctccgcatacttatgtatggggttacagtgcaccttataagattttaaccaaaacatctgacggtgttgatgttgtggaaaatggtactgttgttgaatcaattcctacttcagaaattaaaaatactgattttggaggcaactattacaatactacaactattcaaaattggtacaattatgattccgacaaatctaacttcacactggaacgcggaattgttaacttttctgacggaagaaacaatataagtgagggtaatgtgtccatcatatttggtgataatgtgtccgattatgtggcagcatatcctgacggcactcctattgtattgtatatgggtaatgttacagaagaagatggtgaagtttattctacttctttaggttctcaccctgaatatggagacggagtaagagaatttaatgcaagatcttttgtagatgcatggaataatacagtaattccaccaaattcaagtggaaatggaaaagcatatattgattttggttctgcttctgatagtaatgctcctggaggcagtgcttctcatggtgtatgtccaccagctagagtattaagagcagctgttcttgctgaaggatttggattgccagtaggtatgtgtggagataatgatgcagtattatttggatttaatccttctgaagatattaaagttacaaataatcatgattatccagtcaaaatagtaatgtggactgaaggttcaggtacaggcatggcaatttatggtaagatagaaagattcattccaagttga

SEQ ID NO: 1239 - DNA, 1074 bp, Methanobrevibacter smithii
atgaatatttttggaaatgaagaagaggaatcacaagttaatgatactagaatcattagtaacagcttgggaatagatttaggaactttaaacactgtaattgcaaaaccatctggagataaatttgatttatatcaaattccatcagttgttgctgttaaaaaagatgatccgtctgaagttttagcagttggggaagaagctaaaaaaatgcttggtagaactcctgaagatattcttgctgtaagacctttgaaaaaaggagtcattgaaaacgtagctcaagcacaagctttacttattaaagctatgcaaattggtatagaagatggggaaagtgttggaagaatcgttattggtattcctggagattcctctgaagtagaaaaaaatgcagctgaagagattggtaggaaagctggagcagaaaacattcttgtaattagtgaaggattggcagcagctattggtgcaggtttacctattgctgaaccaaacggaactatggttattgatattggtgcaggatcaacagacattgttatcatttcccttggtggtattaacgatattgaaacagttagatgtggtggagatgacattgataacagaatagttgaattggttgcagaaaaatataatgtagctattggtattcatgatgcagaatctgcaaaaatagaagttggtatgattcactgtagcgaacaacttgaaaacttaagtgttgaagttattggtaaatcattagaaaccaacaggcctaaaaaagttgtcatcgactcaatgttagttgctgatgctgtagaaccatttatgcaagaaattgtagatggtttaaatgttattttagaaagattatctcctgaattgatgatgggtgtttataataatgcagtggcagttggaggaagttcaagactccgtggattaaaagaaagggttttcgatgaaatatctattcctattgaagtttctgatgatcctatgactgttgtagcaaaaggtactgctattgtagctgcagaacctcttgcattagaacctgaagttcgtcttagagctatgaaataa

SEQ ID NO: 1240 - DNA, 1275 bp, Methanobrevibacter smithii
atggttgttaaatatttaccgagagtattggataaagatttggaaaaatatcttacaatgattggtgcgattctcattgttggaccgaaatggtgtggcaaaacaactactgccgaacagcatgctaaaagtgtattaaaactacaagacaaagataattataaaacaaatatgatgtgggcagacatagaaccttacagattattgaaaggagagaaaccacgattaattgatgaatggcaggtggctcctgtattgtgggattccgtcagaacaagcgtggatgaaagcgaaggatatggactatatattttaaccggttcaacagtggtcgatgaagacagcatcatgcactcaggaaccggaagaatccatagaatgctgatgaggcctatgagtttgtatgaaagcggtgaatcaaacgggcaaatttcaattatggacttatttgacaatcctgacattaacattaataactgcgaatcctctttaacaataaacgatttgatatttgctgcatgccgcggaggctggccagattcattgaatcaaaaaaccagagagcgcaaacttttcgttgcatataattatttggaaaacatttgtaacacagatgtttctgctgttgatggggttaaaagagaccctgatagggtaagagtattattacgttcgcttgcaagaaataattccacactggctaaagaccaaaccattatagatgatattaatgctaattttatggatataagtagacccacatactattcatatgttgatgccttgaaaaaattatttgtaattgaagacaaccgaggatggtccccaaacatcaaatccaaatcagcaatcagatcaggaaataaaaaagtattcattgatccttcaattgccgtagcagcattgaatgcaaatcctaaatcaatggagaatgatttggaaacattcgaatttatttttgaaaatttatgcattcgtgacttaagtgtttatacaaattcccatggcggaaaagtttcatattaccatgacaagtcagatttagaaattgactgtgttgttcacttgagggacggaagatatgcattaatagaatgcaagcttggaagtgaaagaataaacgaaggtgctcaaaatctccttaaaatcaaggcgttaattgaaaagaataaaaaattggataatcctacatttcttgcagtgcttactggtggaaaatatgcatacactcgtccggatggcgttaaagtaattccaatcggctgtttaaaatag

SEQ ID NO: 1241 - DNA, 1839 bp, Methanobrevibacter smithii
atggatgcaaaagataaaaaaatagctacagacctttgttacgagattataaaagaggtaggcagagctatcagaccatatgttggaaaacctgaatccggagaaaaagttaagatgggggctgacggcactccaacatcatatattgatgttatagctgaagatcaagtaattaacattttaaaaaatgctcctatacactcatacatcattagtgaagaaattggagaactgaaagttggatatggaaaaaaagaaagtgttgttttaactcaggaacttagaagaactgatttaactccggaacaaaaacctaaattcatattcttaatagatccgattgacggtacaagcaatgcaattaaggaaatacctgcatatggaatttcaatagctgttgcaaatgttcctgatgacagattagctactttaaatgatgttgaattaggttttatcagcaacttcggaaacggcaatttctttgaagctgaaaaaggaaaaggatgctggttgaataatgaagaggtgcacccctcaaatattgtaaacatcagtgatatgtctcttggaggatttactaaaagcgggaccaaagcagcttccaaattagttgacaatgcaaggcgcatgcgtgttttaggttctgttgttttggaactttcatatgtagccagcggaagatatgatgcatttcttgatttgagaggcagcagaataatagatattgcagcttccaaattgattgttgaagaagccggaggaatcatcaccaacaaatacggtgaaaaactggacaataaattaagtatctatgaaagaacaattgttgttgcagctaataacaatatactccacaaacagataatcgatatcttaaatgacaatgaaagtgatgttatcggagaagttggagtagtaagccgtgtagatgaataccatgcaatattattctctgtaaaaatcatagattatcttttgaataacggtattgatgtagtcattgaaaggacactggccagaaagcttgaaaaacttaaaaaagaccctaatttgaaaaatataattaacacaaccataaaagagcatcctgaattaaaggaccagttgaaaaatttaaactttaacattgaatttaaattgctctcacaaagtatacaagactttaaaagcgatatggcaattattcttggtggagacggaacccttttaagaacacagactaaaatgactgaagaaataccaatatttggaattaatatgggtacagtaggatttttaactgaaattgaagttaatgaaacatttgattcacttaaaaaaatattaaaaggagaatattaccttgaaaaaagaacaaaattagttgtttcccatgaaaaccaccattattctgcactgaatgaagttgttgtaatgactgatgaaccttcaaaaatgcttcatttccaggttcaggtagacggagaaatcattgaagaattcagagctgacggtcttatcatatcaactccaagcggttctacagcatattccatgtctgcaggaggtccgattgttgatccgaatgtagggggatttatcatcatcccaatttgtccgtataaattaggtgtaaggccatttatcgtgtctgatgaaagtgaaattattgtcaaattacttaaaaaaggtaaaaccgcagtatttgtaatggacggccaaataaatgaggaagcagaatatcaggaagaaatcagattcaaaaaatcagacaaacacgtttacttcataagaaactcaaataaatgtttctataaaaaagttaaagacaagttaaatgagggaggcatcaacaactaa

SEQ ID NO: 1242 - DNA, 1905 bp, Methanobrevibacter smithii
atgattttaagcattattatacctacatataatgaagaagaataccttcccttacttctaaaaagtattaaacagcaggatttcagagactatgaaataattgttgctgatgctaactctaaagacaatactgtaaaaatagctgaagaatacggatgtattgttgttgaaggcggaatgcctgcagtaggtagaaataatggtgcgaaagtagctaaaggtgagtatttactatttttagactctgatttaaaacttaccgaagattatcttgcaaaagttatctatgaatttaaaatggaaagattgggtattgcaattacacaaatgaaacccctatccaaaaaaacagaagataaaatcttacatgatttggccaatttgtttatgataagcgttgaaaaaataaagccacacggtgccggatgttatggtataatagctaaaagggaattgcatgaatgctgcggcggatttgatgaagaattaactttcggtgaagatacagaatatattgaaagattggccaaaaaagaaagatttaaagtattgagaaatgctaaaattggagtttcaacaagaaggcttgaagaggaaggactggcaacactagctaagcaatacggtaaaagtactgtaaatgactttttaggcattagaacagaagcttcagatttaaattatggttttgatcatggaaaagaacatataagcaaacataaattagataaaattgctctggaatctgaaaaattggaccgtttgaaaaacagctatgatgaatccaaacaaaaaataaacactgcaaaagtctatcttaaaaaagccaaaaaaacaaaaatcagagataaaaaagtaattttttattgtatctgtggagagggaatgggtcatgctatccgaagcagcgtaataatcgaccgtataaaagacaaatatgacgtttacattttcagcagcgaccgtgcttacaaatatttaaatgaaaaatttgacaatgtctataaaatcggcggattcaacacagtttatataaataacaaagtcagcaatacaaaaacattaatgaatgccattaaacgtaatcctctaaacattaaagaaggatatgaagaactatataaaaaagcaagaaaattatctcctgacgttattgttactgattttgaaatctatgcaacaatggtttccaaacttctcagcattccattaataagtctggacaatatccatatgattacccaaactgcaattgactatcctccaaagcatcagggagaaatgctaaaagcaaaaggtgtaataaagtcatatgtaataaaaccaaaaatacatattttaaccagcttcttttatccgaaaatcaagcctaaaaaaagggcggtgctttatcccccagtgattcgtgaagatatcttaaagctggaacctacaattgaagatcacattattgtctatcagaccagtaaagaaagtgtgaaattagtcgagcaattgaaatcattaaatgaaaaatttattgtttacggatttaataaggacaaaacagacgaaaatctgacttacaaattatttaatgaagatgagttctacaatgatttagccagtgccaaggcagtaatctgtaatggtggatttacctttatatcagaagccatatcccttaaaaaaccaatatacagcgttccagctattggaaactttgaacaaacattaaacggattttatgttcagaaattaggttatggagaatatcatgaaaagatgagtcctcaaaaagtggaaaaattcttaaaaaggctctccaaatatcagaaaaaactagctaaagttaaaaaaacaaataacgatggaattgtcaatgaattaatatatcgtattgaaaaatatagtaaaaaaagttaa

SEQ ID NO: 1243 - DNA, 1152 bp, Methanobrevibacter smithii
gtgatttttatttctaaatttttaccctatggaaaacaatgtatagatcaggaagatattgatgcagttgctgatgttttaagtgaggatttcattactcaggggccaaaaataacagaatttgaagaagaaatagctaaatatgttggggctaaatatggagttgccttcaattctggaacttcagctctgcatggtgcttattttgcattaggtcttgataagggagatgaaatgattacaactcccaatacttttgtagctactgctaatgctgggctatatttgggagctaaagttaatttctgtgatgtggaaaaacaaaccggaaatattgatgcatccaaattggaggctaatgaaaatactaagttaataactcctgtacattatagcggaaatcctgttaacttaaaggaaatagctgatattgctgaggataatgatgccagaattattgaagacggagcacatgcacttggtgcaaagtataacggcaaaaaaataggctctttaaaatactctgaaatggcaatgtttagttttcatcctgttaaacacattacaaccggtgaaggcggaattattgttacaaatgatgaggagtactatgaaagacttcagttattcagatcccatggaattactaaaaataatctggtaaatcctcgtgacggcgactggtattatgaaatgcagcatttaggatttaattacagaataactgatattcaatgtgctttaggtttatcacagcttaaaaaattagattcctttgttgaaaacagaagaaaaatagctaaaaaatataatggaatgtttgaagacaatccatattttgatgttgttaaagaaaatccggacggtgagtctgcatatcatttatatccgattttgttaaaagaaaaatatgcaaatcataaaaaggaaatattttcaaaattacgctctgaaggattaggtgttcaggtgcattatatacctgtttatttacaaccttactatcaaaaccttggatttaataaaggactttgtccagtagatgaagagttttacaaaagagaacttagtataccaatgtatcctacattaactgatgaagatttagagtttgtacaagaaaaactttacaaagtgtttagtgagtattag

SEQ ID NO: 1244 - DNA, 1023 bp, Methanobrevibacter smithii
atgaaagtagcaggttttgatattggcggtgcaaacactgacttggcagttgttgattttgaaaataatgaagtaaaaaatattgaagtggattttgcttatcttccgatgtggagcaataatgaagcattacctaaagttttaactgaattgattgaaaatatttgtccgattgatgaaattgatgctgtaggaatatccatgactgcagaattggtggatgcatatgatacaaaaaaagacggagttttagatgttgttaaaaaatgtgaggaaacttttgagtgtccgacagcttatgttggaattgatgggatgttatcaaaagaagaaattgaaaaaactcctttaaaggcagcagctgctaactggatagctactgcccaaatagctacattaataagtgataattgtattttcatagatactggaagtacaacaactgatattattccaattaaagacggaaaagaatgtgcaattggaagatcagattttgaaagactggctaccggcgaactggtatatacaggaacattaagaaccaatttggccagcttcttggataaggttcagttacatggaaaagaatacagggtagcttccgagttatttgcacaaactgcagatgtttatactgttttggatttaataactttagatgattatgtttgtgatacttttgatggtgaaaacaaatctaaaaaaagttgcatgaaaagaatagccagagtattgtgtgctgatttggattcattaagtgaagcagatgttgttgaattagccaaattcacccatcaaaagcaggttgaacaaattgcagatgctttaaaacaggtatctgaaactcaaaatttgaatctgattgtaactacaggtcttggaaaagatattttagataaaaaagctgcagaattcttaggtcttgaagttaaatctatggatacaattttaactgatgaagaatgtgttgttgcaccggcagttggtactgcagtgatgatgaacagatttttaaattaa

SEQ ID NO: 1245 - DNA, 1365 bp, Methanobrevibacter smithii
atggatattgaaggttttgtaagaaaaagaattgatgattacacatatgaagatttgactgctcttttggcaagtagaattagagaatacaaagatttgtctgaagaaaactcctgtaaaatggctgaagctgttattgatgaagtaaaaactactttggaattgaattctcttgatgatgattttttaaaagaaattgtagatattccgaaagcagatgtggctatgggaaaaatgggagtaggttccaggggagcaggtgatttcttcgttcacagaaaaattgcagaaattgtttcaagtacaaatactgcttcattagtaaatccttctgaacaggacgatggaggggtagttaaagcaccagttaaaaacgatgatgtttatgtaacaactgcagtagatggaatacactcacgtttaagtgactatccgtttttaggaggatttcatgttacaagggctactttaagggatgtttgtgtaatgggggcagatcctgtagctattttaagtgatgttcacttggcagatgatggggatgttggtaagatatttgactttactgcaggtgtagctgcagtgtctgaacttgttgatgttccaatagtggctggaagtacattgcgtgtaggtggagacatggttttaggtgatagatttgtttctgctgtaggaagtgttggtgtatccgattatccgccaactgcaaggaaaggagcaactgaaggtgatgtaattttacttacagagggttctggtggaggaaccattacaacaactgcattatataacggattttttgatgtaatatgggatacattaaatgtaaactttgttcaggcatcacatgcactttttgaagctgatttaattaaagatattcatgcaatgactgatgtgacaaatgggggattgcgtggagatgcccatgaaatatccaatacaacaggagtaggtttggagttctatgaaaaagaaattcgtgactgtgttgctccaaaagtattaaacatgcttgaaacattaaatatagatccgttaggagtttcaacagattcattaatgctgattgcacctcctgaaattgttggagatattaaaaaggcagtagcaaaatatgatgtccctattcgtgaaataggtaaagttgataattctggtgaaccgaatttaattaaagaagacggaaatgttgaaaagctggttccattatttagggaagctgcttatactaaagttaaaaagttcgttggagacacaacacctgaagactttgaaattatgaaagaaaaagtccaaaaggcatgtgacgaatccatacttaaaaaagaaaaagtggtaaaacacatccgtgaaaattaa

SEQ ID NO: 1246 - DNA, 1428 bp, Methanobrevibacter smithii
atgagtagggtaagaactgtttttgcaaatatgagttggttaatgttttctcaaatcataactagtgtctgtgcttttgtttggactattttaactgctcgttatttaggtgtatctgattatggtcttttaggtacagctacttcttttgcaactatttttggtgtttgtgccgatttgggagttactacctatattgtcagatccatttctacagattttgactctgaaaagaaatatttgggaaatgctattggtattaaattaatattggcggtattttacctggcagtggtatcactggctttatttatattgggctgggataattatactgttgtaatctgtttcttgtttgctgtggaaaatgtaattaagtcatttcaaactgcaatgtattcttcattccaggctcacgaaatgatgaagtatcaggctattacaaatactttgcttaatgttttaacatttatattcattgtagctgttacatttacaaattatgggttatggggaattactttagcatatattgcagctaatttaatcggtttagtttatgcgactttggctttatctaaaaagattattgttccaaaaccgttgtttgataaggctttttgtaaaaagttagttattggaggccttccttttgcattgactagcttattttatatgatttattattcaattgacatggttatgattacccagtttgcaaatacctatgcaacagggctttataattcatcttataagttaatcaatgttttaactctgttttatacaatttacacttctgttattttcccggttatgagcaaactgtttaaacaggacggaaatttactgcagtttagttttgtcaaatccatcaagtatctgtctatggttactattcctatagctattgctacctttttttatgggggagatgtaatttcattatgttatggtaatcagtatgcagaagcaggagaagttttaaaaattcttatttggactgtttgcttcttatttattaatggagcatgttccatgattttaaatgcatcccacagagaaactgcagttactaaaatttattgtttggctgctttgtttaatgttgccttgaattttattttaatacctcatttctcagtttacggtgcttcagtagctactgtaattagtgagattttaattttagctttggaattatacaccatttataaaattaatcagcttcctgacagacatcttctggttgatattttaaaagttgtactttgtgcaagtgttatgggtgttgttttacatcttcttaatcttaatttatggttagctattcctgtaggagttgtagtttatttaatagctattattcttactaaaacatttgatgatcaggataaactgatttttaaacgaattgttggaaaatag

SEQ ID NO: 1247 - DNA, 1029 bp, Methanobrevibacter smithii
atgaaaataatgaaagataatgaaatagctcttgtaaaagaaatattaaaaaaattaggagctagtgaagaagacagcgaattggtagcagaagctacaattgatgcagatttaaaaggatttacttcacatggacttggtagattcccacaatacttaattagtattgaatcaggaaccataaacttaaaagacaacataactattgaaaaagaaactcctgctattgctttaataaacggtaacagcggattcggacaggctgttgcatacaaagctatgaaattagctgtaaaaaaagctaaagaagtaggtatcggatgtgtgggagtacacaattcaaaccactttggagtaaccggattttactcagatattgcagttaaagaaggtgttatcggaactgtaatcgcaaatactgaccctgcaattgctccatttggtgcaagtgaagcacttattggaacaaacccaattgctattggtattccaagtgattcctacattgcagtagatatggctacatcagttactgcacgtggaaaaatattagaatcaaaaagaaaaggattggaattacctgaaggttgggcacttgacaaagacggaaacccaacaactgatcctgaagctgctcttgaaggttcaattttagcattcggtggatttaaaggatatgcattagcatttatgattgaaattttaaccggacctttagtaaatgcagaatacggaaaaggagtaacaggtacagcttcaccaactaaaaactgtacaaaaggagatttatacatagctattgatccaagcaaattcggttcactagaagatttcaaagcaaaaactacagatttctgtaatcaagccagagctgcaggagaaaatgtttcaattccaggagacttagaagttaaaaaaatagctaatgctgaagctaatggaatggaaatagatgaaaaattatacgaacaattgaaagaaatctgcgacgatttagatattgactttgattcatatttagaagaataa

SEQ ID NO: 1248 - DNA, 930 bp, Methanobrevibacter smithii
atgagtatagaagctatcaaagacaaatatgaacgaccaatactttcattaagaattacaataacaaacaaatgtaatgaaaattgtttatactgccaccatgatgggatggatgattctcaagaggaaatgaatgcagatgaaatttacagaatctgtgaaatagctaaaaatattggtgttagaaaaataaggatttctggtggagagcctttaataagaaaagacatcgttgaaattgtaaataaaatagccagccttgattttgatgacatatccattacttcaaatggaactttacttggaaaatatgcaaaagatctaaaagaagctggattaaatagggtaaatatcagtttagatactttaaatcctgaaacttacaaaaaagttaccactaaaaatctgcttgaatcagcaaaaaacggaattctgaaagctgttgaagttggcctttatcccgttaaaatcaatatggttttaatgaaaggaataaatgaaaacgaagtggatgacatgtttgaattttgtaaagaacatggaatcatacttcagcttattgaattaatggacagtgaaaactgtgatgatgaaaaattcagcagagattatcattataatttagatcccatcaatgaaaagttgctttccatatgtgatgaagtcaaaacacgtgaatttatgcaaaaccgtaaaaaatacttcatagacggcggagaaattgaagtagtaaaacctattgaaaacagcgacttttgtgcaaattgtaccagattaagaataacccctgacggaaaaataaagccatgcttacttagaaatgacaatctggtagaattaatatcacatataagaaataatgaatcagattctcaactaaaagaagttttcattaaaggcattaacaaaagagagccttataacaattaa

SEQ ID NO: 1249 - DNA, 1779 bp, Methanobrevibacter smithii
atgagtcgtatttctatattagacaaagacaaatgtcaacctaagaaatgtaatttcgtttgtattgattactgcccaggagtcagaatggatgaagacacaatcatcattgatgaagacactaacaaaccattgatttctgaagaattatgtgaaggatgcggtatttgtacaaacagatgtccatttgatgctatttcaattattaacttacctgaagctataggagaaccaattcacagattcggacaaaaccagttcgaactattcggacttcctagtttaactgaaggtagtgttttaggtttgctcggtccaaatggaatcggtaaatcaacaataatgaacatactgtccggaactttaattccaaacttaggagattatgaaaaccctcaagataattgggacaaagtaattgaacattataaaggttcagctcttcaaaactactttacaaaattagctgctggagaaataaaagctgttttaaaacctcaaatggtggatcagcttccaaaagttgtaaaaggaaaagtaagtgatttacttacaaatgttgatgaaagaggaaaattggattatgtctgtgatgaattagaccttcataatgttttagaccgtgaaatgaaaaacttaagtggtggggaactccaaagagtagctatagctgcaactgtcttaagagaaggagacttctattactttgacgaacctacatcctggctggatgtttcacaaaggttaaatgcagtaaaagtaatccgttcacttgctcaagacggcaaaagtgttttagtcattgaacacgatttggctactttagatgcattgtccgacaatatccatgttttatttggtgaacctggaggatatggtgttgtatcaggtagaaaaggtgttagaattggaatcaatgcatacatcaacggatttttagctgaagaaaatgtaagaataagaagaaatcctattgaatttacaatcagaccaccgactcctgaagatgaaggagaatcactgtccagctattctgatttaagtaaggattatgacggattcaaattaactgcagatgctggagaaatatttcacgatgaaatcgtaactgcatttggttcaaatggtataggaaaaaccacttttgccaaaatgctggcaggagtagaagaaccgacaagcggagaagtagacacagaagttacaatagcttacaaaccacaatatatagtttctgattttgaaggaactgttagtgacttcctgtacatgaatgctccaagtttcggaagcaacatctttaaaagcgagattatggaaccttttaaattagaagatatgcttgaaaaagaagttaaaaagttaagtggtggggaactccaaagacttgcaatagctgcaacactttcaaaagatgctgaaatttatcttttcgatgaacctactgcatttttagatgtggaacaaagattaatagctgcaagagttattagaaaaatggttgaaagcagaaatgcagcatcacttattgtagaccacgatattgtatttatcgattatatctcagacagggcaatggtatttaacggtactcccggtttagaaggtcatgcatccaaaccgacagatttaagaacttccatgaacgaatttttaggaaatctaaatattactttcagaagagataaagaaacaaaaagaccaagagttaataaattagacagctatcttgatcgtgaacaaaaagaaaaaggagaatattattacttatcagattaa

SEQ ID NO: 1250 - DNA, 1068 bp, Methanobrevibacter smithii
atgcatccaagaccaagtcccatagctgcatctctttatactttaagagacatgaatgttgatgttattataatgcatggacctcatggttgttgttttagaactggcaggcttttagaaagtgacggtgtacgtgttttaactacagcaatggctgaaaatgattttattttaggagctagtgaaaaactagaaaatacattaaaagaagcttatgatatgtttaaaccggagtttataggtgttgtaggtacttgtgctagtatgattattggtgaagacttaaaagaagcaatagctaatgctaatttagattgtacagttattcctgttgaatctcatgggggatttggtgaaggagataatactgaaggagcaataatggttttagattctgctgttgaatatggtataattcctcgtgaagaggcagaccgtcaaattgaaatgcttaaaaaagctactgaaatagaaaaaaccaggggaatggctcagggaaaatatattcaacctaattttggtgataataaggaagaagtagctaaaaaaatcataaaggcactaagagacaataaaaaagtcgcttttgtattgaatgctaaaaaagaaacttcttatttatttgcagatattttaaactttgattatcgtgaaatcaatcctgaaaataaaccaataattgtggctaatttagatgaaaatattggtctttcaagaattaggaatcatgcagttaatattaaacaggaactgaaaacggacattgattatattactggaggattggacgaatatcctgtaaccggaaaagctgctgcagactacttaaaggaaaaccctgttgatttgtatgttgtatgcggtgttcctcatgcatttcctgttgaagaaattgaaggggaatcaatagccgtaactgatggtcctcgtttagttgaaccattaaaagatttgggatatgataatgtagttgcagaacttgatgctcactcaaaaactttagggactgataaaattgttttttctgactttggaggaatgattagatcagctattgactggaagtag

SEQ ID NO: 1251 - DNA, 1749 bp, Unknown
  Unknown gut bacteria
gtgttcggaaagggtgaaaatgtgaagcgcagctacctgaaaaaaattaaatatctccttatgctcggtatctcactgcttaccgttgtttcttccgttcagtctgttttgcttgcaagagctcccacaggcagttttacgcacggctattccggcactgcggcagaggaggcggtttcctcccgcgcggtttacgcggtttcaaggctgaccgatataaggggaatgggaatacccgagggaattgagaagattgccgacatagcgaccgatgacgacggtaatttttatctgctgacctctgacggaaggctgtttctccttgatggggactttaagctttcaaaggaatataaaattacctccgccgacggtgagccgcttgaaataaccggtgcccgcggcattttgccgatgagctccgatgatatttacatagcggataccgaaaacgagcgggtaatagaaataaacggcggcggcagggtaacaagggaaataacaaaacccgattcgcgattgattcccgaggacttcaagttcgcgcccataaagcttgagcgggacagcaaggggacgctttatgtgctgtgtgacggcgcttattacggcgctctgcttttctcaccaagcggtgaattttcgggcttttacggcgctaacaccgttaagggctctgcgcttaccactctttcgtatttgtgggacgcgcttacaaagaatgatgataaaagagcctattcggttaaaaagctgccgtaccggttttttgatttgagcattgatgaaaaggattttgtttatacctgcaccgggcagaccgataacgcctcctcaaacggtcagataaagaagctgagtcctaacggcgttaacattctttataaatcaaagcccgacggcacaaagaccgacgcgggaagctataatttcggcgaggcttcaaccgaaaagcgaaacaataaaaccgtagtgcagaatttcacttcaatacagaccgatgaaaggggctatatctacgcgctggattccacctacgggataatatatgtttacgattccgagagcaatcttataaccgcgttcggcggaggtaagggcaagggcatgcaggcgggagttttttcggctcccgaggcgattgcatacggaagggataagctggcggtcgccgattcgcagaataattcggtaaccgtattttcactcaccgattacggcagaacgcttatgtcggcgcagagcaaaacgctttccgcagactataagggctcaaaaagcgaatgggagagcgttattcgcgaggattcctcaaatcaactggcaatgcgggggcttgcaaaggcatatttcgccgagggtgattacaaaacggcgcgcgaatatgcgaaggcgggctatgactttgtaacctacagtcaggcgctcggtaaaaccggaagcgaattcataaataaaaatttcgtttggatatttttgcttgcggtcgccgttataggcgcggctgtgatcttcacggtcgaagcctcgaaaaagaagattgttttaataaggaacgccaaggtgcggctgctgtttaatacggtgacccatccgttcgattcgtttaacagcataaaatataagaatatgggatcgcttgtaatagcggcggcgcttacggtgctgttttatatcacggcggtaatttccgaaatgttaagcgatttccgtttcacctcgttcagcccgctcacatcaagcgcggct

SEQ ID NO: 1252 - DNA, 942 bp, Unknown
  Unknown gut bacteria
atggataagaaaatttgctccgagtgcggaacggagaacgaaaacgattacatctactgcaaaaactgcggagcgctgcttacggctgccccaaagcccgaaaatgagcagcccgagcacaaactcacagcggaggctgctccggcacctaagaccgtgccggaatccacggcacaggaaacggtgccgaagacagagcagtcttcatttagacccgctcccgcgcccgaagccgcagagcccgcatttaagcccgttcctccggtttataataccgaaaacggcaacacgggatacacccaaagcggcgctcccgcacccgacggaataccgcaggaggaaatagcgctgttcatcggcaaaaaatccgtcgtgataatgccgaaattcatcaaaatggaaataacgaattcaaagacctcgtggtgctggcccgcagcgctgctcggctttttcttggggccgatgggcgcggcattgtggttttattaccgcaaaatgtataagcccgccgcactgctgacggtaatcggcgcggttataaatattgtcacggcggcactcaccttcaattcgggttccgtagatttcaccgccctttaccgctctatcctggcgggggacgcgcagtcgataatcagcgcctttaaaagcctgaacgattcttcaactgtgcttgatcttatagccacagcaataagcaacgctgcagaccttgtgacctgcatacttaccggactttacggatattacctttacaaggagcactgcattaaatcgataaaccgcttccgtatgagcatacccgaccgccgctactacacaatgggactcgcttccgtcggcggagtatcgggcggaatgctcgcggtaggcataatctgcatgattgttgtaagcaatcttataaccattttaacatctgttatttcaatgctttaa

SEQ ID NO: 1253 - DNA, 1566 bp, Unknown
  Unknown gut bacteria
attcagaagattcaaaaggaaattccttcctggcagaaaagggacacggtgtttgctgtcataacgcttataagctcggtactgtttgtcgattggtcggttttcggcggctttaacgcaggctttactgcctcccttctgctgctttatgcgctgacctttgcctataatggggggaaaagccgtcatataggcgcattttcggttttttgtgcggcggcggcggttggcttttcggcaatattttcggtttataacgattcacttatgaatcttattttttttgccgctgcggtcatactgtacggtatttccgtcgcaggtattttcggcggggataaaaattcgtccccgatgctcagtatcctcaatacactgcttgtaaatccgtttgacaaaatggatatccccttccgctcctacggcagctaccgcagagagaataagcttagaggtgttaaccgacaggtgcttgcgggaatattgctttccgttcccgttttggttgtgatatttccgctgctcatgcgttccgacgccgcctttgaggggcttatagtatcggtcttttccggggtcggaatgctgattctgaagatcctgctcggagcagcggcatcggtatatttcttttccatgcttttctcggtaaaaaagaacctaaagcacgaatgcacggacatcgggtcggtcgaagagctcagaaaaattccgcccgcaacggcggttacgctttcttcgattctggcggcggtttattttgtttatctgctttcgcagtcggcttactttttcagcggcttttcgggcattctgccgaagggctatgccttcacccccgccgattacgcaaggcgcggcttctttgagctttgcggcgtatgcggaataaatttcgttacggtaagcgtcattttcaatttcacaaagcgcggcgaaaatgccgccgctccgcttactgtaaggatcatgtcaacggtaatatgcatattttcacttatatttgccgcaaccgcaatttcaaaaatgattatgtatatcggcttcttcggtcttacgcgcctgcgcctcatgacaagcatcttcatggcggcgttagccctgcttttcattataataacggtttcaatgtatgcaaagcgcttccctgcgatgaaatgtgtgattatatgctttgcggcgataggtcttataaccggcttctgcgatatcgaccgtacggtggcaagctacaatgtaaatgcattcacaagcggagtcttaaaggaacttgacatcgattatttaggcgagctttccgattcggtcgtgccgtatatagcgcagcttacaaaaagcgataacgaatccgtgcgagatgcagcatatcatgcgctttatgagcgcgccgagcgtctgtttgaaatgaacggagacaaaataagccttaaaaccgatgacagcccctcaaaatacaattattcccgagaaaacgcaagacagataatacaaaaagacattaagcagattgtttggaaagagagcgaaagggtgcgcgcagaagaagagcaggtttggatatattaa

SEQ ID NO: 1254 - DNA, 909 bp, Unknown
  Unknown gut bacteria
gcaaaggatatatgcgaatttcttgattatcaggggatatccgccgagcgcaaatcggtttacgccgatatatccgctcttatcgattacggggcggacattgtgcgttcggcatcgccgaggggctggtttttagcctcacgcgagtttgaagagccggagatctatctgcttgcggacgcggtgcgtaccgcaggctttataagtgcggcgaaaacgcgggagcttgtaaaaaagcttgactcctttgtttcccgttatcaggcacagaaaagagaaagccgcgtttatttttcctcctgcgccaaatctgtcaacgaagagatattttacagtattgataaaataagccgcgcaatagccgataaaaagaagatacgctttgaatatgtaaaccgtgtactctcgcccgacagaagcatagaaaagcagaaaaaagaaatgcttataagcccctatgcgctgacctggcaggacgatcattactatgttataggcaattacgaaaagtatgataatctgcttcatttgcggcttgacagaatgtataaggtggaaataaccgatatgccgcagcggcactattcggaggtcagcgaatataccgaccgtttcgatacccccgactatacctcgaagcttttcgggatgcacggcggcgaaatgtgcgaaatagagctttgctgcagcaaaaaaattaccgagcaggtcgccgaccgcttcggtgaggatatctttattaaaaaggtaacggatgacgaattttgcttcacggtacgtgcagcgctttccgacgcgctcgtttcctgggtgataagcttcggcgacagggtaaaggtattatcccccgaacggctgcgggatatgatattacaaagaaccgagcaagtgcttaagctttataggtga

SEQ ID NO: 1255 - DNA, 1590 bp, Unknown
  Unknown gut bacteria
cccgccggtgagtacgaggtgattctgcttttgaatgacggctatacagagggcggccgcttcggcttcactgtcggcgctctgatactgaaccgtgaaacctattactcaagcgaaaagattgaggtcaactgggctaaggtgccgtcatccgtaggctgggcggcggtttatccgaaggattataccgataaatacaaatactgcgattacataagcaagggcgaggcttccttcccgtcgggtcagagcggccgctataacggctacacctggccgcttgaaacgggcgattataccgccgttttctatgacggcagcggatataccgtaaactgcacggttgatttctccgttatcggaacaagcgttacggtcaccccgaaggaaatgtatgtcggtcattccgaaagcgttacaattgaaatcagcagcggcggattagccgcaaacgcatatcaccgcgttcgcctttataaggcaaaatccggcttcggaaccggcaacacgggcttcggcaatgccggaatcaatttctctaacgataatcttataggcgatgcaacaggcttcacaacagatgcaaacggcggcgcgaccgtcacacagaccctgcaccaaaagattacggatcccggcgtatacggctacgcaatcattgactcaacatgggatacaaaggcgattgcctttattgaaatcaaggatgcggcgagggtatcaatttcaagaacctccgtgccgctcggcgcaaatatcccgctggcgcttaaggtgaccgcgggagacggcggacttgaagccaataagtattataaaatacgcctttacagcggctggaacggcactaccggcttcggctcgagcggcgttaacttcggcggcggtctgaagggcgaagccggcgttacaaccgatgcaaacggagcttttaacattctgctcagctcccatgtgaagggaataacagagaccggaaattatgtgtactgcattatggacggatggaataccgtagcgcgcgcgttctttgatgtgaccgcggcaacagatccgttccccgaggacgcgccgtctgttaagcttgacaaaaacaccgtcatactcggctcgtccgagcagcttacattctccgttgcaaattcggcagagctcggtcttatcgccggcaagaaatacaatgtccgtctaatgaggaccaaggacggtttcggagtaaatgattcgggcttcggcgaaagcgggcttaacttctcatcgattttaggagagggtaccggcattactcttgatgaaaacggctcgggcagcgcttcccagtccattcactcggagctgattacagaacccggagtttacgcttatgttttgatggacggctggtctacagtcgccagagtgttctttgaagtgaaaaaagcacccggagatgtaaacggagacggagcagcggatatccgcgatctgatacatctgaagaagatgtatgcgggaataatcgaaaaaaccgacgcaggcgatattaacggcgacggtaatctcgatgcgacagatttggcggagctgaagaaaatacttcttttaaaataa

SEQ ID NO: 1256 - DNA, 1047 bp, Unknown
  Unknown gut bacteria
gccgcattcggcggccttaaaaataaaacaatagattttaaggacggcttcagcgtcatatacggcgaaaacgaaaacggcaagactacaattatgacctttattaaaatgatgttttacggcagcgagcgcgggtcttcctccatagctaaaaatccgcgtaaaaaatacgctccgtggagcggggaaaagtctgcgggaagcatcgatttcgagcacggcggcagaagctaccgtttagagcgggaattcggcaacaccaattcgagtgataaaattacgcttaccgatatgtctgacggtacaagagaaagcttatccggcaatgtgggtgaaagatttttcgggctatccgccgccgcgtttgagcgcagcgtctttgtgggacagttcggcaaggcggagagcgattccgctgccgaaagcgagataaattcaaagctttcgaatatggtgactacaggggacgaatcggtatccttcgccgcggtgagcgacaggctgcaaaaggcaaggtttgcccttctttccaaaagcggcagagcgggcgagtgcgataagagcaaaaagcagctggcagagcttgaatcggagcttgaaagagcggaggatatatacgagaagcatgccgaataccgtaaaaacgccgatattattaacgcgtcgatcgaaagggacgccgagcgcgcggcgtatcttaaggcaaaaatcaacagcgagcaggatataagaaacgccgaaaagcttaaagagctgcttgaaactaaggataagcttgaaagggcaaaggaggagctgcgtttaacaaacggcggggtgatagatgatttatatgtcggcaaggtcaagatgtgccttgcaaagcttgataccgccgccgaaaaattaaaggataaaaccgatgaggtgcaaaggctgtcggtcggtatatcggacgcagaggataagggcggcagagaaaaaatcgagagtcttgaaaaggaaattgccgacctggacaaaaagaaaacggagaccgaaaataatatttccgcaaataaaaaggca

SEQ ID NO: 1257 - DNA, 1044 bp, Unknown
  Unknown gut bacteria
atgctttttatttacagatttcggcgcggctttttacgaattgaaatacgcggcgatattgcggaggcgctgcttaatatctgcgcgaaaaacggaataccgctttggagcataaggaggcgcggaagcgttatcaggagctttatttcggtaagcgatttcaggcgcttgcccgctcttgttgcgggaagcggactcagggtgcatatactcgcaaggtacggtcttccgttttttacggagcgatataaggaaagactcggaataccggtgggcgcggcgctgttttttgcgtttttaagctttatgtcgggctttgtatggtcggtcggagttgaaggcaacagcgctatatcaaagaatgagcttcttgccgaatgcagagacctcggcatttatgagggcatgcgtaaaagcgatatatcgcccgcaggcgcaaagctgcaattactgcttcgggataaccgcctttcatggtgcgcttttaatatcgagggctgctatttaacggtggatgtgaccgaggcgaagaggaaggaggaggataacagcgtgccgacgaatttaaaggcggcggcagacggcattatcaaaagaatagatgtgacctccggcaactgtattgtcaaggtgggggatacggtcgcaaagggggatatattggtatccggaatcgaggaacgcgcggacggtacgaaatttgtccattcggcggggagggtgaccgccgtaatcgagcgggaaattaccgtaaccgcaaaatacaaacagaaaaccgccgttttaacgggaaagaaaaaaaccaaaagggtgctttcggtgttcggattaaaaattccgctgtatttagggagtgaaagcaagccgtaccgtgcaagtacgcataaaaaggtgctgaagcttttcggaagggagctgcctgcagcgctttatgaaaagcgctttgaatttacagaggaaacggaaaaaaacttcgatcggacatcactcgaggcagagcttgaaaggctgttttcggagcaggtgaagttagaaatttcgggc

SEQ ID NO: 1258 - DNA, 1185 bp, Unknown
  Unknown gut bacteria
aagccggcgccgcgccgcaaaagggcgcttccgacagatgaagatattaaaatgaccccggcggataaacgccgcaaaaaatcggagaagcccgaaaaaacgccggaaatgccgctgcgtgtggtaaacggcaagaagctcgaaaggcgaagaaaaaccgggatgtttttttccgttgcgctgattatcgcacttattctgactgtatttcagcttgttttaccggcaggaatcaccgaaaatacggaaaatctgatttcgcttatcggcaagggctcgtatcctataagccttgaaagcaccgaaacgcaaagcgccgtatcccgcggctcgtattattatgttttaacggacacacgcctaaacgcctttgcaaacggcggaaaggagatatattcgcattctcacggctttgaaaaccccgtaatgaagacctcgtccaccagggcactggttttcgatcagggcgggaatgaggcgtatatttataatctgcacgagctgaaaagcagcataaacagtgatgcggaaataataaacgccgcagtgtccgattcgggagtatacgctgtggttacccgctctgaatcctatgcctcggtcgtgaccgtttactcaaaaagaggcaaaaagatatacacctggtattcatcggcagatacggttaacaatgtcgctgtagcgccgaacggtaaaaaaatcgcggtttccacattcaactcaacaaacggaaaattcgtatcaaagatctgcattttgaattttgattcggcaaatccgatttcctcagtagatgttgagggcgggcctgtaataactcttaactcctttcaccgcacgggatttatcgccgcgaccgaaaacaagctttattttatcaattggtcggggaaaaacaataccgaatataaaaacgattacaccttatcgaggctttccgcgggtacgggcggcacggttgccgtttttaaccgtgaaaacgaccgggccgataaccgaatagtgcttttcggaacaaacggtcagctgaaaaaggaatttgaatttaagggtaccgtcggtgatattgcggtatcgggcgggcatatttattgtatcagtgataccgaggtttttctttacggcagcgacggaaagctcctgcgaaaagccgaatgcggcttcggcggcgtgaagatagcgccg

SEQ ID NO: 1259 - DNA, 915 bp, Unknown
  Unknown gut bacteria
ttgtttagtgctgaaactctgtttaaggcggtcgtatcacttttatgcgccttggtgcttttggttttgacggttacgctaaagcagaacgagaagagagccgaaagcaaagccgcagagcttgactcggtgaagaccgagcttgaagcgcaaaggtctgcgataagtgcggtgctgtccggcttcggtgaaatatgccgcgaaagagagaccgccgcggaaacgggggatatatggaaagaaccgtccggcgggacaactccgcaggcgcgccagcccgacggaaggcgcgtttgctaccttacatttgatgacggcccatcggataaaacgcttgaaattctcgatatactcggtaaataccgcgtcaaggcgacctttttcgtaatcgaaagcgggaatatagagtatgttaaaaaaatatatgaggcggggcatacgataggtctgcacacggcgtcgcatgattattcggtcatatattcgggcgaagaaatgttttacagggatataaccgagctttccgacaaaatatatgagctgataggtgtaagacccacgcttctgcgttttccgggcggcagcagcaataccgtcagccgcaattactgccgcggcattatgacaaggcttgttaaaaccgtgggcggcaggggatattcgtattttgactggaacataagctcgggcgacgcggaaaatccgacaccgagctacacctatatcaggaacagggtgctgacaagcgccgcagataaaaattccgcatgtgttttaatgcacgattcggcggataaggcgtcaaccgtgcaggcgctgcccgaaattatagagggaatgctgcgtatgggctattccatagaaccgcttaaatcggatacctacggctatcatcacagaaatttgaataattag

SEQ ID NO: 1260 - DNA, 2148 bp, Unknown
  Unknown gut bacteria
ctccccccccccgcccgtgtcgcggcagttgggggtaccgccgacggtatgacgagtgttcttacaaaaggggatttgtcgttttatgcaaatgccgaaaacggagaagttgctttaataaataccaaaagcggaataagctggaaatcaaatcccgatttttccgatgccgacgagcgcttaggcaacgggcagaagcggcttatgggcgctcagcttgaaatattatattacgatacaaaaaattctcctcaggaaagaaactctgccgtggcttctgttgcaaagggcggtctttcgttttcaaaaaccgaaaaaggctgcaggtttgtttacaatttccccgaggacggcataaaggtaacgctggaatacgaattgagcaactcgtatctttcggtgaaagtccctaaaaacggcatatccgaaagcggggaaaaccgcctgcttgaaatctcggttttgccatacttcggctgcggcagctttgatgataacggaactattttgctgcccgacggctgcggtacggttattgaaatgaacaacggtaaatcctcgggcagcgcaattcacgagcgaatttacggtgatgatgttgttgcgtctcccgaccgtttggttacagaacggaaaaatatgcagttcccggttttcggaatcggcaaaaacggaaacggattgctcgcattggtcgaaagcggggacggttcctcctacataaacgcatataccgcgggaatgaaaaaaaattataactgcgcttacttttcgtttgaataccgttctacgggaacggttgtattggatggctcctctaaaaatgcaaaaacggtgcgcaaaatttcagagcaagccatttcaaccgatttttgtatgcgttattacatgactgccgcaccgggggattataactcggcggcggagacctacagagcctatcttgaaaaggagcagaatttcagggcaaatgaaaaacaggaggaattaccgttttattttactgcttacggggcgctgcgccgcaagggaacggtatgctttattcctatgacggtaaccgttccgcttactacctattctcaggcgcggaggatgatagccgatattgaaaatgcgggaatatcaaatttgattttttcttatgtcggctgggaaaaaggcggagtatcgggcaaaatgcctaccgccggaaaatacgagggcaagctcggcgggaaaaaggaatttatacggctggctgaatatgcgaataacaacggcgttacatttctgcccgatgtcaacacggtgcgccttatgcaaaacggaaacggttttacaaaaaacaacgcctccgccgccaccttggacgggacgccgggtctgcaatattcgtatagcctttcaagcgggttgaaaaatgtgaatctgacgccttattgccttttggctccgaaaaaatacggcgcggttttggaaaaatattttaaaaaatataacacctcggctttttcgggcatttcgctgcgcgagctcggaagcacgctttattcggatcatcataaaggctcaacggatagggatcaggcactgaattacgctgaaaaggcgttgaaatatgccgcagagcagggaaaagagctattgacggcgggtgcgttcggttacgctgccgcagcctcggattatattatttccgcccctacatcggacagcggctatgatattaccgaccgcagcgttcctttttatcagttggttttgagcggttaccgcagctattccacagaacctgtaaacctttcgggcgattccgaaaaggtgtttttaaaggcggcggaaaccggcagcgcactgaatttttcctttaccgcgcaaaacggcgaaaaaaccgaagggacatatctttcaaagctttacaattccgattataaagattggctatcaaccgccgcagagcaatataagcgcctttcggaaatattcgcggcaacaggcggcacggcgctggtttatcacaagcagcttgccgaaggcgtatactgctcagtatttgaaaacggagcgcaggtaattaccaattatacaaattcggattatgatatgcagggcataaaggcttcggcaatgaattacaaattgattcggcagggggaatataaatga

SEQ ID NO: 1261 - DNA, 933 bp, Unknown
  Unknown gut bacteria
atggcaattgtcgccgtaacggtttcggttgttacacgaaggacaatccgtaatgaggtgtcggacgaaaacagcggcacctcgacggcactttctacaaagccggatgagcagtccgagcctcccataagctatgaattcagcgcggatactgcggagattcccgcgtcaaatgacgcgggcggggcaataattgtaaatttaagcacccacaaggtcacagccgcgcgcaatgccgaggagcgcctttatcccgcttcaaccactaaaattatgaccgttttagtcgcgcaggaaaatataaaaagctacgatgatacctttacaatgaccgccgatattacagatccgttatatgttgccgaggccaccgtagcgggcttttcgagcggcgaggtcattaaaatgatcgatttgttctacggcacgattttaccgtcgggcgctgacgcggcgatcgctctcgcaatcaaaatttcaggcagtgaggcgcagtttgtcgagctgatgaataaaaaggttaaggaattgggacttaaaaatactcatttcacaaatgtaaccgggctgtttgataagaatcattacaccacggcttacgatatggcaataatacttgaagccgcaatcagagatccgctttgccgtaaaattctttccacatatcagtataaaagcaccccgaccaataagcaccccgacgggctgccgatgagcgccacactgtttaattatatgtacggcaccgaacccgaaaccgcaaccattatcggcggcaaaacaggctttgttaacgaatcgggcttctgtattgcgtccttcggaaaaaacaataccaccgaaaacgaatacatagttgtaacccttaaaaattcctcgcgctggcccgcgattcacggacagataaatctatacaggcaattcgttgtttaa

SEQ ID NO: 1262 - DNA, 1701 bp, Unknown
  Unknown gut bacteria
atgaaaataatcgaaacgattaaaagacatgccaatattgctttggcgttaggcgttatgctgtcgatgatcgcggcgcaggcaattcccgtttttgcatcgccgtcggtttcggcggaggacgctgctgccgtgagccatcttgaagagctttataaggcttatattgaggagtacggcgataaaaccacaagagagggacttttgagggtatacgattcggcgcttgaaatcaactccgacagctttgcaaaggaaaaagccgccggctatgaggtcaagcttaatgccgcggtgctgcgcccgatagacggctctgaggataaggacggagaaataacccgcgggcataacggttatgtaaacataaacgccgaggtcaccaaaaattccaaagcggtaggtacggtatcgttcgcacagaaaataaccgcaggggtcaagacacttacctatacaaggtcatcagccgaggaggcttcctctgtttggaatataggctcgggcaaatacttaaattattataacggctcggcagataagcttatcgttcccgagggcgttgaggagatcaactggaacaatcgctccacctggtataagggcgataagaccaaggttaaaatcataatcttcccatcaaccatgaaaaaggttttggcggaaaccctgcagggctttacaaatcttattgcggtatatattcccgacggctgcacagacctcggcgcttcggcgttcagcggatgtacatccttgagatatgtccgcctttcggaaaactttacggcaattccgaagagctgctttgcaaacacgcctgcgcttacgcagatgtatattcccgcaggcataaaaagcatagccgaccgtgcgtttaacggcagcgcgctgcgtgacattgttatctgcgcggataatttcgtcggcgacggatatgatacccataaaaactttgtaattcagctgaacgggaatatcaatgaggaaataaaagccgatgttgaggcggatctgaaggacgaccgcggctttattgccgacaggcatttctactacctcggcaaaaacccgacggtcaaatcaagctggctttggtattcctgcgatatagcaagcggtgccgattacctctggtacaccctcatttacgccttaaagggcaacagcatcgaggagtttataaagacacagatctccaacagtcttgaggatgagtataccgcgcttgaagcggccgacgcaacgcttttaagcgagcaatacagaggaatcagaaaaataagcgatgaagaggcgctttcgcaccttgaggagctttacagggcgtatattaaaaaatacggcgacaaaacctcccgcgagggacttcttcggatctacgacaccgcgtttgcggtaaacgccgacagcttcgccgatgaaaaggcggtaggctataaggtaaagcttaacgccacggtgctgcgcccggttgacggaagctgcgataaggacggagtcatcacggttgcgcgcgacggctatgtgaacataagcgccgaggtcacaaaggacgggaaaacagtaggaacggtaaaattcaccgaggttttatccgccgaaatgaagaccctaacctacacgaagtcatctgccgaggaggacagctcggtttggaatataggcgcgggcaagtatcttaattactataacggctct

SEQ ID NO: 1263 - DNA, 978 bp, Unknown
  Unknown gut bacteria
gtgaaaataatgactctttcaaggcttgcaaagctggcaaatgtagcggtttcaaccgcctcaaaggcgttttcaatgagcagcgacataaacgagcagacacgcgaggaaattttcagggtcgccagagaaaacggctgctttaaaaagttttttaatgcgaaataccccaaattcacagtcgcactcatctgtcccgaggtgcacagccagcattattccgagttatgctttgcactgcagcgccgtcttcaggcgggaggctgtgagctttgcatatcatcaagcaatttttccgcagaggctgccgccgaccgattggattattacgaaaaatactcttcaaccgacgcgataattcttatagacgcgccggacacggtgctcgcgcctcacgaaactccgattgtggctgtgggcggcgaggttaaaaacgccgacgcggttataacccttgattatgagcctgccttaagggaagcgctgctttattttaaagaatcagggctttcgggcataggctttataggtgaagcacgcaccgtttcaaagcttgccgcattcaaaagaaatatgaacggaattttcggcggcgactttgaaaaatacatatccgtaagcgaactccgctttgaaaaaggcggatatgcggcggcaaaggcgctttatcagcgcggctctctgcccgacgcgctcatctgcgcttatgacgatctggcgctcggggcaatgcgtttcttttacgaaaacggtatttccgtacccgaaaaaataaaaataatcggaatggacaacataccccactccgaatattttgcgcccagcctttccgcaattgactttatgaacgaggacatagcctctgcggcggctgaaagcgtttttgaaattttaaacggaaagaccccgaaaacggagcgcaattttaaagcaaggctcattctgcgtgaatcatcggcgaataagcctataggatag

SEQ ID NO: 1264 - DNA, 1743 bp, Unknown
  Unknown gut bacteria
gtgtccgtaccctttaaggatattaaggaaagcggaaaaacaaaaataatttcaatttccgtgcttccgtatttctgcgccgtgccgaacggcaataataagaattcatatttgtttgttccgtcgggcagcggcgcgcttatgtataccgatgaagaaattcaaaacacctcgcgcagctttacgggtgaggtctacggcagagacgcgtcggaaaagattcttgacgatactgcggacgaaaccgcgcttaccatgcctgtttacggtgcggcggacggtgaaaactcactcttcgcgattatagaggagggcgacggctttgcacggataaacgccgaggcgggaagctttaaaaacaattattccgcggtttattcctcgcttgtacttcgcggaagcgatgagaccgaagccgagcgcaacaattacaccgatgaaaaggtttttgcggagagctatgatgaatccgcagtctacacggtcggcttctacccgctttcgggagataacagcggctataacggaatggcggcgcgctataagaaatatttatccgacagcggcgctttaaagaatacggaaagatcacagtcggcatttcatgtaaatattttgggcggggcaatgtccaaaaaattctttatgggctttccttatacaacgcttacaaaggcgtccgatttttccgatgccgaggaaattataaaggagcttgcagccgaaaccgggaaaacgcctgcggtaacgcttacaggcttcgggcaaacgggcgtagacgccggtaaaatagcgggaggcttttcgttccccgaaaggctcggcggtaaaaaaggatattcggctcttgaaaaatattgtgacgataacaaaatagatttatatgtggattacgaaacggttcgtttcaaaagctcgggcggcggggtgaataaaagctttgacacggcaaaaactcccggcaggcaggcggcggcgttttatactctcggcacagggctcagggtcccgaatgaaagcggcgctaaaataaggcttttaaagcgctcggcgcttgataatataaccgataagcttatagatcactcaaagaattacaaatcgggaatttcgcttgccgcgctgtcctgcacggcatattcggattatgccgaagcccgttattaccgcaagggcactgtggcaaagcaggtgagcgaaatatttgaaaggataaataaaagcggtcataaaacggcgggaagccgcgccaacggatatgcggcggcagcggcagacacggtttacgataccccgacggataacggcggctatttgaatcttgatgtatccgttccgttttattcgctggtatttgccgagagcaccgcgctttattcggaagccgtgaatttggcggataattcggaaaatctgatcttaaaatccgtcgaggcgggagtacttccctcgtttacctttatttcggagtattccgatgagcttgcgaactcttcgttcccgggcttttacggtacgctttttaaggatcaaaaggaaaaggcggcgggcataatttcaaggctttccgaattttcgcgcgttgccgcagagcagtatccggtgagccacgaaattatagccgacggcgtgagtaaaacggtattttcgtcgggggcggcggtcattgtgaaccgcacggaaaatcccgtgacgctcggcggcgttacggttgacgcaatgagcttttctttggcgcagtaa

SEQ ID NO: 1265 - DNA, 912 bp, Unknown
  Unknown gut bacteria
gtgcccgttaagagcacagtgagtgatacttcaagcgattccctaactgctgcgggcgctgcttccgaagcttcgtcggagcagacggaatctgcagagtcttcagagccgccaaagcccgaaatcgtccatgtagacggaatcaagctcagtgcatatgaaagaacgcttactgtgggcgacagatttatgcctatcgtaaccatgtcccccgtcaacgcctcaaacaaggcggaaaaatgggaatcgagcaataccgcggttgctacagtcaacaattacggaaatataaccgccaaaagcgcgggaagctgcgtcgttaccgtcacctcggtcgataatcccgatataaaagcagaatttaaagtgaccgttaatgaacccgtaaaggtcgaaatgacatatatggacggaatactcatagtcaacaagacctatcccctgccgcagaattacaaccccggtgtaaaccccgaggctaaagccgcactcgataagatgtttgccgccgcaaaggcggagcaaaaccttaaaatgtgggtctgctcgggctttagaagctacaccgttcagaaaaacctttataacagctatgtaaggcgcgacggtgcaaaggcggcggacaggtattccgcccgccccggatattccgagcatcagacaggtcttgcgtttgatatcaattatgccgactaccgattcaaaaacacagcagaagcaaaatggcttgccgccaacgcttataagtacggatttattctgcgctaccccgagggtaaggagtctattaccggatatatgtacgagccgtggcattacagatatgtcggagtcgaaagcgccaaaaaaatatttgacagcggcttaacgcttgaggaatattttggcataacctcctcctacggtggctga

SEQ ID NO: 1266 - DNA, 1086 bp, Unknown
  Unknown gut bacteria
atgagcaatatttcagaaatcgacaaaaaccttgccgtaaacgaagtcacctcaacagacggattgattttccgcaattgcttatcctcacccttttcacttcacggactgctccctacaaccccgtttttccgactgccgcttgaaatagcggaaacggtgaacccgggcgtcatggggctttgccgcaataccgccggcggaagagtgcgttttaaaacaacctcaaggcgtattgtgctgcaggttgaatatgacggaatctcccccatgccgcatatgccgcttacaggctctgcgggctttgatatgtatatttttgcgggcggcgcttactcatatgccggctcctttattccgccgatcgactgcaaggattcctttaaatcggaaatcacgcttcacgataactccgtgcgggatataacaataaactttccgctttacaacagcgttaaaactgttcgcataggcttagaggagggcgctcttctgtcatgcagcgacggctatacggataaaaagcccatagttttctacggctcatcgataacgcagggaggctgtgcttcacgccccggcaattcctaccaggcgcttatttcccgccgctttaatattgattattttaatttcggcttttcaggcaacgcactcggcgaaaaaaccatggcggattacatagcggctcttcccatgtcgcttttcttccttgattttgaccacaacagcccgaacgccgagcatttaaaggcgcatcatgaaagcttctttttgaacattcgcgaaaagaatcccgatctgcctgttatcatggcaacaaaaaccgatataccgcgttcgcccgcagccgaaaaaagcaatgcggcgcaccgagcggtagtgtacgagacctatgaaaacgccgtaaagcgcggcgaccgaaatgtaattttcattgacggtgcgaccgtcttttcaaaggcgcttacactctccgccccggcggacagctgcacggtagacggctgccacccgaacgatctcggctttgcatgcatggcaaaggtcttcggcgacgcaatcgaaaaaatgctcggtctttaa

SEQ ID NO: 1267 - DNA, 1167 bp, Unknown
  Unknown gut bacteria
atgaatattagggaaacggacgccgaatacattgcgggaacatataatcgctttccggtggagatagtatcgggaagcggctctgttttaaccgacacccgcggcagggaatacatagatatgggcagcggtatcggcgtaaatatattcggtgcggccgacggcgaatgggcggcggcggtaagcgcgcagctcggcaaaattcagcacacctcgaatctgtattacaccgagccatgcgtgaaattagcaaagctgctgtgtgaaaaaaccggcatgggcaaggtctttttttcaaattcgggcgcggaggcaaacgagtgcgccgtaaaggcggcaaggaagtacgccgcacgggaaaagggagacgcctgctacacaatagtgacgataaaaaacagcttccacggaagaacgcttacaacccttgcggcaaccgggcaggagcattaccacgagctttaccgaccgctgacaccgggctttgtttcggtaaacgccgaaaagcccgaggaattaaaggagctggcggggcggataaaaatcgccgccgtgctttttgagtgcattcagggcgagggcggagttatcccgctctcaaaggattatgtaaaatttctgcgtgaattcacagagcagaacggcattcttttaatgattgatgaggttcagaccggcaacgggagaacaggcaggctttattcatatatgaattacggaatcacgcccgatattgtaaccaccgcaaaggggctcggcggcggactcccgataggggcaacgcttctgtcgaaaaaggtcgaaaatatatttgaattcggcgaccacggctctaccttcggcggaaacccggtctgctgcgcgggcgcgtacaatgttataagccgattggatgaggaatttttatcggaggttgcccgaaaggggaaaatgcttgccgacacactggcaggttcacccggaattgaggatattacgggtatggggctgatgctggggcttaaaacgaaaagagccgccgctgatgttataaagcaatgcataaacgacggggttttgtgcctttccgcaaaggacagggtacgccttctcccgccgctcaacacgcccgacagcctgcttttaagggctgcggaaataataaaaaacgcctgtaaaggagaataa

SEQ ID NO: 1268 - DNA, 1347 bp, Unknown
  Unknown gut bacteria
atggaagcaatgaaaaaggtaatcgcggtattgtgcctttgcggtttaataggcttaacggcaggtttgccgttaagcccggctgcagccgaaaaagctcagacggcacaaaacggcggcacgccggtctccggtcaggtgacatatcccgaatattgccgcaatacaggctccgttccgtcaagccccggagaaaagctttcgctttatgcagcggactgtgcaaaaataacaggcgataatatttccttggaaaattcctccgatcatgagggcggaaaaatcattcgttgggtatcgtccgaaaaggattcctccgtgctttggcgctttaatgtatctaaaggggcgcgttatcggctgaagatcagctactgcgcccttgaaagcagcagcagcataagtcttgggcttaaaatcaacggcgaatacccgtttaccgcctgtcaggacataggactttataaaatatggaaaaacgagaccgacgactttgtcgttgacagcgcagggaacgaaaagcgccccgcagcggttcaggtgataaaatggcaggaggcttttctgtcagacagtgaaggtgtcagcaatgagccgtatgaatttgccttttttgaaggtgaaaataccatagagctcataggcataagcaccgatctgctgatttcctcaataacacttgagggtgaggaagagcccgaaagctatgaaagctattcggctgcggtttcgggcggaaagaacgccgataaagcggattcggtgattgttcagggcgagaaaatgaaatatcgctccgattcatccatagttcccatggaggacagaagccacgccgaaaccatgccgtccgatccggtgcttacaagatacaacaccgtaggcgattataactggcagaccgagggtcagtggatatattgggaatttgaaattaaaaccgagggctactacaacataggtatgcgcgttcgccagaattaccaccgcggatatgcttcatcgcggaaaatatatatcgacggcgttgttccctttaaagagctttcacaggttgatttcaattacgcgcgaagctggtattttaaaacgctcgggaacggagtaaaggattacggcttttatttcacaaagggcgtccattcgattgcaatgcaggtgataccgggcgataccgccgagcttaccgaggcgctgcaggacagcgtgctgcagctgaaccgaatttaccgcagcgtaattatgattaccggcacatctcccgacgcttacagagactacaatcttgataaggaaattcccgatttgattgaggatatgacaaagcagcgggatatacttaaagag

SEQ ID NO: 1269 - DNA, 1059 bp, Unknown
  Unknown gut bacteria
tttgcggggtggtacacaagccccgaatgtcttgacggcacagagtatgtaaagggtgcaaaaatgcccgcaagcaatttggcgctttatgccaaatgggcgccgcgcacctacaccgtcaatttctttaaaaattacgatgatatgctcaaatacgaaagcggagattcctctgtaaagccgcttgagagccgcacggtagagcacggcgcggtgacaggcagcgttaataatcccgcggacgatttttcgggttataattacaccttcggcggctggttttatatgcgcctcggcaaaaagacggcatacacgccgctggatattcccgtaacgcggaatctaaatgtttttgccgattgggggtcgcagtccgcacagccataccgcattcactacgcggtgcttgagaccgaaaaggataaagcgtggcttgagcttttgtatgccgatgaaggcgcgcagtatcaaacggatttttcctataaggtgaagctcggggatgaggagcgctcgtatgtttatttggaagcgcgcgacggcgagcctgcgggcttccaccgcgaaatagccgattcttcaaggggatacgcctatctcggcaacacaagaaccttttatccgaagacgggcaatccgttttatcagctttacgacgagtataacaacggctactaccccacccttgcaagccattccgtaacaattaaatatgaggacaataaaaacgagccggagaaaaatgttttcacctttacctatgtgagcttaaaggagatatcctacacggtggaatacagatatcttgaaaacggcgagccggttccgaatgtccccgaagagggcaagaacggctctgtcctaaaaaccaccacgcttgcggtcgtgaccgagcgctttgccgttgttaaggactatatccccgacgcgttttacaagcgccttatccttgcggtggaaagaaatgaggacggcgagtatgtcggctcaaaggataatgtaataacattttattacaccaaaaacacggcgaacgcttattatgccgttcactatatg

SEQ ID NO: 1270 - DNA, 1041 bp, Unknown
  Unknown gut bacteria
atgcttaagaaacttaaaacaaagctttggtttaatattttcataagaatagccgcaatatttgcggcttttgtttttgtgctttcgctttctaatgttagttttttggtcggatttttctccgcaaaggaaaaaaagtcgcttaaagagcagctctcgcaggtggaaacgcttgatttcaacgacaccacggcggtaataacggcgctttcggaaataaacgaaaaatataatttcgatgttgaaatatataattcgtcggggcgcatcctttataccacacacggcggtcaaatgatggactatttctcacttaaaaacgataagtttattatgactcacgaggaaatgaccccgctaaaaagcgagaccttaggcgacggcacggttttcgagaccgctgttcgccgttttgacaaaagcgagtatctgctttgccgcaagcagatatcaaacaatttatttgctgaggtcaggatacaaagggagcttatttcaaattccgcttcaatcgccaatcagtttatgatctttgtttccgtaatctgctttttactttctataatttgggtgttgatcttcgcgcggcagttctcccgcccgattgcagaaatgaacgatataaccgaggatatggcaaggcttaattttgaccgcaagcttaaggtggaacgctgcgacgaaatagggcagcttgcaaggtctgtaaatgcgctttcagaatcgcttaataccgcacttacagagcttaccgaaacaaacgccaagctgcgcgacgatattgaggaggagcgccgtcttgacgctatgcggcgcggctttgttgccaatgtttctcatgagcttaaaaccccgatagccattataagcggctatgccgaaggactgaagcttaatataaacgaggaatcaaaggaagaatactgcaatacgataatagatgaaagcagaagaatgaaccgtttggttttgagcattttggagctttcacggtatgaatcggggcagatgccgctgaaccgcagcgattttgatgtgtcg

SEQ ID NO: 1271 - DNA, 1317 bp, Unknown
  Unknown gut bacteria
tacctcagcattaacggagaatggctgaacgatataataatccccaaaaggaacggcaaaaacggcgactttgattcgtttttgcttgtcaccaaaaatataaacgagcagaaaaaaacagaaatagagtatcagcgccgccttgaggaggcaatgcgcagcgagatgcgtgcaaatgaagcgaaaaccaaccttttgcgccgcatgagccatgatatacggacgccgataaatgcaatactcggaatgatcgagattgccgaccgcaacgtcggcaactttgaaaagcagaagtactgccgcagtcagggaagggtggcggcggaatatctgcttgagcttgttaacgatattctgacccttaaccgaatcgaggcggacgataagacggaggtatgcaccgcctttgatttgcatgacgaagccgaaaagatcttcacaatcgtcaatatgcgtgcggaaaacgccggggtaaagcttaatgcgcccggcatttcatgcagcggcaggcagctttacggcaatgttctttatttccaccaaatagttataaacatccttataaacgccgtgaagtacagtaataagggcggcgaagtggatttttccttttccgaggagaaggatgacaacggcgcgaaggtacgctttgtctgcaaggacggcggaatcggcatgagccgcgaatttcagcaaaggatgtttgagccgttcgcacaggaaaacaatgaggaaattaaaccctacggcggtttggggctcggtcttgccatagtaaaaatactgaccgaaaagctcggcggcacgctttctgcggaaagcgagaaggggagcggcacggtgtttgaaataacgctgccgtttaaatatgcgccggaaacggaaatcaaagccgaaaatgagaattacagcattaaagggcttagaattctgattgccgaggataaccacataaatatggaaatagccgaataccttgcaggggaggcgggtgccgaaaccgtacctgcgtttgacggtaaggaagcaatagatatttttgccgcctccggaataaacgaatttgacgcggtgcttatggacataaccatgcctgtgatcgacggtcttgaagccacaaaacgcatacgcgcgcttgacagaaaggacgccgaaaccgtgcctatcatcgcaatgacggcgaatttgtttatcagggatatagaaaaatgcttctctgtaggtatgaacggatatgttccgaagccgataaacgagaagcagcttgtgaagataatagcggaaaaatgcgcggaaaggaaacaaaatgaagcttaa

SEQ ID NO: 1272 - DNA, 1680 bp, Unknown
  Unknown gut bacteria
atgtataaaaaaataacagctttgattttgtgctttgcgctttcgggaattttattaacgggtgcgtttaaaaccggcgccgccgcagatgtttgcgccgtttacctttcgagcgacggcgatgattccaacagcggtatcacagccgataaaccgcttaaaactctgaaagcggcggtaaatacggtaaatcggctggagcttgtcggctataacagagtaataaatattgtaaaatgcggctggaacggaatttcctttgatatgtcgggctgcacgccgtataccgaaatgattaccctgacggcgccttccgggcttacggtatggtcgacctcggatatgtatctggcgggtcctttgacgctcgatgcggattacggaaattcccgcactcagagtgcgcttaatatttataccggcggttaccccttcaccctgctttcaaaggatcaaaagggaaattcaaacatatatgcgggctttaacagccgcttggggctgacagccgatgaggaaagcggaaatatagagtggaaaagcgatttaaaaataacgcttgcgggtgagcgcgaaatgacggtcggcaaggttattgcgggaaactgcagcgatcccggtcacaatgtgatatacggtaccgccgatattctcattgataaccccaacctcaccgtttcctcattaaagctcggcagcaacggaaacttcacaaacaccggcacgcagtccaaccgctttaagggtataagcataaccgtaaacagcgttaaggaaatagcaacccttgagggtgctacatattataatgcggtatataccgaagaactgcggctgatattcaacaacggcacggcggacaggataacagatacgcttatttacggcaaatacggaaacaccaatatacaggcagccaaaaaatggattgtcaaaaacgggacggatacgccgatcaaagcgggagccgagccgggagtatttacggttgtcggcggcagcgccgtgatcttcacggacgatgaaaatccgaagcttacatatacatccgaaaaaggcaatataacggtccctgcgggcagctacaccgtaacggtatcagacacggaggaatatacattttccgaaggtgtttttaccgccgtcaccgatttaaaggactttaatcttacagatattgcccccgcacagtcgggcgggaagatattgctcggctttaaagatgaaaacggcggatatttaaaccgtaccgcaaatttaaaaatcaaagccggtgaaaggctttacgccgtatataccgatttcccggtaagcggcgaaaacgcggtattttcggtatcgggctttgaaaggcgcggcggcgaaaagctcggaatacggtttattcttgaaaaaagaaacggctttgaagcggcgacagccccgctttcaggcatgaaatacggctttgcggcaatgcccgagcattttctgaatatcggagaggcgctcacggtcgataacgaaaacgcggctgtaaggactgtcggcggccccggcttcgtcttttttgacggcagggaaaaattcaccgcctgcattaccggtattcccgaaaagcactatgcggagggctttgcggtacgcggctttgttacctataccgatcttaacggcaacagccgcaccgtttataccgaa

SEQ ID NO: 1273 - DNA, 888 bp, Unknown
  Unknown gut bacteria
atgccgcttaagggcgcatgccttaagcttatttatccgcagcccgagcttagattaatgggagacgcggatatacttataagatatgagcagtatggaaaaatacgcccgattatgactgcgctcggctttaatgaggtgctcgaaagcgatcatgagcttgtatgggataaaaagggaattttgcatgccgagctgcataagcggttgataccctcctataataaggattattataaatattacggggacggctggcgctttgcacggcggggtaacggctgtcggtatgacatgcgggatgaggatacttatgtatatctttttacccattatgccaagcactaccgcgacggcggcataggcatacgccatatgacggatttgtatgttttttcggataagcaccccggtcttgatttcggctatattgagcgtgagcttgaaaagctgcggctggcggagttttacaaaaacaccgagcatacacttaaggtttggttcggcggggaagagcccgataatatgtccgaccgcataacaaatacaattttcggcagcggctcttacggcacgcatgatacgcatgttttatccgccgcagtcaaaacggcgggagaggaaagcagcgagaacgctatcagaaaaaatctgtttttaaaccgaatgttcccgacctgcagcgcaatggcttcaagatataaatgccttaaaaatcatccgtcgctgctgccgctaatgtgggcggtgcgctttttgcagataccgttccgtcgcggcagtataaggcgaaatgtcgatttggcaaaaatagcagagccggacaaggtgatagcttacagaaaagagcttgaagcagtgggtcttaaattcgattttaaggagtaa

SEQ ID NO: 1274 - DNA, 1191 bp, Unknown
  Unknown gut bacteria
atgaaggatcaccgcattgccgataagcttatagagcaaagatttgaagaaataagcaaaaaaacagatgccctgccgaaaacgcaggtcaactacattttcgtaacggacacccatgccgacgaatatcttttaaaggatgaaaacggcaagctgacggtttttgaacccgaggataccgtaaacgaccgcataaatcaaattgcaaagcaccttgaaatcgccgttaacatagcaaataaaaacgataatattgactttatcgccgtcggcggcgaccttatgaacgcctactgcataaaaggcaaggagcatgttttgagcaatctgcacaggtcggtcgctccgcttaaaaacagcttaaagccggtgcttattgccttcggaaaccatgacgacaacgccttccagtttttgaatccgaatattcccgcagccgaaagggaatggattataagcgataaggactggaaggaaaaagtcaccgatttgttccccggagcagacggagaggttcacgatgaccgctatgaatattcgaaatattattattatgatcttaagaaaaaaagaacaagaataataattctcgacactatggactgccgccgcccgtttgatgaaaacggcgttgtaaacggagaaatgcgattgaagcgcatatgctataccgatcagcagctcgactggctcgtaaaccgcgcaatgaccgcccccgccgattacaattacatttttatctctcacatgggtatcgattccgccgtgaacagcaacagaatgctcggcggcgagacgctccgcgaaattataagggcattccaaagccgctcctcctacagcttttcatacaccgatataaacggtgaggaaataaccgtaaacgccgatttccccgaaagcataagcgggaaaatactgttttattccttcgggcatcagcattccgaagcgatactttacagcgaggatattaacctctggcaggtcgcaacaggctgcgagaatatgcgcggcggcgagggtgaaggcggaagcgacgcgtccgtgaaatggaaaattctcaataaccgccgcgagggcgacgaaaccgaaacctgcattgatataatctctgcaggcacagaggtttgtcataaattcaatataggccccggagacgatgccgaaatgccgtataaatgtgaataa

SEQ ID NO: 1275 - DNA, 693 bp, Unknown
  Unknown gut bacteria
atgcttgtgataggcagcgatatttacgcaccgtatttttatattggcgaaaacggtgattttgccggcttggatgtggaaatagcccgcgctgcatgcaagaaacttaatgtcgagccggtctttaaaaagataaactgggaaaacaaggatgagatgcttaataacggtgacatcgactgcctgtggggcagcttttccatgacggggcgggaagacgcctatagctgggcaggaccgtatcttaaaagccgccaggtggcggtggttaagacctcatccgatatttttaaactgaacgatctgaacgggaaaagcatagccgttcaaaacggctcaaagcccgaggagcttttccttgaaaacagcctgccgcagataaagagccttcgcaatgtttacagcttttcatccataggcattgtttttgcggcgcttaaaaagggctatgtcgacgcgtgcgccgggcatgagacagcctacatggagcttatgaaaagctctgccggtgaatacagaattcttgaagagccgctgcttgcggtggagttgggcgttgctttttcaaaggaaagtcccgcgttctctgccgaaagactgacaaatgctttgaacgagcttcaaagcgacggcgttattgccgatataatcgcctcctacggattaagctcagatgtattgatcggagggtga

SEQ ID NO: 1276 - DNA, 1563 bp, Unknown
  Unknown gut bacteria
atgaataaaccctttgaaatatttgaagaataccgtaaggccgccgattttaaatcggcgctcgggaaacgcgggctttacgagcagaaccgcataaacgagcgcttttacatcggcgaccagtggtacggcgccaaatgcggaaacgaccgcccgcttgttcggcacaacataataaagcgaataggcgattataaaatgtcgcagatattaaattcgccgctgtcggtgacgttttccgccgagggcattccgaattccggcagtgcacaggacgaaaggataagggagataaacaccgcaatgtcggcgctcggcaattattacagcgtcacggcagagcgggtagggcttacatccctttatgcttcggcgctcagaaacgcctacatcagcggcacgggaattttatacacctattggaacggtgacattaagaccgggctttatgcggacagagaatcccgaataccgataaacggagatatttcctgcgaggtcttgagcgttgaaaatgtctatttcggcgacccgtatatttcggatattcagcagcagccctatattattattgcaagctgccgtgaaacagaggcggtgctcagggaagccagacgacacggggcggatatttccgagctgcgtgccatagaggacgattccgacgacggcaaggttacggttttcacaaagctttttaaggaatataaagcgggcggcggctatacaattaaaagtgtgaaggtcaccgaaaacgcaacggtaagaaaggaattcgggacgggactttcgctttatccgcttgcggttttctcctgggagaaaagagggggactggcttacggtgaaagcgagataacctatttaataccgaatcagatagccattaaccgcatgataaccgcgagcgtatggtctgccatgacgaccggcatgccgatgatggtgataaacggcgataccgtacccgacggcattaccaacgaaccggggcagataattaaggtctacggcagcagcgaggaggtaaacggcgcggttaaatatgttgcgccgcccgatttcagccgtaatttcgagcaaagcctgcaagcgctgatagacaacacgcttacgcagagcggtgcaaatgaggtagcgctcggcgacagccgcgcggataacgcaaccgcgcttataaccatgcagaatgccgcgattatgccgctgcagatagttaaaaaccgtttttattcatttgcggaggatatttcgagaatatgggcggatttctggatagcctgctacggaaagcgcggaataaagataaaggattcggacggagtgaaatactttgcttttgattccgaaaggcttcgcgggcttattataaacgccaaaatcgaagtgggaacgggtactgtttacagcgagcgcgagtgtgtaagcacgctgcttaatctttttgaaaagggtattatcaacaaaacgcagtttttagagcgtctgcccgacggtatcgtacctgacagacagggcttactaagggaagaaagcgaggaggaacgggatgaaagcgtttga

SEQ ID NO: 1277 - DNA, 930 bp, Unknown
  Unknown gut bacteria
gtgaacattttacatttgaaatatgcggttgaaatagccaaaacaaagtcaatcagccgtgcagccgaaaatctttatatggggcagccgaatttatcccgcgcgattaaggaattagaggataatcttaatatcactatattcaaccgaaattcaaagggtattacgataacgcctgagggcgaggaatttctgcagtatgccagaagaataatcagccaggtcgaagaggttgaagaaatatacaagaacgaccgccgaccgaagcagcatttttccgtctgcgttccgagagcaagctacattgcctgcgcctttgcggactttgccaaaagtatcagaagggatattcctaccgagatattttataaggagaccaattcgcgccgcaccgtcaataatgtcgttaagggcgacagtgatttaggtatagtgcgctttcagtcggcctttgaaaaatattttgaatcgatgtttgaggaaaagcacctgaacgccgagattattaccgaattcaagtaccgtctgcttatgtcaaaggagcatccgctggcaaaaaagaaaacaatttgctgcaaggatctggcaccgtatatcgaaatcagccatgccgatccttatgtgccatcgctgccgctgaccgatgttaaaaaagaggagcctgcgggcagcgtggacaagcatatttatatttttgagcgcggcagccaattcggattgctgcaaagcgtgaccgactcgtttatgtgggtatctcccgtgccgaaggaaatttatgagcagtataatcttacagagcgcgtctgcgaggataacgacaaggtatttttggatgttttgatttacagaaacggctataagctttccgagcttgacagcgcgttcattaccgaggtctgcaactccaaaagaaagtatttaacggtttaa

SEQ ID NO: 1278 - DNA, 942 bp, Unknown
  Unknown gut bacteria
atgagtaaaatcaaaactgtttttgtggcgggagccacggcgtccggaaaaacagagcttgcaattaagcttgccaaaagatttgacggcgaaattgtttccgcagattcaatgcagatttacaagggaattcacatagcctccgccgcgcccgatacggaggaaatgcagggaataccgcattatatgcttgaatttttaaagcccgatgacagcttttcggtcgcagaatatgttgaaaaagcacgcgcgtatgtaaaggacatcgcgcgccgcggcaagctgccgatcgtggcgggcggaacggggctttacattaattctttggcggataatataagctatatcgaggaaaaaaacgacggtaagctgcggcgcgagctggaggaaagatttgaaaatataggcgcagagcaaatgcttaaggagcttaaagaaatcgatcccgagactgccgcgagacttcattcaaacgataaaaagcggataatccgcgcatttgaggtttacaggcttacgggaaagaccgtaaccgagcagaataagctttccaaacagggggatgcccttattgatccctgcataatagaaattacctaccgcgaccgcgaaaagctttatgacagaattaaccgcagggtcgataaaatgctgcaatcggggctggcagaggaagcgagagcagcgctccgaaatactgcgggcggggcgtatcaggcgataggtcacaaggagttgtcaggctatatttcgggagatatgagcctggaagaggctgccgaaaagcttaaaatgcaaacaagaaggtacgccaagcgccagctcacctggttcaggcgggatgaaagaataaaccgaatatatgccgatgaaacggaggatgttttttcggcggcggagaaaattaccgaaaattttttaggaacggaggaagccgagtga

SEQ ID NO: 1279 - DNA, 531 bp, Unknown
  Unknown gut bacteria
tttatttcggcgtttgatacagaggatgaaaaaagcaaatttgagaaaatatattataaataccgtgatatgctctatgcgtgcgcgctgaagatagttaaaaacagcgcagacgcggaggatgttctgcatgacgcgtttataaagacagcgaaaagcattaagcagatagacgatataggctcaaggcgcactgcggcgtatcttacggtaataaccaaaaacaccgcctatgaccgtctgcgccgccttaaaaggcttaacgaaacgccgattgatacctgtgaactcgcagcggatgacgcgcttattgaggagcttgccgaaaaaacggagtacgaagacctgattgccgcaatcaaaagcgtgccgacgccgtataatgaggttttatttctgcattatgtaaacgagctgcctgttaaaaaaacagcggcgctgcttgaaagaaaggtatcaaccgtaaaaatgcagcttgtgcgcggcaaaaagctgctgctgcaggcattaagggggcaggaaaatgaataa

SEQ ID NO: 1280 - DNA, 930 bp, Unknown
  Unknown gut bacteria
gtgagcagcatatttaatgccatttatgcgttctggaatcagataatttacgctgtcgccggtatgcgtataccgtttgatattatcgatatacttcttatggcgtatatcatttataaggctatcggttttttgcgtgaaacgcgtgcggggcagcttgcaaagggacttgttatattcgttgtaatctattttgttgcaaactggtggaacctgaccacaatgaaatggatactttcgagatttgtggattacattataatagccattgcaatcatatttcagccggagctgcggcgtatactcgagcgtgtggggcatacgaaatttgtcagcgctcacggctcttcgcttgaatccgatccgcttgaggattgtattgataaggtcagccgcgcggcgggaatcatgcaggaaagcaaaacgggcgcacttatagtgtttgagcggtctacacagctcggcgaaataatagataccggcaccgtgataaacgcagacccgtctgtgcagatgataaacaatgtattttttccgaaatctccgctgcatgacggcgcaatgataataagggactcacggctctacgccgcaggctgcattcttccgctgacccagcgcgaggatatatcctcacagctcggaacacgccacagggcggctatcggcatgaccgagaattccgacgcggtggtgcttgtggtatccgaggaaacggggaacatatcaatagtttcaaacgggcagatagaacgtaatttcaatgctatatccgcaagggcgaagctcgggaagctgcttttatccgacgcagaagccgaaaccgacagccctgtgctcgcaaggctcaaaagcatgaatccgttcggaaaagtcaagggaaaggaagcgaagaaagcaaatgaatcggaaaataaaaattcccgttaa

SEQ ID NO: 1281 - DNA, 831 bp, Unknown
  Unknown gut bacteria
ggcaattccgagcccggtttttcggaaaaagcgaaggaggacgagcctgtaagctttgatgctcggcagcaaaatttcgatgatacggcagagcctgtaatgagcgtggatgctcaggctgacggcacttcgcagcaggaacagccgaatacggatgtacaaccgaatttctcgggaatatataacgacggctttaacactccgccctgcacaataaattatactccgatcactgctgttaaggattacaagccggtaagccgcggactcaaatactttgcggcggtgcttgcgggagtaatccttttgactgcggcatctgcaggaggatattttctcggcagaagcagcgtgcgttcggtatcaggcggaaacgcaaagatcgagcttgcggcaaagccggcaaaaaccgatgaaaagaccgctgccgaggtttatgaagatgttaaggcgtcggttgtcggaataatggtttacaataccgcgggacagggctcacaggcaagcggcgttttctacagcagtgatggatatatcgtaacgaacgatcatatttatgccgaagtgccttccgccaaattcaagatttatacttcggataataaggagtatgacgcgcagtacgtcgcgggcgatcaggtgagcgatttagcggtgcttaagattgagggcagcggctttaaggcggcgcaggtcggagattccgcacagcttaatttcggcgaaagtgtggtggctatcggcagaccgagcgatgccacggatgattcgagtatcaccaagggcataatttcatcggttggcagacgcgtgcgcaccacctcaaattat

SEQ ID NO: 1282 - DNA, 1032 bp, Unknown
  Unknown gut bacteria
ggcagcaacgcgtatatgctttacatcaaaaatccgatagcctcgcttgtttccacccttaaagggcagggctattccgccgcggcgctacatccgtattatgccgagggctggaacagaaccaaggtctacaattatttgggctttaataaatttacaagccttgaaaatattattgatatttcacttatgcgcgaataccaggcaaacggcagtgacccgaattacctgcaatcattaatagaacagaattatcctggcgaaaatatgctgatacgacagtatgtaagcgattcatatgactataagcttttaataagggactatgaacagcgggataagtccgttccgtttttctgctttaatgttacaatgcagaaccacggcggatacaccacaagctgcgtaaactttgacgaaagcatttacgccacctcggtttcaaagccgtataccaaagcgaataaatatctgtcccttgtaaaggcgagcgataacgcctttaaggagctgatagaatactttaaaaatgttgacgagcctacggtcatctgtatgttcggcgaccaccagccctctgttgaatcggattttatagccgaggtcataggcacgagcggtttgtcggggcttaaccccgcacaggagcagagccgccatgtaacgccgtttataatatgggcgaattatgatatcggctcgcagaccattgataaattaagctcgaactatttgtcctccttggtgcttaagacagccggagttaagcttacggaatataacaagtatcttttaaagcttgcggagacactgccggtcattgatacggtgggatatatcgacagcgaaaacaactactacaaatggagcgatgtatctccctacagccatctgctcgctgaatacgagaagatacagtacaataatattttcgatcaggccaacgccgattccgacatattctatattaacggatatgtgcctaaggctgccgaagaagaagcgtcaagtgagaacggggaggaaaattaa

SEQ ID NO: 1283 - DNA, 1326 bp, Unknown
  Unknown gut bacteria
ttgaacgagaacagctggtcggagcttgagcttgacaaagcctacccctacggcgacggcagctttaccgccgcaaaggttccggcagaacggcttttcgattcggaaaacggcagcaaaagctacactgcctgcattacggatattaccgacgaaaagctcacccgtcagtatactgtaagaggctacataaaatataccgatattaacggtatcgcaagggtgctttataccgattatgcctcggcaaatatgtattcacaagcaagagcggagcttgaaggcggcgagctttccgtttccgcccgcagcgttttgacaggtataaccgaaacggtcaaaggaattcaaaccggaaaatatgcgggagcagacaaaataaccgtcaccggcaatgcaaacaacccgaattattatatttataagctcggtgaaaacggcatttccgttcgcgatgtggtaattgacctcggtcttgacaaacaacttgaaatcgttcagctttccgatatgcatttcaattatctcaacgcaacggattacaaggtaaagaaccccacggtgctttccaccaacgatgtacgcaccttcggcaaaaacgcttcctccgtcgttaaagcgcgcaaggcgcttgactttgcaagaaccgccgacgcagtggtcttaacaggcgacaccatcgattacttaagctacggcggcatagagctgctctataaggaaatatgggatgttatacccgatgccatggttactatgggtaatcacgaatatctgcagagaatgcagggtgtaatgcccgaaagcctctccgccgagagaagatgggagatactcagaagcgtttggaagcatgatatcgattatacctcaaaggtagtaggcggcaaggtcatgcttatccagctcaacaacggcgagggcaaattctatgcaagccaaaaggcaatgctcgaagccgatatagcgctcgcaagagcgaacggctacgcagttcttgcgttcatgcacgagcctatcagtaccggaaatgcatcggataccaatattaccgcgatccgcaaggatgacggcagtgcaagcggaaattactattccggtcaggtcggagggccgaacgccgatgccgccacaaaggcgatatgcgatattatagccgcaaacggcgatataatcaaaggcgttttcaacggtcaccagcatgcggattattattcggaaatacttgcaaaaacagcatcgggcgccgacacgataataccgcagtacaccttgagcggctgcatttacggaaacggcaacgctctgaagatcactgttaaataa

SEQ ID NO: 1284 - DNA, 939 bp, Unknown
  Unknown gut bacteria
ctttcaattgataacgaatatatgcgcggcgtggttgagcagaattatacggacatactcaagggtgcaataaaaaaggttatgggtattgaaatcggagtaagaattatttgcgaagacgaagaggaaaaaattcttaaagccgagcagttcagcgacgggctttcgtttgaggactttttcaccttttcaaattttgttgtaggctcaacaaaccgttttgcctacgccgcctcatattccgtagcgaccaatcccgcaaatacctacaacccgcttgttatttacggtccctcgggagtcggaaagactcatcttatgcttgccataaagaacgaaataaagaaaaactttccctataaaaaaatcgaatacataaggggagaggattttaccaatcagcttataaaggctttgcaggagggaaagctgggactcggcacgattgacgatttccgcaacaaattccgcaatgtggatgtgctgctgatcgacgatattcatttcatcgccggaaaagaacagacacaggaggaatttttcaacacctttaatacccttttccaaaacaataaacagatagtggtaacccttgaccgtcctattaaagaaatcaaaacgctggatgacagaattcgttcacgctttgaaagcggacttcccgcagatattaccgcgccggattttgagacccgcgtaggtatcataaacaagaaatgtgagcaaatgggcattgagatagacgaaagtctggtttactatattgcagagcatataaaggtaaacaccagacaattggagggcacggtaaaaaagctgcacgcttatatatcaattcagaataaaaccccgaccatgggggtggtgcaggggcttataaaggatgttattaacgacacacgccccgagcctattaaaattgaaaagataatatccgag

SEQ ID NO: 1285 - DNA, 786 bp, Unknown
  Unknown gut bacteria
gaggaatgcacgggcggaagcctttcggtgcgggcaaggtgcgagtatgtaaactgccgcgccgttacaggcagaaaggttgatattcacggagcggtcggcattaccgtaagggtcttcaagcgcagatcgacggatataatatccgacgcggacataagcggaatcgagcagaagtgcgagagcgcccccgcgaccgtaccgatgggctgctcggaaaaatacctgatgatcgaggaggatattccgatagggcagggtcagccgtccgtatgcagggtgctacgctacgatgcatgcccgtgcgtgaaggaaagcaagataataagcggaaagattgttgtaaagggcgatatgtcggtaaaaattctgtactgcacagaggagggaacgccgcagaccgttaaaaccgttattccgttcagtcagattgtggatatggagggcgtgggggattcctgtgagtgcgatacccgcgcggatacggcgtttcttgaaataaagccgcgtttgtcagaaggggaaacaaagagctttgcgctcaccgcaaagctgctgctgacctgcagcgcctactgcggaaacgatatcgcggtgataaccgacgcattttcgcggaaataccgaatgagcatgaaaaaggaaagcatatgctttgaaaagatatgcgataccgtaagagaaaattacaactgcaaaaagagcattgagcttgacgggccgaccgcaaaggtttacgatatctggtgcgatctgcggtcggtaagcacaaaattcgagaccgaa

SEQ ID NO: 1286 - DNA, 1152 bp, Unknown
  Unknown gut bacteria
gtttacatacccgacggctgcaccgaaataggcgagcgcgccttcagcggctgcacctcgctcaggtatgtccgtctttcggaaaaattcaccgccattcccaaatactgctttgccggcacacaggcgctcacaatgctttatctgcccgcggcggtcaaaagtgttgccgaccgcgcgttttacggcagtgccgcaagggatcttatcatcacggcggatgattttgcgggcgacggctacgatacccataaaaaatatgttacttcacttaatgaaagcataaacgagcaggttaaagaggatgtccgcgaggatcttattgccgatgtgggcacaaatctttcaaacagaagctttttctacctcggcaaaaacccgacggtcaaatcaagctggctctggtattcctgcgatatggataacggcccggattatctttggtatacatatatatacgctttaaagggcaacagcatcgaggaatttataaagacccagacctcgaacagtcttgaggatgaatataccgcgctggataacgaaacggccgagcttttaaagacgcagcatgataaatacatgctgaacggcagatatccgaaggaaataaacaccgaggtcgttcaggcacttataaaggactatccgttcacaaataacggcagcgcggcggagttttctctttatcttgaaaagaagcttgccgatacaggatataaggctgccgtgagcaactggtataagctgagggctgttcccggctgcgaggataccgacggggtaatgtttgagggctataacggctatgttaccgcggatataaggcttacctctgcggtcgatacaaaggatatttctatatacggcgtaatcaagcccgaaatttacagctacagctttgagactgtggcaaaggcggataccttctatcccgaaaccgtggacggcacggacggactgcgcggcgataccggcgcagagggagagttcttcctgctttcctccgacggcacggtgctgctcgattattacggcactgcggaaaagattataattcccgagggcgtcgagtatctcgatcagtcatggtggctcgataccgaccttacaaaggttcgctgcataattcttcccgattccttaaaggtt

SEQ ID NO: 1287 - DNA, 1215 bp, Unknown
  Unknown gut bacteria
atgaaaatttcagacggaggagtttgcgccgcaaagggcttttcggcaaacggcgttcactgcggaataaggaaaaacaaaattaagaaggatctgtcgcttattgtaagcgaagttacggcgtcctgcgcggcggtatacaccaccaatgcggtgttcggcgcgccgattaccgtaacgaggagccaccttgaaaacggaaaggccaaagcttgcatttgcaacagcggaattgcgaacacctgctgtgcgggcggcgttgagaccgcgaatgagatatgccttgccgcggcggaggtgctcggctgtaaggcggaggatattgttatagcctccaccggagttataggacagccgctcgatcccgctcccattaaggcggcgctgccggctcttgccgcgggactgaacgaaaacggcagcgaggctgctgcggcgggaataatgaccaccgacaccgtaaaaaaggaaattgcggtagagtttgagctcggcggaaaaacctgtcatataggcggcatcgcaaagggcagcggtatgattcatccgaatatggcgaccatgcttgtttttataacgagcgatgtatcaatctcgcccgcgcttcttaaaaaggcgctttcatcggacataaaaaataccttcaacatgataagcattgacggtgacacctccacaaacgatatggtgaccgtgctttgcaacggtatggcgggcaatgcggaaataaccgaagaaaacgcagattatgagacatttatgacggcgctcaacaccgtaaatgttcatctgtgcaggatgatcgccgccgacggcgaaggcgccacaaagctgctcgaatgcaaggtgagcggcgcaaaaagcgaaaatgacgcaaaggcggttgcgaaaagcgttatatgctcaagtcttttaaaggcggcgatgttcggggctgacgctaactgggggcgtgtgctttgcgccgtcggctacagtaaagcagaggttgacgtaaacaagattgatgttgcttttgcaagtaaggcgggaacggttgaggtatgcaaaaacggcgcgggaatagagttttcggaggaaaaggcaaagaccgtgctttccgaaaaggaaatagaaattctcataagccttaacgacggtaacggggacgccaccgcctggggctgcgatctgacctatgattatgttaaaataaacggtgattaccgcacctga

SEQ ID NO: 1288 - DNA, 870 bp, Unknown
  Unknown gut bacteria
acgaccgagccgaagtttatacccgaaaagggcgctgaaataagaattgacgattcatcggtaatgaatgtgcggctgatagactgcgtgggctacatagtgccgagcgcgctcggatatattgagggcgatcagccgagaatggtaatgacgccgtggtttgaagagcccataccctttaacatggcggcggaaataggtacgcgcaaggtaataaacgagcattctactatcgggcttgtcatcacgacagacggcagcatcagcgatatcccacgcagcgaatacgaggaagcggaggagcgggtgatagatgagctgaaggcaataaacaagccgtttgtgatattgctcaactgtatgtaccccgaatcggcagaagcgcaggagcttgcacaaaggcttaccgaaaaatacggaatcccggtacagccggtaaactgtcttgaattatccgaggaggatataaagcaaatattatcgcgcgttctttttgaattcccgattaaagagatatgcataagctttccgcgctggataaactcgcttccgcttgaacacaggctgcgcgcggagcttaccgatacgattaaaaaatcggcggaaaatgtacggcatataagggatatcaggtgctttgaaacggcgttcgcaaacagcgaaaacgccgacggagcaacaatcaacggaataaatcttggcacgggcagcgcggagataacaattaaaataaacagctctcttttttacagcgtgcttgccgaaagcaccgggcttaaaatcaatgatgagcaggagcttatggagtgcgttaaggagcttgccgaaatcaaaaaggaatatatgagggtcaaggacgcgcttgacgag

SEQ ID NO: 1289 - DNA, 1248 bp, Unknown
  Unknown gut bacteria
atgcccgatgccgtcagtgatacgcagacattttatacggcggaaataacaatgcgtgttgatcgcagcaagggtatagtttattttacaggagcggataacaaggattatcccgtaccggcaatgtctatgtaccatgaaaataacatatgcgtccgtgcggggaaaagcgccgcgaatgaagagcttcgggagatatgcacccttacctgttgcgccgtatacgattcaaagcttattttttcgggcggctccgaaaatgggaagatctattcggtcgcatattcaaacccgttatatttctccgagaaaaacacttcaattataggggagaccggcagcggaataaatgcgcttctgccgactaaaaacggaatcctcgcgtttaaggaaaatgccgtatacaaggtgaagctgaacagcggaaacgccttgaatacaggctcgctgctcgcggatgacgattccgtcttctatgacagcgataccttttcgcaggcaaagcaggcggatataggctgcgttaacagccgagtctgcgttctgtgcggaagctatcccgtctggctttcgggagacagaaaaatctataccgtgaattcggctacaggtaaggttaccgaattatcgaaacaggcggaaaaactccttgacagtatcggttcttccgaaataaagacagcggccgcattcggcgaaagcggcaaatattggcttatgctcggcggcagggtgttgataatgcattttaattccgaaaaggggagtcggcaatattatgtccgcaaatatgaaaagtgccgcccgatagatatgattgcttcgggggtgaatcgccgttatatatgcgtcggaagtgatggcagggtgctttattacgcagccgacggggctttaaacgccgataccgatattacgggcggagcctcagggacggtaataagcagcgttccgtattcatcccgctttacagtcaaaagctttgatttcggcacgctgacgcataaaaagcatattgaaagcatatctcttaccgccgcttgcggcggacggcttaaaataaggctcagcggcggaggcgaagaggagatatcggtagatctgaccgacagcagctactgtgccgcagagcttaatgtcctccgaattataccgcatataggggcggtaagagcactcggtctggaatttgaggcagactgcggtatggaaataggggaaatatcaatcaattacagagaggcataa

SEQ ID NO: 1290 - DNA, 807 bp, Unknown
  Unknown gut bacteria
atgcccgcgaagcttaagggcaagacccttacctatatgtattggaacgacccgatgaagcagatggacggggaggctataaaggcgtttgaaaaggcaagcggctgcaaggttaagtgcgagattgtgtcctatgacggctttcaggaaacgctcagcgccagaataagctcgggcaaagcacccgatcttgtccgcctgctcggaaatgtcagctggcagataaccgcgcttcagccgataaccaacagcggctacaattttaacgacaccgcgtgggattcgcagcttatgaaggattatacctttaacggcaagtgctacgccgtaaatcttaacgacagcgctatttcggatgtttcggtcatctattacaacaaaaaggcgctgcaggacgccgaaatggaggatccgtatcaaatctggaagaaaaacccgaaggcatggacatgggaaaaattctggtctatgtgcgagcagtttgtaaacgcaaacaaaaataaatcgggctattccggcgcaacctttgagtacggagattcgtatgtccgtgcaatgggcggctatataatcaattacaattcgagcaccggaaaatttgtaaacggctcaaagctcaacagcactatctcctcctggcagaccacactgcagatgcaggaaaagggcttgctgcttgaaaaccacagcgagcagtcgttcgatcagggtaagactctgttcttcctgtccggtccattctccgcacgcgcaaaggataacagacagtcggctttaaagagcagaaaccgcttgggcgttgtaccc

SEQ ID NO: 1291 - DNA, 426 bp, Unknown
  Unknown gut bacteria
atgccggtatacggcgttgaagactatgtaggcaaggcgattgaaagtattcaggcgcagacccttaccgattgggaatttttctgtgtggacgacggaacaaaggaccgcagcggcgaaatctgcgatgaatatgccgcgaaagatccccgcataaaggtaatacacaaggaaaacggcggagcgccgagcgcgcgcaatgtcgctattgataaggctgtaggcaaatatatgtactttatggactccgacgactggacagagcccgacatgcttgaaaagatggttgccgcagccgaaaagaacgattcgcagctggtggtttcgggctattatatcgacacctattacagcgataccgaaaaattcacgcaggagcaggtctgccccgccgcggtttacggtaccaaagaggaatttcgtaaa

SEQ ID NO: 1292 - DNA, 1005 bp, Unknown
  Unknown gut bacteria
cgcggtgcgggtctcggcggcggtcacgatgagcgcgagcagactcttaaccaactgcttgttgaaatggatggcttcggcgctaatgagggcgttatagtaatggcggctacaaaccgccccgatattctcgacaaggcgcttctgcgcccgggtcgtttcgaccgtcagataaccgtaaactacccggatgttaagggcagggaagaaatactcaaggttcattcaagaggaaagccgctcggacccgatgtaaaccttgctactattgcaaagtccacctcgggctttacgggagcggatcttgcaaatctgcttaacgaggcggcgctgcttgctgtgcgtcacggtaaaaaggcaatcacacagcaggagatcgaggatgctaccattaaggtggttatgggtgcggagaaaaaatcccacattgtatcggataaggataaaaaggttaccgcataccatgaggcgggtcacgcaatcgtttcttacttcctgcccacgcaggatcccgtacaccagatttctattattcagcgcggcatggctgcgggctatacaatgtatctgccggttgacgaaaagggtcatacctccaaaaatcagctttccgagcagatatgctccttgctcggcggcagagcagcagagcagctgacgcaggatgatgtatgcacgggtgcttcaaacgatattgagcgcgcaacctcgcttgcaagacagatgataaccaagttcggcatgagcgacagactcggtctggttacctacggtcatgataataacgaagtatttttgggccgtgatttctcgtccacaccgaactattcggagaagactgccgccgcaatcgatgaggagatcgaggcagtcgtaatgaaacagtatgcaaaggcactggagcttttgaataatgctatgccgaagctgcacgccgttgccaaggttttgtttgaaaaggaaaaaatttcgggcgatgagttcagagccataatggaacagtaa

SEQ ID NO: 1293 - DNA, 1206 bp, Unknown
  Unknown gut bacteria
atgtatcccaccgccgtttcagagcttacagaggcactttgcaagctttttttgggtctcggcgcggcatttttaactgtaaggctgaccggcagtgcggttttaggggctgcggcggctatggcgggcataaccgcaggaacgcttttcgcggcgctttatgtgcgcgtatacgctaaattgaagggcgacggcataacagaggcaatgctccgtaccgcacccgagccgcaaagctccgcgcgggccttcagaaaaattcttgttgtgaccttgccgatagcgctgacctcgctgacgctcaatattccttctatgatagacgcatttacggtaaaaagcggtcttgaaggtcttataaacggcgggacggatctgcgcgcatattatgccgacgcattttcgggggatgagcttcccgagctttcggtttttcctgttttgctttacgggatacgcggcaaggcgtatacggttttcaatcttgttccggcaatcacatcggtaatcggcattggggctgttcctgcggtgaccgccgcagccgcctcctcaaacggtgaggagcttaaaaaggggataaataccgcactcaaggctgcggcaataatatctcttcccgcagcgtgcggctttatggcgataggcggcggaataaccggccttttatatgatacgcaggcgtctgcggcgataggcggaaggctgcttacggtttacggctttgccgcactctttgcgggctttttggcaccgctcggcggtatattgcaggcgctcggcaggcagaatgcggtgctcttcaacaccgcggtcggaacggcagtaaagcttgctgtcaatatagcggcagtctcggctccgcaaataaatgtaaactgcgcatccctcggcactgccgcctgcttttttgttatttttgtgcttgatattttatcgctcataagggcggcgggccctgtgataaatgtttccggtgtatttataaagccgcttttatcggcggcgctttgcgggatatgcgcgcggcttgtaatgaccgcaggcagctcgcgcggcatgaccttgattgccgttttttgcgcgggagctgtgtattttgcggcgctcacagtcctgaaaacgcttgacgaaagcgattttcccgaatcggataaaggaaaaagactggctgaattttgtagaaaacatagaattattcgttga

SEQ ID NO: 1294 - DNA, 411 bp, Unknown
  Unknown gut bacteria
gtaacgcttgccgccacgcttttcacactgccgatttcaatttataccttcgggtatgtttcaaatgtttcggtatttaccaatttgctgatagacgctgcggcaggcattgccctgcaaatttccgccgtggcgcttgcgcttaatttgattttcccgtacatatcgcggcctttgttcatagccgcagagtttacagccgcctatatcaaccgtattataaaccttttcggctctttgccgtttgcggtgtcggatattgggacgcccgaattttacgcgtcattgctgataataatttcggtagtagccgcgctgttcgcctttaaaaggcgtcttgatcgacttaagctcaatgaaatgtaccgtaaaatttcaagtgaaaggggcaggaaattcagatggcaatga

SEQ ID NO: 1295 - DNA, 708 bp, Unknown
  Unknown gut bacteria
atgtatgtcacaacggcgctttcggcaattatcggaacggtgcttatcggtcttttgtcaaatctgccgctcgcgcaggcacccggaatgggactcaacgccttttttgtatacacggtttgcatgacactcggtttttcctacgcaaacgcacttgttttcgtgctgcttgacggaattatcttcgtactgcttaccgccacgggtcttcgcaagattattttcgatgccattccgcatgttgtaaaggctgccgtacccgcaggtatcggtttattcattgcctttttgggactgcaggacgcaaagctggttatcccgagcgaatcgacaggcgttacgctggcgtccttcaatcttctcggaggagccggatggggcgcggtcatgccgcttatagttgcggtgttctccctcctgcttatagccgtactgtcacacaagaaggttaagggctctattctttggggaatactcggcggaacgggactgtattatatcctaggcttcaccgtaaaggatttttacaagggctttgcggaaaccctctcctttaatccgttcaagccgttttcagcctttgcctcggaagcgttcggcaaggtatttaccgagggctttgacttctcggcatatttaagcgccgacggtcattcggtaggcggacttgttattctgtttataaccaccgccctggcgttctgcatg

SEQ ID NO: 1296 - DNA, 1014 bp, Unknown
  Unknown gut bacteria
ccccccgccgcagagcgggcggatgcgctgcgttacggcagggaatatcttgcggttatgctgatagggcttgttccctttacctttaataacgcttatgcttcctcaatgcgcgaaacggggcagaccgttgtgccgatggtatcggggcttgctgcggtagcggtcaatatgtctttaaactatgttttgattttcggaaagctcggaatgccggttctcggcgttaagggcgctgcaattgcaaccgttatttctcgctacaccgagcttgcggtcaatgccgcatggctgcacagccacggtaagcgctatccttatataaagggcgtttaccgctcattgagaatcgctttgccgctgctcaaaaaaatcacgctcaagggcatgccgctgcttgtcaacgaggcattgtggtcggcaagcgtggcggtgctcaatcagtgctactcgacgcgggggcttaatgttgtggcggcgaataatatcgcttcaacgctttggaatctcttctcggtctgctttatatccctcggcagcgccaccggaataataatcggtcaaatgctcggcgcgggcagatcgcccgacgaggtacgggactgcgatcgcaagcttattgcgttttcggtaacctcatgcgcggttttcgggcttgtgatggcggcggtctcgggcattttcccgctgatctacaaaaccgatgaggctgtccgttcgcttgcgacatccttaatatgcataaattcggttataatgccgtttaacgcctataccaatgccgcatatttcactctgcgctcaggcggaaaaacgctttctacactgctttttgacagctgctttgtatgggtggtgagtgtaccgctggcattttcgctcagccgctttacaggcgtgccgattctgccgctttacacagtatgccagggtgcggaaattcttaagtgcgttataggcttcgttatgctgaagcgagggacctggatccgcaatattgtagttaaggaatga

SEQ ID NO: 1297 - DNA, 582 bp, Unknown
  Unknown gut bacteria
atgaaaaagggaattttaagcattgcggcactggcgtttgttttgctgatttctttttcttcgctttcggttaagcccgcggcgaccgctaccgaaaaaccgtcagcgccggcagtttcacaggaaaagattttgagtgcgcgctttctcaatatgcttaatcataatttcgtttataatgacgcgtttgacagtgtttatgaaatgaccgcatgctccgaggttgctttgcttgacagggcggagaacggctatatttcgagcggcgtgatttccggttacctttacaatatgtacggtgtggaaggtgtcgattttgccgccgtcacaaaggatttcccgcagcgtgaaaattatgtgtatgttattccgcgcggcttctcggtttataagcattcaaatcccgtcatcaccgagaatgaggacggcagctatacagttgtgaccgtggttcaaattttctcgcatgacagtgaagcggaaaccgccaaggcttcaacacttttcgtgaaaaatgaaaattcggcattcggcttcaatataatttcttccgatataatttttgaagatgcatcgctttaa

SEQ ID NO: 1298 - DNA, 909 bp, Unknown
  Unknown gut bacteria
ggctttaacatggaatgggtaagtattgataccaacacaaaaaggttttttaaggactcaaattttgccgattaccgcatcgtttcggaggaaggcttttccgaagcggatgttgaaaaaacggaaagtataaagggagtcgataaggtatcgcgctacatttccgtgccgacagatgttaaggaacgcgacggcgactctttagccctcaccgtgaccgagaatttcgatgtctcctcatttatgaagacagccggcgcggattatgacaggaaaagcgaggacgggctttggatatccgataaatatgccgccgcaaacgatatttccatcggggataagctcacgcttgtgtataagggcgtcagcataaatacctctgttaaaggtacggtgaaatcgggagagcaccttgtttgcgtgcgcgacgagacccagcttatgcccgattataatacctacggattcggttacatctcccccgcggcgtacaaaaaggcgctcggcagagaatactacccgcagctcaacattatctccgagctttcaaaggaggagattaccgataaggccgatgaggtgctcggcaaaaccacgcttgttttatcaaaggacgaaaactcctcatactccgcggcggacggcgaaatggaggagggcaagaccatgggctcggtgctgcccgttctgttcctgctgattgcggttttgacaatggtgactacaatgcaccgcttaacggcaaaggagaaggttcagataggcacgctcaaggcgctcggcttccgcgacaggcgcattttaaggcattacacatcatatgcctttatgatcggcattatcggctctgtgctcggaacgggactcggcttccttgtggcaaagatgatcatgagccgcgacggcaca

SEQ ID NO: 1299 - DNA, 801 bp, Unknown
  Unknown gut bacteria
atggagcttgaccccaaaaccacaaaaaaaatactgtttttcatcgccttcggggcagtgtgctttgcagccgttgcaaatttcgaaaggcttttatcggcgctgggcggagtgatttcggtattccgcccggttattaccgcgctttgcatcgcctttgttctcaatgtgcttttgtcggctcttgaaaacaaggcgtttgcttttatggataaaagcaaacgaaggcttgtaaaaaaggcgaaaagaccgctttgcctgacccttacatatcttatagcattagggcttatagtgctgcttattgcggttataattcccgatgttataaacacctgcgtaagtcttgcggaaaagctgccattgcttatgaacgatgtgcggacatttaccgaggatacacttgaaaaattcaatctgtcgcagaattttgtgccgaatatagagatcgactggacaaaggctgccgatacgataaaggattatctcgtaaattattccgaccgcattttcggcagcgcgttcagcattacaacctcggtcttctcgggcgtctacaacacggtgttcagcgttatgatctcggtttacattcttgcctgcaaggagaagatagggcggtttacggtgaaatgcaccgacgcattcgcaccgaaaagggctgccgccgcgatttatcatgtttcctcccttacatacggctgcttttcaaaatttataggcgggcagcttaccgaatcggtcattctgggattgctttgctttatcggcatgacgggattccgtttcccgaacgcaaca

SEQ ID NO: 1300 - DNA, 1398 bp, Unknown
  Unknown gut bacteria
atgccatatctgttggcttataagaaaacggttgcgatagatctgctctgcgcttccctcacctgcgtttgcgatttggtgctgccgcagatactccgaacaataaccgacacggcaatgaacgatatttcctcacttactgcgggtcttattttgaaaatggcgttcatatatcttattctgcggcttattgacgcggcggcgcagtattacatggcggatatggggcatgtaatgggcgtttacatagaaacccatatgcgccgtgacgcattcgctcacttactgacgctcggacacaattactattcaaacacgaaaatcgggcagataatggggcgcattacaaacgacctgtttgaggtaactgaattttctcaccattgcccggaggaatttttcatcgcgtttttaaaaataaccgtcagctttacggtgctttgcacctacagcgttccgctcacgcttataattttcctgtgcgtgccgcttatggttgtagtttcggcacatctcaataaaaaaatgcgcagtgccttcagaaaccagcgcgttcagataggtgagcttaacgcacagattgaggacagtcttctcggtgagcgtgtggtaaaggctttttccgccgaaaaagccgagcaggaaaaattcaatatcggcaacaaaaaatttgaaagcattaaaaaggctacctacaagacaatggcacttttttctgcggcaacgcatctttttgacggtcttatgtatattgtggtgattctcggcggcggactttttgtgctttacggtaaaattactccgggagcgcttgtcgcctatgttctttatgtctccaccctcattgcgacaatacgccgtatagttgaatttgcagagcagttccagcgcggaatgaccggaatcgagcgcttcttcgagattatggactcccctgttgaaatcacggaaaagcctgatgcccgggcgcttatctgcgaccgcggtgagattgattttaaggacgtaagcttcaaatacgaggaagacagtgaagaggttttagaacacatcagcctgaaaataaatgcgggcgagcggctggcgcttgtgggcacatcgggcggcggaaaaaccacgctttgcagccttgtgccgaggtttatggatgtaagcggcggcgcggtgcttattgacggtcaggatgtcagagatgttacgctggcaagcctgcgcggagcgataggcatagtccagcaggatgtttacctgttcagcggaacggtgagtgaaaatattgcttacggcaaggaaaatgcgtccgcagaggaaatcaaagctgctgcggtgcttgcgggagcagacgaatttatatcacgcctgccggacggctacgatacatatgtcggcgagcgcgga

SEQ ID NO: 1301 - DNA, 2202 bp, Unknown
  Unknown gut bacteria
atgggttggtttgacgaacagataagacagcgcaaacaaaacgacgacgatgtttttgccgattcctttgtgaatatggctgccgccgtgatggggtcaaaagttcccgcttctctgaacgacagccgcgcggccaccaaaaacgcgatagatgagatattgaaatactatcacgtcaaaagcagagagatacctgacggaatcaaagataaaaacgaacagttggagttccttttgcgcccttacggaataatgcgcagaaccgtaaaacttgacggcgcatggtataaagatgccgtcggcgcgatgatcggcgtgctcaaagaggacgggagcgtcgttgcgtttattccgacgggactttcgggttacagttggtttgacgcaaagagcggaaaaagaagaaaagtgaacagcaagaacagagagttgttcgaagatgaagccattgctttctataagccgtttccgttgaaaaaacttggtctcggctctttgatgaaatttattttgcaatcgctttccgtttcggatttcgtacttattgcgctcgcaacttttgcggtatcacttatcggcatgttttctcctaaactgaacaatctgcttttctccgaggttcttccgtcgggaaatgtccgtctgctcgttgcgcttgccgtgtttatggtctccgtttccgtcagcgcaatgctcatcacagccgtcaaaggcatgataactgcgcgaatagacacaaaactcagcgtttcggtagaggcggcaactatgatgcgtgttatgtctctgcccgcaggctttttcaaggaatacagttcgggtgatctcgcaagccgcgccatgcagataaacgctctttgcaatatgcttgtttcaacggtgctgacgacaggtctgacttccgttttttctcttatatacatatcgcaaatattcatatacgctcccgctcttgttgttcccgcattgctgataatccttgtgaccctcgttttttccgttgtttcgtccatgcttcaaatgcggcacggcaaaagggaaatggaacttgacggcaaagagagcggtatgacgtattctcttataagcggcgtgcagaagataaaacttgcgggcgcggaaaaaagagcctttgcccgttggggaaatctttatgctcgaaaggcgaaacttgaatacgacccgccgatgtttttgaagataaattccgttataagtcttgcgatatctcttgtcggaactcttgttatgtatgcctccgccgtcgggtccggcgtttcagtcgccgattattatgctttcagcaccgcttacggtatggtctcgggtgcgttttcgtcgttggcgggaatagcgttgaccgtggcgcagataaaacccatacttgaaatcgtaaaaccgttttttgacaccgttcccgaaatcgcagaggaaaaacaggttctgacacgcctttcgggcggtatagaactgaacaatgtttctttcagatacaacgagaatatgccgcttgtggttgacgatctttccttgaagatacgtccgggacagtatgttgcgatagtcggaaagacgggctgcggcaaatccacactcatgcgtcttttgctcggctttgaaaaacctcaaaagggcgccatatattatgacggaagagacatagagcggatagacctcaaatcccttcgccgcaggataggcgtcgttattcaaaacggcaaactttttcagggcgatatatattcgaacatcgttatctccgcaccgtggctgacggttaaagatgcatgggaagcggctgaacttgcggggatagccgacgatatccgaaaaatgccgatgggcatgaatactctgatctccgagggttcgggcggaatatcgggcggacagcgtcagcggcttatgatagcgcgcgcaatagcgccgaaaccgaaaatcctgatgtttgacgaggcaacgtcagctcttgataaccttacgcagaaaaaggtttccgaatcgcttgattcgctcaaatgcacaagaatagtcatcgcgcacaggctttcaacaataaaacagtgcgaccgcattcttgttctcgacagaggaaaaatcgttgaggacggctcgtataactctttgattgaaaaaggcgggtactttgcggaacttgttgcccgccaacgtcttgatgttccgaatttgtctgaaaaataa

SEQ ID NO: 1302 - DNA, 1026 bp, Unknown
  Unknown gut bacteria
atgaaaatcaaaaaactgcttgcagctgtgcttgttttcgcgctttgcgccgcattctttgccgcgtgtgcgaaaaacgatgagcccacaacggcttccacggcttccgaacccacgacggagacttatgagagtgtgaaaatgaatatcgggtgcatctccggtccgacgggtatcggcatggcgtatcttatgggacaaagcgacgaaaagaaaaccgcaaacgaatatactttttccgtagcgacttctcccgacgaaatagtttccaggttcgcaaacggagagatgaacattgcgtccgttcccacaaaccttgcggcaaaactttacgcaaaactgaacggaaacgtcaaaatgcttgcgataaacaccggctgtgttctttacattgccgaaaagggcgattctgtaaagaccgttgccgacctcaaaggaaaaaccatctattccacgggtgagggcgcaaaccccgaatacgttcttcgtgcggttctttccgcgaacggcattgaccccgataatgacgtgacacttaaattcgttgccgaaaacagcgaacttgtatctctgcttgcaaagggagatgccgaagtcgcgctcgtgcccgacccttttctgaccaccgcctgcgcaaaggtcgagggacttcgcgccgctttaagcataggcgatatttggaaagacctcggcaaagagggtaatgtttatatgggctgcgttatcgcaaaagcagattacgtcgaaaataataaagccgcggttgacaaattccttgaagaatacaaagaaagcgttgaaagggcaaattccgacgtgtcaggcgttgcggcgctttgcgaaacatataaaatagtcggctccgcggctgttgccgaaaaagccattccgaaatgcgcgataacgtttattccgggctctgaatgcgaaaaggcgataaccgattatttcaaggcacttttcgaacttgacccgacaagtatcggcggagcaatgcccgagagcggtttctgggatgtcggctga

SEQ ID NO: 1303 - DNA, 1809 bp, Unknown
  Unknown gut bacteria
atgtcaaaggacacctcgaatataagaaatttttgcataatcgcgcatatcgaccacggcaaatccacacttgccgaccgtattctcgaaatgacgaagaccgtatcttcccgtgaaatggaagaccagcttctcgacaatatggaccttgaacgcgaacgcggaataacgataaaagcacgcgccgtcaaactcgaatacgaggcaaagaacggcaaaacatatattttcaatcttatcgacactccgggacacgttgactttaactacgaagtctcccgatcccttgccgcctgtgagggcgcgatactcatagttgacgcttcgcagggggttgaggcgcagacgcttgcaaatgcgttccttgcgcttgaccatgaccttgaagttgtgcccgttatcaataaaatagatttgataaacgccgaccccgaccgtgcggcgaaagagatcgaggacataatctgcattcccgcagaggacgccccgagaatttcagcaaaaacgggtctcaacattgtcgatgtcatggaagcgatagttgcccgcattcccgcaccgaaagggaacagcgagggcaaactcaaagcgcttatttttgattcggtatacgactcttaccgcggcgttatcgtgtatgtccgcgtgtttgacggcaaagtcaaagcgggtgatattatccgaatgatggcgacaggtgccgaaatggaagtcgttgaagtcggtgcgcttcgcccgttcggtttcgaaccatcggcggaactctccgcaggtgacgtcggatatataaccgcatctatcaaaaacgtcaaagatgcagaggtcggagataccgtaacacttgcgcttgaccccacggaaaaggcgctgcccggttacaaaaaggcacagcccatggttttcagcggtatctatcccgcagacggctcaaaatacggcgacttgcgcgatgcgctcgaaaaacttaaactcaatgatgcttctcttgaatttgaggcggaaagttcggcggcactcggtttcggcttccgctgcggctttctgggtctgcttcacatggaggttattcaggaacgtctcgaacgtgaatataatcttgacctgataacgaccgctccgtcggttatttacagaataacgctgacggacggcacggttgaaatgatagccaacccgacaaactatccgcgctccgacgtcatagaacttgcggaagaaccttttgtaaaagcggacataatcgctccgtcggactatgtgggcgcgataatggatctttgtcaggaaagacgcggtatattcaagaatatgcagtatcttgacgatacccgcgttaatatccactattcgcttccgctcaacgagataatatacgatttcttcgacgcgctcaaatcgaggacgagagggtatgcgtcgcttgactatgaatttgaggaatacaagccctcaaaacttgtcaaactcgatattcttctgaacggcgagatagttgacgctctttcgttcatcgttcccgaagaacgcgcctatgcaaggggcagaagaattgccgaaaaacttaaagaaaacattccccgccaactttttgaaattcccatacaggcggctatcggcggcaaaattatcgcccgcgaaaccgttaaggcaatgcgcaaggacgttcttgcaaagtgctgcggtggcgatataacgagacagaaaatattgcttgaaaaacaaaaagaaggcaaaaaacgtatgcgtcaggtcggcagcgtcgaactttcgcaggaagcgtttatgtccgttctcaaactcgatgaatag

SEQ ID NO: 1304 - DNA, 2307 bp, Unknown
  Unknown gut bacteria
gcggaacacgcaatttcccccgccgcaaaagaactttgtctttcgctttctcccgcagagacgcgggaagatgcagaaaaagcgcttgggcagaccgcttcggcggaaaaactgctgctcaatttcggcgcgccgtcgttcggcagtctcaaagacgtgacgggggcttgcgcacgagcgcaaaacggggcgcagcttgcgccgagcgaacttcttgccgccgcaaacgtgctgaaactgacggaacggctgaaaaaattccttgatgagcatttggatgaaagcgatgcgctttccgaggacaggtattcgcttgtgcctaacaattatcttgcggacaagatactttcgtcgttcgtgggagaagatgaagtcgcggacggagcgtcgcccgcactgagggaaataagacgcaaacaggcgcaggcaaggaacaaaataaaatcatcgcttgattcgcttgtgcggtcacagcagacacagaaatatttgcaggaaaacatagtcacacagcgcaacggaagatatgttatccccgtaaaagcggaataccgttccgagatagcgggacttgttcacgacacatcttcgtcgggtgcgacgcttttcatagaaccgatgagcgttgtcaacgcaaacaacgaactttccgaacttgacgcaaaagaacgcgcggagatagacagaattctttcggcgctttcctcggaagtcggagattatgcggagacgataagcgaagatttccgcactgcaagattttttgatttctgctttgcaaaggcaagatacgccgccgcattgcgagcggtcagaccggaactcaacgaaaacggcatcatacaagcagaaaaagcgcgtcacccgcttatatcaaaggatagatgcgttcccatagacattgctcttggcgataaatactccgcgctgatagtgacgggacccaacacgggcggcaaaaccgtttcgctgaaaacgacggggcttctctgcctgatggcaaagtcgggactttttgtgccgtgccgcgacgaggcgaaaataggcttttttgacagagtttttgcggacatcggcgacgaacagtcgatagaacagtcgctttcgacgttctcggcgcacatggcaaacatctcctcgatactgacgcagataacgccgaactcacttgtgcttatggacgaactcggctcgggaacagatcccgtcgagggtgcggcacttgccattgcgataatcgagcaaatgcaggcgacgggcgcaagaataatgtgcacgacccactatgcggaactgaaactctatgcgcttcaaacgcccgacgtcgaaaacgcttcgtgcgaatttgacgttgcaacgttgaagccgacatacaggctcattatcggcattccgggcaaatcgaacgcttttgcaatcgcttccatgctcggaatatcggaagatacaataaacaacgcaaaattccacctcgacaatgaaagtgtcaaagtcgaaagagtgcttgccgaccttgaaatcagcaaaaaaaccgcccaattcgacatcgaaagagcggaacatataagacaaaaggcggcggacgaactcaaaaaggcaagagaagagcgggaaaaaattcttgcagatgcggaaaaagacgcgcagaaatcgagacaaaaagcgcttgacatgatcgaaagcgcgcgcagagaagcacaggtggtaacggatgaactcgaccgtctgcgcaaagaaaaagagcgcgcagatttcaagaaaaacattgaagcgacacgagccgcgacggaagacaggcttgacaaactcgaagaaaaaatagaaacaagaccgaaagagaagaaaaagcctctcgaacgcccgctcaaagtcggagacagtgtccgcgtttactcgatgaacaaagagggcgaggtgctcgaagaaccgaaaaacggaaaagtcatgctacaaatcggaagcgtgaaaatgcgttttccgcttgaagaccttgaaataatcaagccgaagcaaccgaaacagcagcagacaacgctcgacatagaaatccgtgcaacaagaagagcgggttcgggactcgacttacgcggcgttacggtaatagaagcggaactcatggttgacgaatacatcgacgaatgcagtctcagcgggctgaaagtcgtcagcgttatccacggcaaaggcacaggtgcgctccgtgcggcggttcagcagcggctcaaacgcaacaaactcgttgaaagttaccgtctcggaacattcggcgagggcgaaagcggcgttacgatagtcactctcaaataa

SEQ ID NO: 1305 - DNA, 1254 bp, Unknown
  Unknown gut bacteria
gtggacgggtccggcataacggatctgaccgaaaaaccgaaagaactgcaactgacgctttccgcgcctgccgcaaatgtgggcgaaacggtaaaagcggagcttgccgttgtttcgtccgcgaacataaataaaacgacgattgtcttttcttacgattcaacaaaactgacgcctgaaggctcttatgcccccggtgacggacttgcatccgatgcggtttttgagttcacggacgccgacggggaaaacggcttgaaaactgttactttgatcgcttctgcgggcgcatcgggttcggtgtttgcctataaaggtacggtgttttccatgtctttcaaagtcaaagagcctttgcagggtgtgacgcctgttacgatcgaagtcacggacggcgcaacgctcaaaaccgacggaactgcgccgacgatgaaagttgtcaacaacaacggcgataagaccgccgttacagacggtgatttcagcacagtattcaagaacaaattcacggacggcgaaccggtacagacggaaaattcgtacatgggcaaaaacgtcagcgttacatggcagcgttatgaagataaatcgaccggtggttttgttgtttactatgttgccgatatatacatcagaaacaccgattatttcaagaccgcgcgctcttcgggattctcttccgatgtcgcggatatggcaaaagcgaataacgcgatagtcgccatcaacggagactatttcggcgcaagaaatcagggcacggttgttcgtgagggacaactgatccgcgaaagcaggttcaaagatgttctcgttctgttcaaaaacggcgttatgaaaacgtattcgaaagaagagttcagccttgatgctgttaagaccgccgcagatgatgccggaacgtctatcctcgatatatggtctttcggtccgtcgcttttggatgcggacggaaacgcgaaaaccgagttcgacagttctgtaacccccgcaaatccgcgctccgcgataggatattacgaacccggccactattgccttgttgccgtcaacggcagaggtgaagagaacagcgtgggattaaaaatggctgaccttgcgcaacttttcagcgatctcggctgtaccgtcgcatacaaccttgacggcggaaaatcttccgttatggtatgggacggcggctcaacaacgataaacactcccgacggcggcggtcgctccgtcagcgatataatttatttcccgaaagattga

SEQ ID NO: 1306 - DNA, 2493 bp, Unknown
  Unknown gut bacteria
atgaaactttcattttcgacaagaggctggtcggactttgcgtgggacacgctttgcgcctccgcacgcgcggcggggctgaccggcatcgaagtatataacgccgacggtgcgttcgtctcctcgcggacgggaatgtttcacccctcccgtgcttccgcaacattccgcgaactgcgtgacgacggacttgttataacctgcgtcgattccgtttggaatgcgggcgaaaagaacgccgacacggcagaaatagagaactgcatttccgtctgctacgacctgcgcataccttttgtgcgtgttcgcacggacgacggcgcggacatcgcaacggttgaagagaatctgaaacgcatacttccgcttgcggagaaaaaagacgttgttctgcttatagagactgtgggcacatttgcaaacacagaaaaactgcgcgatatgcttgaacgctttgcgtgcgacaacgtggcggcgctttgggacatgaacgcaacttaccgcgacggcggagaaagcgccgacgcaacgataaagaacctcggcgcatttgtgcgtcacgttcatctgaaagactccgaacagacggcaaacggcacactctactgccttatcggggagggttctctgcccgttgacgatatgatgcgggcgctccgctccgtcaactacgagggctttgtctctctcgaatgggatccctcatggctgcccgaacttgcagaccccgaacttgttttttcgcattttgcaagttttatgaagggcttttcagatacggcgcgtgccgaaagacacttttattacaacaaaacgcatacgggtcgctttatctggaaaaaagaagaacttatcgactgcacattcccgaaactgcttgatacgatggtcgatgcgttcccagaccagtgcgcatttaagtatacgacgcttgattatacgagaacatacaaagaattccgcgacgatgtggacacgtttgcgcgcgcacttatcgcgctcggtgtcaaaaaaggcagcaaggtctccgtttgggcaacgaacctgcccgaatggtacatcgcattctgggcaacgactaagataggtgcggtgcttgtcacggtcaacacggcgtacaagatacacgaagtggaatacctgctcaaacagtccgacacgcatactcttatccttgaaaagggttggagagactccgactatgcggaaataatcgccgaactttgccccgagctcaaaacccgtgaagagggcaaaccgcttcacagcaaacggttgccgttcctgcgcaacgttatctccgtgggcttccgcaaagagggctttatcgcgtgggaggacgccgttgcgcgcgcttccgaagttcccgttgaagaagtttggcgccgcgcggcgaacgttgtcagcggcgacgtggcgaatatgcagtacacgtcaggcacaacgggctttcccaaaggcgttatgctgacacaccacaatatagtcaacaacggcaaatgtatcggcgacagaatggatctttcgaccgccgacagaatgatgatacaggttccgatgttccactgtttcggcatggtgcttgcgatgacggcttccatgacgcacggttcgacggtgcttccgcttccctatttctcaccgaagcccgctcttgcgtgcatcaacgaggaaaaaataaccgctttccacggcgttccgacaatgtttatagccctgcttgaacaccccgacttcccgaagaccgatttctcctgcatgcgaacgggcataatggcgggcagcccgtgtcccgtctccgttatgaaagacgtgaccgaaaagatgaacatgaaagagataaccattgtctacggtcagacggaagcatctccgggctgtacgatgtcctcgacagacgaccccatagacgtccgcgtttcgacggtaggcagacctctgcccgagatagaatgcaaaatagttgaccccgaaacgggtgaagagtgcccggacggcgtgacgggagagtttgtggcaagaggctacaatgttatgaaaggctattacaaaatgcctgttgcgacggcggcggcgatagacaaggacggctggcttcatacaggcgaccttgcctgccgaaaccccgacggcaatttccgcataacgggcagactaaaagatatgataatccgcggcggtgagaacatctatccgaaagagatagaagagttcatctacacgcacccgaaggtaagggacgtgcaggtcatcggtgtgcctgacagacagtacggcgaagaggtcatggcttgcgtcattctgaaagagggcgaaacgatgacagagcaggagatgaaagactacgtcaactcgcacatggcgcgtcacaaagttccccgttacatcgagtttgtggattcgttcccgatgaatgcggcgggcaagattctcaaatacaaaatgagagaagacgcggtggagaagataaaggcccgcgccgagaaaaaataa

SEQ ID NO: 1307 - DNA, 1326 bp, Unknown
  Unknown gut bacteria
atgaagatgaacgaaaaagccgaaaaaatcataaaaatgatgaacgacgcaggcgaaaaggcatattgcgtcggcggctgcgtgcgcgatattcttctcggcaaagaaccccacgactttgacatctgcacctcggctcaccccgaaaaaacggaagagatactgaaagaatttcccgttatcgagacgggaataaaacacgggacagttaccgtgcttgttgacggcgaaccgtttgagataaccacatggagaatagacggaaaatattcggataatcgccgtcccgaaaacgtgacattcactccgagccttgaagaggacctgaaaaggcgtgattttacgataaacgcaatggcgtttgacggagaagaagtcatcgacccgttcggcggaaaagaagatctgaaaaacggaattatccgtgccgttggcgatccaaacgaaagatttgaagaagatgcgctccgcattttgcgtgcgcttcggtttgcgtcaaaattaggttttgaaattgaaacaaaaacggcggttgcgatgcacgaaaagaaagaactgcttaaagaaatctccgcagagcgcattttttcggaactcaaacttattctgtgcggaaaagacgcgacaaaggtcttacttgatttttccgatattatcgggcagataatacccgaaataaagccaacaataggctttgaacagcataacaaacatcatgtttacgacgtttatacccacacggcggttgcagtgggaagcattgaccccgacccgacattgcggctgacgatgctgctgcacgacattggcaaacccgacgtttattatttcgaagacgggcagggacatttttacggacaccccgaagtttctgcggaaatcgcaagaacggtgctgaacaggctcaaatgcgacaacgcaacaaaagataccgtgctgacgctgataaaggagcatgacaaccgttttcctcccgaaaaaaagagcgttaaacgtatgctcggcaaagtaggcgagcataattattcacttttaatgaaagtcaaacgggcggacaccgacgcgcaaagcgattatctgaaagatgaaaaatatgcgcagataaacgcgcttataaatgttgcaaaacagatagaagaggaaaacgaatgtttttctctttccgaccttgcgataaacgggagcgacctcaaagaatttctttcgggcaaaaagatagggccggcacttcggaaatgcctttcaatggtcatagacgaaaaactgccgaacgaaaagcaggcgcttcttgcctttgctatgaaaaaatacgggaacaaagaatag

SEQ ID NO: 1308 - DNA, 2388 bp, Unknown
  Unknown gut bacteria
atgacaaaggcaaggaaaaagttttcgaagatcctcgcttgcggtatgaccgccgcgatggttctttccgcaagtattcctttttttgcggatgcttcggacaaaaccgaggacagcaatattatatataacgacggcggagcggacagtacgaaccccaacttcttcgattatacaaatcttataacgaagacatacggcgatcgcggttacatcgactccgacgagggcaattttgtcgtaaaccttgacggaacaaaaagcgatatccgtcttttcggaataagatacgacatcgcaaaagagggtatccccaccggcgacgctttgaaaaacatggtcagcgacatggcggctcacggttacaacctcgttattgtcgatgatgtttattcggtattgaaaaactcttccaacttcacggctttcagtgatttcctcgcagaactttacaatgcaaatatgtatgcgggcatcggtcttttttcgacctcttcgcttgtcgttaacaaaacaagcaagggcgccgcaattttggacagggacacggttcgccgcgctcaggcattcatcaaaagatttttcgcaaccaagaacgccgcaagaagcgatgaaaacataaccgttacttacggcgacgatacaaccattgcatttgttacatactgctccgatctcgatgtcggcgcggatgcggtttgctattccgacctgcgttccgatttcaacgattggctgacggaacagtacggctccaccgacgttttgcgcggcgtatggctcgatgagacgggcgcttgcatcctcggcgaagacgaaaacgcaaaacgcggaacggttcgcgttcccaccgaacccgtcagcaccgtttattcggaagcaagcacgggtcgtcagcgcgaggcggatttcggcagattccttattacctatgtgaataaacagttctcggcgatgaaagatctcatcagatcctgcggttacaattctcccgttcttctttccgataacgattcaagcgcattcaatgtctgcataagcggtctcggagatgcttcaagaggcgattttgagttcactcccgatatgaccgtgaaagaagcagttgctcatgcggcgctcggaacggttgcggacaaaccttacatcgtttcgtggaacacttccgcagttgcggcaggtgaaaatgccgtcaaggcaaccgattccgaatttatatctgaattcatatctcttgtttcttacgcaagttatcagggctgggatgcttttgttgtcggagattattctttgacggacgcgacggcaaccaatcagaatgcggcactctggaacaacagcggcttgatggctactctttttcgccatatagcgatagccgcatcttacggctcgggcttcggtatcggatattcgggttatgacaccgtaatggatttcggcagattcaaaaattccacgcttgcttctgctcttcttgcaaaaacggaaaacgtgttctttgacacggaatatacggcaaattcaaaattcaaagtaatcatgtcttcgggcaacacttcgtccggctcttacgtcggcgcgaactcgaacaaagaaaacggtacaaaggctattatccaggctttctatccgtatcaaaatgcaacgtttgcccaagacttcatgaaaaagaaagcatggtacaacgatcagggacttgtaagcacccgtgacagagttatagaaaacattgacggggttgacgtctatttcggcgagggcaaggcaatcgtccccgacgggatgattgaaagttcctctcagttggcaacggcgcttgaccgtctcggatttacttcttacagaaatgcgaacgacgcttccgacctcggatgtatttcttccgacgggcttctgataacagataacggcagacttttctataacgaggaaagcgataccgtaataggcttcggaacacgttatttccttgcaaacggcgacctttccgatgagactttgaatgccgcttacagcgcttatatcaacagatattattacggaagttcaacggaaagcgaatataagaatcttaaagtttcaatctccggcgcaagcggaaacggtacggttgccgtatacgctctcggttccggcacaaacaacgaaaccgcaacgcgctttatcgtctttgcgcagagcaatgacggaactccgttgacggcaaatcttaaaatcattcgcgaaaacaccgtatataaggcttacggtatcagacgggacggctttgtcggcacaaaaggcgcattgcttaatcccgacaacacggtttccgacagttcgggaaatatgacgatgtcgctcaacggcgagtacgattattatatagtaacgcttgaagagacc

SEQ ID NO: 1309 - DNA, 1029 bp, Unknown
  Unknown gut bacteria
ttgacagttgctctcctcgcaggctgcggcggcgacacaagcaacacgaccaaaggtgacggaaacacaaccgttaacaagaccattgccgttgttgcaaaaggcgaatcccacgcattttggcagtcggttaaagccggcgccgtagacgcaggcaaaaagtacggttacgaagtaactttccagggccctgcaagtgagtccgcaaaagaccttccgtctcagatggaaatggtaagtaccgctcttaacaacaatcccgcaggtctcgttctcggaacgataggcgaaggattcgttgacagcctcaaacacgcattcactcagaaaatccccgttgttcagtttgacagcggcatctgggcaaaagacattgagtctcttgattccgcaaaacagaacccaatagtttcctccgttgcaacgagcaacagacttgctgcgggtcttgcggcagagaaattcttcgaagctatcaaagctgacatcgctgcttccaccgacacttatgttgtaggtatcattcagcacgacgaaacccagaccggtattgaccgcgcgggcggattcgaagagaaattcaaggctctcgctgacgcggattccacaaccgcaggcaagtacaccatcgaaaaagaagttaaacccggcgatgcggatcaggcttacaaggcagctcttgaagcacttttcgaaaagaacgtaaaagcaatattcatgagcaacgaaggcgttgttaagcaggtttacgacgcaatcggcgcagcaggaaccaaatacgacaacatcgtattctgcggatttgacgcaggctccaaacagatcgaatggatgaagaagaccaccggtccgaagcttatcggcgcggttgctcaggactcctatcagatcggttaccaggctgttgaacaggcaatctttgcggcagaaggcaaaaccgttaccgcaaaagttgatatcgcaggcgcttggtgggatgcttccaacgttgacgaaatgataaagaacaatctcgtttacgaaggttaa

SEQ ID NO: 1310 - DNA, 846 bp, Unknown
  Unknown gut bacteria
atggataagtttcaaaagggaaaaatggttcccgttccgtcgcattccatagtgcccgaaagagacgtcaacgagactcccgctctcgaatgccgacacctcggcattgatttcggcggacttcacgcggttgaggatttcaacttcacgataggtaaaacggaaattgcgggtcttataggtcccaacggtgcgggcaagaccacggttttcaatcttcttacaaaggtttatcagcccacacgcggcgttatcatgataaacggcgaggacaccgcgggcaaaacgaccccgcagataaacaagatgggcgttgcgagaacgtttcagaacatcagacttttctccaatatgaccgttgaagacaatgttaaagtaggtcttcataatcaggtcaaatacagcacggcggagggtattttccgtcttccgcgcttctggggcaaggaaaaacaggctcatgaaaaggctatggaattgctttcgatcttcggcatggaggatatgcacgactggaaagcaggttcgctgccttacggcgcacagcgcagacttgaaatcgtccgcgcgcttgcaacaaatccccgtcttcttctgcttgacgaacccgccgcgggcatgaaccccgccgagaccgtcgatcttatggaaaacatcgttcgcataagagacgatttcaaaatagccgttcttcttatcgagcacgatatgaaactcgttatgggtatctgcgagggtatctgcgtgctgaacttcggcaaagttatcgcaaagggtaccgcggaagagatacagtcgaaccccgttgttatcgaggcgtatctcggaaacagaaaggagaattga

SEQ ID NO: 1311 - DNA, 1275 bp, Unknown
  Unknown gut bacteria
ttgcatttcgtcgcaaaatgtgatataatctgcataatagtgatatatcgtaaagtgataggaaaggagcggagcatggttattgagggcgttgtggaagacatcatttacaaaaacgccgaaaacggctattgcgtgctgcggcttgaaacaaaagacgacggcatagtcgcggtgggaactcttccgcttgtttccgagggcgaaacgcttgaacttgaaggcgactacacggaacataaaacctacggcagacagttttccgttacgtctttccgttcccgtatgcccgcggacgagaccgcaattctccgatatctttcgtcgggaattgtcaaaggcatacgcgaaaagaccgcaaaagcgctcatttccgttttcggtcccgatacgcttgacattctcgaaaacgaacccgaacgtgtctgcacggtaaagggaatttcaagacagcgcgccgaaaccatatcgcaatcgctcaaagagaccgtcggagtaaaaaccattctgctttattttcagcagttcggcataacgccgtcggtcgcattcagaatattcaaacaatggggcttgcgctcttacgacataatcaaatcaaacccttacaggctctgtgaaattccgggcgtgggctttcagtcggcggacaggatagccgtccgcatgggctacgattcggagagttccaacagggtcgaagcggcgctgatattcgttctcaaccacaatatgtacggctcggggcatacatttttgccgaagctcaaactctgcgacatcgtttcggcgttgctcggcattgcgcccgatacggtcgcggcaagccttgaaaggctgattgcggacggtgttttggcgtatgttcccgaaataggtaactcggacgcggtttatcaaaaatgggtctatgaaagcgaacggacgatagcgctccgcacgcttttgatggcgcagttttcgggtgatgacccgcaaaatttcaacggcgttgtatcgcttgcggagcggaggctcggaatagagttcgacgaactgcaaaaaaaggcgatattcgcagcggtcaaagaacgtgttctgcttttgacgggcggtcccggaacgggaaaaacaacgacgctgaacggcattatcagagtgtttgaatcagaggatatttcttttgcgctctgcgccccgacgggacgtgcggcaaaaagaatttccgaactgacgggcagagaggcaaaaacgctccaccgactgctcgaatacgcgccccgtgacggcgaatac

SEQ ID NO: 1312 - DNA, 2127 bp, Unknown
  Unknown gut bacteria
gcaacaaagaagaaaacagcaaaaacgccgagaaagtccggaaaatatcttttgatagtcgagtccccgacaaaagcaaagaccatcaaaaaataccttggggacaaatatgaagttctttcttcggtgggacatataaaagacctgccgtcgtcatgtcttgccgttgacatcgagcatgatttcaaacccgaattcatcgttccgagaaaaacgggaaaagcgactataatccgcgaactcaaagcggcaaatgcgaaatataagaaaacatatctcgcaaccgaccctgaccgcgagggagaagccattgcatggcacttggcgcaggaactcggtcttgacgtgaacgacgatatccgcgtcacgtttgacgagatcaccaaaaaagaggttacgaagaaaatcgccgaacctacaaaaatagacatcaaccttgtcaacgcacagcaggcgcgtcgcgttcttgacagaatagtcggttacaaactcagtccgttcctttggcacaaggtcaaaagaggtctgagcgcgggacgtgttcagagtgtcgccaccaaaatggtagtagaccgcgaaaacgagataagagcgttcgttcccaaagagttctggaaccttgacgcggttttcgcaaacggtgtaagaacgtataaagcccgctttgtttcgtgcggaaaaacgaaagaaataggcagcaaagaggctcttgacaaaatacttgacggtctgaaaaacgcggatttcacggtttccgacgtcagaaaacaggaaaagataaagtctcccaaaccgccgtttacgacgagttccatgcagcaggacgcttcggcaagactcaatatgcgcccgtccaaaactatgtccgttgcgcagagcctgttcgaaggtatagaccttgcgggcgagggacttaccggtatgatcacctatatgagaaccgactctctccgcgtctccgacgatgtcaagattcaggcaagagagaagatagcggctctttacggcaaggagttcgtgcccccgacgccgagaaattataaatcaaaagcaaatgcgcaggatgcgcacgaagcgatacgcccgacgtccgttgaactgacgcccgaaagagttcgttcgtcgatgacgaccgagcaatacagactttataaacttatttgggagcgttttgtcgcttcgcagatggcatccgccgtttacgacaccgtgaccgtggatattgcggcaaacgactgcatgttcagggcaacggattccaaactccgtcaaaagggctttacggttctttacaattattccgaagacgaagaggaaaaatccggcagactgccgaatcttgaaaaaggacagtctcttccgttcaaggaatttgagagcgaacaaaagttcactcagccgccgtcgagatacaccgagggctctcttatcaaggctcttgaagataacggaataggcagaccctcgacttatgcgaccaccgtttcgaccattatcgaaagacattatgtcgagagaaacggcaaagttctgcacccgacctcgataggcgaagttacgaccgatgtgatgaaagacaacttcaaagatatagtcgatatgggctttaccgcagatatggaaacaaagctcgacggtattgagcacggccagaagacctatcttgaagttcttaacgatttttacggtccgtttgaaaaagagctgaccgaagccgaaaagaaacttgacggcgttcatataaagatccccgacgaagaaagcgacgaggtctgcgaactctgcggtgcgaaaatggtctacaaggtcagccgtttcggcaaattccttgcctgcccgaactatccgaagtgcagaaacacaaagtccatcgtcaattatgcggacggcgcgtgcccgaaatgcggcgcaaaactcatcatgaagagaagcgcgaaaggcaagacgtactttgcctgtgaaaacaaggacggctgcggatttatgacgtggaacacccccacaaaagcgacctgcccgaaatgcggaaaaacgcttttcagaaagataggcaaaaccgttgtctgcgaaaatcccgagtgtgattacaccgcaaaaagcgagaaaaaagcgaatgaagagggctaa

SEQ ID NO: 1313 - DNA, 1263 bp, Unknown
  Unknown gut bacteria
atgtataattttgaaaaaacggatatatcccgtgcggacgaatttgcgaaaaagaacggcatatttcagcagaccgcaggctgggcgcgtttcagaaaacttttcagacccgacgcttttgtgggaacggacgaaaacggcgaaacggttttgagttgtatgcttttccgtctgcccgtgtattgcactccgtggtcgataggatatatcacgcgcggatttgtctgcgattacgaaaacagagaactcgtagcggaatttaccgagtatctgaaagcgtacatgaaaaaaaagcatatcatctatttgatttttgatccattctgcgattataagatagatttcaaagaacccgaaaacgatatatgcaagttctttgagagtctcggctatatcaaaaacgaaaaactcgttttgcagccgagaacgaattaccgacttcatatcgacccgaaaaacgacccgaaagaggaagaaaaacgcctttattcgaattttacggtcagacttaaaaacgatataaaattcagccacgacagaggcgcggaacttcatgtttcgacgcccgaaacgcttgacgaatacgttgagatcttctataaactgctggttgaaacgacagataaaaaaggattcggcagacgcgaccttgattattacaagaagttcgcttcatctcttgacccgcaggcaaagatttatctttataagtataacagcaaaaaggataaagagtacaccgaaaaggttcttgcggacgttcacgcgcagataaaacgctttgaggacgagattgcggaccccgaaacgaccgataaaaagcgtgaaagacttgccccgaagctcaaagaggcgtacaagcaacttgaagcgacggaaagacgtttgaagataaccgaaaaatattcggacgacccgtatctttccgcatcgttctttatcaaaatgggcaataaggcgtataacttttacggcgcgaacgcaggcgcgctgcgcgaactgaaacttaccgccaactattgggatatgataaaggacagccttgacgggcaggtcacaactttcaatatgggcggtacgctcgaactgaacacggacgaactgaaaaaagacccgatgtacgaactttatcagtataaatgtatgtatcacggcgaatttgttgaaatgccgggtgagtatttcctgataagaagcccgaaactgtttgaactgtttcataacaaactcagatatttccgccgaatggtatttcacttctga

SEQ ID NO: 1314 - DNA, 1221 bp, Unknown
  Unknown gut bacteria
ctgggttacgatgttgacaaacagggtgaaaacttcggcaaatactggcctgcggacttgcacgtcatcggcaaggacattctccgattccatacaatttactggcccatcttccttatggcgctcgacttgccgctcccgaaaaaagtgttcggacacccgtggctcctgttcggggaggacaagatgtccaaatcaaagggcaacgttatatatgctgacgaccttgttcatgcgttcggcgttgacgcggtaagacactatgttctttccgagaccccgtttgcggcagacggttccataacttacgaaaccgttatcgaaagatacaattccgacttggcaaacaatctcggcaaccttgtaagtcgcacgctggcaatgaccaaaaagtatttcggcggcacagttcccgctcccgcgcagagcacggaatttgatgcgtcgcttatcgaaacggtaagacagaccgttgagacctataaggcaaaaatggacgacctgcatatcgcggacgcagaagacgcagtattcgcgatgctcagaagagcaaacaaatatattgacgagaccgctccatgggtgcttgcgaaagacgaaagcaaaaaagaagttctcggaacggtgctttacaatctgcttgaaaccatacgcgtgggcgcggtgcttctcacaccgtttatgccttcgaccgcggcttcgatattcaagcagttgaacacggaggcgggagacctttcgacggtcgaaaacttcggtgtttacgcggcgggaacggttctcggcgaaagcgaaatgctgttcggaagaatcgacgcggaaaagaaactcgaagaactgaaagcggaacatgaagcggctgtaaaagcggcgcagaagcccgaaaaaccggaaggcgttgcggaaataggcatagacgacttcatgggcgttgaactccgaaccgcacaggtcattgcgtgtgaacccgtgccgaaagcaaaaaaactgctcaaattgcagatagacctcggctacgagcaaagacaggtcgtttcgggcatagcaaaatggtataagcccgaagaccttgtaggcaaaaagataatcgttgttgcaaaccttaaaccggcaaaactctgcggtgtggaatcgcagggcatgatacttgcgtcgggcgaagagaccgtccgtgtcgtattccttgcggaagacaccccgctcggcgagcgcgtaagataa

SEQ ID NO: 1315 - DNA, 615 bp, Unknown
  Unknown gut bacteria
agaatggcgggtttaacggaagttcccgttatcgtaaagaatttgagcgacaaagaagcgcttgaaatcgggcttatcgaaaacctgcaaagagaaaacctgaacgtcgtcgaagaagcaaaaggttacaaagcgttgatagatgagttttcgctgacacaggagcaagttgccgaaaaggtcggaaaatcaagacctgcggttgccaacgcaatgcgtattttggcgctgcctgacgaaactctcgaccttgttttggacggaaaactttcttcgggacatgcccgtgcactgttgccgcttgcggaaagagccgaaagcaagaagaaattttccgaacttgtaaaaatgataatagacaaggggcttacggttcgagacgttgaaaatcttgcaaagaagaaaagaccgctgaccagaacgaaaagagaaagtccgaacgatatttattatagggagaattcttccgaactctcgtcgaattacggcagaaaagtcaaaatcgttccgtcaggaaaagcaaaaagcaaagtcaaaggcacaatcgttttggagtactactcggacgatgatctgaacacgctgatagatatgttgaaagaaggagaagagtaa

SEQ ID NO: 1316 - DNA, 1086 bp, Unknown
  Unknown gut bacteria
atgtccaccttgctcgaatacaaatgtccgtgctgcggcggcgcgatagcgtttgacagcgcatcgcaaaaactaaaatgcccttactgcgataccgaatttgatgttgaaacacttaaagcatacgacgaggatcttaaaaaagagacccccgacgatatgaagtggcagaccgaagccggaaaagagtggcaggagggcgaagccgagggaatgcgcgtttacgtctgcgattcctgcggcggcgagatagtctgcgacgaaaacacggcggcgacgagttgcccctattgcggcaaccccgttgttatgaaaggcaatctcaaaggctttttgaagcccgattacataatcccgttcaaactcgataaaaaggctgcaaaggcaaaattcttcgaacatctgaaaggcaagcgccttttgccgaaagtcttcaagagcgagaaccatatcgatgagataaggggcgtttacgttccgttttggctgtttgattccgatgttaacgcgaacattcgttataaggcgacccgtgtcagaacttggagcgacagcgaaaacgattacacggaaacaagttactatgccgtttatcgaggcggtaacatcgcgtttgaaaacgttcccgttgacggctcgtccaaaatgcccgacgatctgatggaatccgtcgagccgtttgatttcggagaagcaaaagagttcgcgacggcgtattttgcgggatatcttgcggataaatacgatgttgacgcggaacaatccgtggaaagagcgaacgcaagagtcaagagcagcaccgaacaggaatttgcaaagaccgttacgggctatgcgtccgtgactaccgagcagagcagtatcaaactttcaaacggtgttgcaaaatatgcgatgtatcccgtctggattttgaacacgacgtggaaaggtcagaagttcacgtttgcgatgaacgggcagaccggtaaattcgtcggtaatcttcctcttgacaaaggcgctttcttcaagtggtttttcgctctcggcggaatattgagtgctgcggcacttgccgtctcgtatctgatttggttgttgtga

SEQ ID NO: 1317 - DNA, 1785 bp, Unknown
  Unknown gut bacteria
atgtcgaatgccgaaaccgcacaactttgtgcggagattcgcaaaacattgatagaaacggtcggaaaaacgggcggacatcttgcttccaatctcggtatcgttgaattgacggtcgctatacataaaacttttaacgctcccgcagataagataatattcgacgtcggacatcagtcttatgttcacaagatactgacgggcagatacgaaaaaatgcccgaactccgcaaaaaaggcggaatatcgggctttacacgccgttccgaaagcgaatacgacccattcggaagcggtcacagcggaaatgccgtttcggcggggctgggctttgcggaagcgaacagaatggacggcaaaaacgattatgtcgtctgcgttgtgggggacggttctttcacgaacggaatggtttttgaagcgttgaacaattgtcaccgcgaaaatcttaatctgataataattctcaacgataacgaaatgtccatatccccgaatgtcggcgggcttgcaaagtatctttcgaaaaagagcagttccaaaaagtatttcagattcaaaaaaggactgcaacggtttttgaaacatataccgtatctcggcaacgggctgatagcgttattcagaaagataagagatctgctcaaacgcataatatttcccggaaacatattcgaggatctcgggcttgactatataggtcccgtcgataccctcgacgtttcaaaaatatgcgacgtgcttgaagaggcaaagtcgcagaaaaaggtctgtctggttcatgtgctgacacataaggggcggggctacgcgcctgcggaagaaaatccgtcgctgtatcatgcggttgcgccgtttgatacggaaaaagggattgttccgtcagataaaaagacgttttcctccgaattcggcaagatactttgcgacttggcgaagcgcgaccccgcaatctgcgcagtgaccgccgcgatgtgtgacggaacgggactttgcggcttttcaaaagggtttcccgaacggttctttgatgtcggaatagcggaagaacacgccgttactttttgcgcggggcttgccgccgcgggaaaaattccagtattcgctgtatattcttcgtttttgcagcggtgttttgatcaactcatacacgatattgccatacagaatcttcacgtcgttatctgcgttgaccgtgcgggatttgtcggcggggatggggtgacacaccaagggcttttcgatgtaggaatggctctttccgttccgaatacaaaagtctggtctcccgacgggtttgacgaacttcggaaatgccttgaagaagcggtattatccgacggactttgcatagtccgttacccgaaaggcggcgagacggactatgaccgtgcggcgtttgaagaatacgacggtttttccgttctcgaagcaaaagaaaagcccgaagcaactgttgttacatacggccgtataaccgaaaatgcggcggctgcggcagaaaaactcggacatgttcgtgttgtaaaactcctgcgtctttctccgataaacacggaaaaactcggctctttccttgtcggaaaagtgttttttgcggaagagggcatgaaaaacggcggcgtcggcgaatttcttgcggagacattccccgaaaagaagatacaagtccgcgcggtttcggattttaccgacggcggaagcgagaacgaattgatacacgaatacgggtttgatgcaaattttttggaaaaaatgatttccgagagcctcggaagagtataa

SEQ ID NO: 1318 - DNA, 1116 bp, Unknown
  Unknown gut bacteria
ttgcagtttgaatataaaggactttcgggtataaacggtccgcttgtcgttgttgacggcgttcgcggtgtcgggtacgaagaagtttgcgaaatcaaacttgacgacggaacaaaaaaactcggcagagtcatcgaaataacgggagacaaggctattgttcaggtttttgagggaacgataggtctttctatgaacaacacccgcacaaaatttgcgggaaaaccgatggaactcggtgtttcaaaggaaattatcggacgtgttttcaacggttcgggagaacctatcgacggtctcggtcccgtatttgccgaaaaatatgttgatgttaacggcttgcccataaatcccgtttgcagacgctatccgagaaactacattcataccggaatatcaagcatagacgcgctgatgacgcttataagaggacaaaaactccccgtattttcaggctcgggtatgtcccacaacaaacttgccgcacagattgtgcgtcaggcaagactcggctccgagggtgagtttggtatcgtgttcggttcaatgggtatcaaacatgacgtttcgcagtatttcctgcaacaattcagagaagcgggcgtactttccaaggtcgttatgttccagaacctttcaaatgaccccattgccgaaagaattatgattccgcgtctcgctcttacagcagcagaataccttgcattcgaatgcggaatgcacattcttgttatcttgaccgatatgacttcatatgccgaggctcttcgtgaactttcgtcttcaaagaacgaaattcctggcagaaaaggctatcccggctatctgtattccgaccttgcttccatttatgaacgtgcgggtatggtggaagggaagacaggttcgataacgcagatccccattctgacaatgcctaatgacgatataacgcacccgattcccgacttgacgggttatattaccgagggacagatagttcttgacagaagccttgaacagaaaggcgtatatccgtccgtttccattttgtcttcgctttcacgtttgatgaaagacggaataggagagggatatacaagggaagaccattcggtcgtttcaaaccagttgttt

SEQ ID NO: 1319 - DNA, 894 bp, Unknown
  Unknown gut bacteria
atggctgattttattctttcctgtgaatctaccgtcgatctgccgtactcatacgtcagcggcagaaatattcccgttattttctattcttatatcgttgacggcgtttcttacgtcgatgatatggaacgcaattccgatgctcttccccgtttctacgattttatagaaaagggaaaacttccgacgacttctcaattgaatgaatttctgtactatgactttttcaaagaacttcttcaagaaggcgacgttctgcacgttgcgttcggctcgggaatgaccccgtccattcgcaatgccgttgaagcggctgaaaaactccgtgcggaatttcccgacagaaaacttgttataatagactctctttgcagttgctccgggtacggacttcttgttgatctcgcagccgaccttcgcgacgagggtaaaagtttagacgaaatcgcgcaatatctgcttgaagcgagaagcaaagttcagcatcagttcttctcgaccgatatgacgatgttccgccgcagcggaagagtttcgggcgctgccgccatggtttcgacattgctcggtatctgtcccgtcatgtgccttgacgattgcggaaaaattgttgcatacgacaaggtaagaggtaagaaaaacgcaatcaaaaaacttgtttccgaagcacagaagcatattcagaacggtgctgattacgacggaaagttcttcctttccaattcaaattgtcccgaacttgcggaagaaacaaaacaggctcttgaagaagcgttccccaaactcaaaggcaagataaagatgttcaatatcggcactataatcgcctctcattgcggtccaggcaccattgccgcattcttcctcggcgacggcagacgctcgttcaaataa

SEQ ID NO: 1320 - DNA, 2484 bp, Unknown
  Unknown gut bacteria
atgttcaaaggcaaatctgcatccgaatgggaaaacaaattccgttcgacatacgtttcgctcgaaaaaacgggaacaccgtccgaagaacttaacggttttgttgtccgcgtcgagggagaggacagaaaaagcgatacgataggcggcgaagttatcgaggattccgactattcgggaggcaaggcgctgcgtgcaaactatgcgcgtgacgactcgaccacgcacggcgttaatctttcggtcaccgtccccgaaacgggttcgtattctcttgtgacggtcgtaactcgctacggcagaatgaatacgacggactttgacatttatgccaacgatacatacgcttacagcgtaaataccaaggatgacgttatttccgaagagacagttacgggcaaagccaatatgcgaaaaatgacgctgccgtcgataatgctcaataagggcgaaaacacggtttctttcgtacttcaaaatacggacagacagccaaataaacctaatttttatcttgattatatagaactcaaacccgacctttccccgtctgcttccggtaatatcggttatgcttcgaccccgactggcgactattccaaacaggctgtcgcggctgccgaactcgacgtttacaccggttcgtgggatatgagagcgacgttcaatctcgtttcctttgcttccactgaggaagaggctgccgacatcacggttaaaataaccgattattacggcgatgttgttttggaacataccgaaagacccgttttcggcgcatatacgctgaaaatcgacctcggcaaacatcctacgggttatttcaccgtttccgcagtaacgggaacgcagacgctcttcaccaagtcctatgtggttcttcctcccgttgaggacagagaccttgaatcggattctccgtttgcgtctgactttgcgtcttatcatatccttgcggatcgcgaagatgtggtcgcaaactatgcggcagcggcaaaactctgcggcgtcagcgttctgcgcgaacgtctggactggatatataccgaatggaacgaggggggctgcgacttctcccgtgcagacaggttctataacaaaataaacgatatgggtcttgaaatacttccgtttttctcaaatgctccgagatggacaacggaaaacggcaaggtattcatggacgaacaacttgcggtttacaggttctcaaaacgtgttgccgaaagatatgcaaacatatctcaggcgcttgaagtttggaatgagatggactatttcacatacgttcccgccgatatgtacgcttctttctacaaagcggcggcgctcggagtagtcgattcgggaacctctcttccgaagatcatcggaggactttgcgagcctgtgaacagcaacccgtatcttaccattctttacaagagcgacgttttcgattacagcgatgctttcaactggcactatcacatctatgaccgcgcggaacgttccgttacggagtttgttgacggtacaaaagcgggacagtttgcgacgttcgcaaacacatacctttcttctctgccgagttggtgcaccgaagcgggtataaaactttatgcacccgcgggttgtgcggatatgacgtttgcacagcagaagattcaggcaaactatatggtaacttccgcttgccagtcccttgcggcaggcacggataaacacttctggttcatactcggcaatatgcccgaagatggtggctggttcggctcttacggcgcggacgacagaccgtttgcttccgttgttacagaagcggtcatgacccagactctcggcaagggtatctacaaaggtgaactcaaaggtcttccgagcggcgcggagggacacgttataaacaacggcgaggacgatgttatcgttctttgggcaacttccgacagagatgtaactctttccgttcccggaaacgtactcaaaacgaccgttgtcggcaaccgtgaagtgctttgctcgacaaacggaaaaataaccgtcaaggcgggttccgaaccgatgtttatcacggttgacggcaccgttgacgcttcttcttacactgcaacttccaacgatgagataaagaccatttccgcaaaatccgatttcaccgtgggcgaaagagtaattcttacgcagctttggtacgatctgactgattccgcatcgtatctttccgcgcgcaacaatggataccgtgtctccgcaaacggaaatacgataacgcttcaacttgtaaacttcaacgattttgaggttacgggaacggtaagcggctccgcggacggttacaccgttacgggcagcggcgaaacgataaccattcccgcgatgtccgaaacggaggtcacgtttacgataactccgaacggcggaacaggtgcgacctatctgacctttgagggcactttcaacggaagcgaaacctcgaagtctgtttcgagaatctacggataa

SEQ ID NO: 1321 - DNA, 1458 bp, Unknown
  Unknown gut bacteria
agcatataccgctttatgggcgcggatataaacaatatcctcgattttgaaaagcagtttgagggaacggaagttataaggcttgaacaaaactaccgttcgacgcagaaaattctttcggcggcaaatgaggtcatcgcaaacaactgccgcagaaaaggcaagaacctttggacggcgggcgcggacggagaaaagataacttacgcgtgtctgcccacgcagtttgacgagggcgcatacatagcaagaaccgttctgacggaaatgcaggcgcacgacttaaaatacaacgacttctgcgtgctttacagaacacattcgcagtcgaacgccatcgaatctgcgcttcgcggcaacggaatcccataccgcgtatacggcgggcttgcgttttataaaagaaaagagatacaggacactctcgcatatatgaacatcattgtcaacccgaacgacagaacaagactttcgagagtgataaacgagccgaaacgcggcatagggctgacaacggttgaaaaagttttcgagatagcgtcaggcacgagcgaaaagattttcgacgttatagaaaacgcaaaaaactatcccgaactttcaaggtctgcggataaactcgccgcattcgcaacaatgataagagcgcttcaagaggcttcggaagagatgaaagtttcggacttctatctgaccatgctcaaacagacgggttacatggaaatgataggttcgcttgaaatgaacgaggcgaaagcaagacgcgacaacctgcaagagttttacaacacgatagtgacttttgaacagcaggcacaggatgaagcgacgttgcagacattccttgaagagcaggcgctcatcagcgcggtggactcgctgaacgaaaacgacgaagcggtcgtgctgatgaccattcattgcgcaaaggggcttgaattcaacacggtcttcctttcgggttttgaagaggggctcttcccgtcggcgcaatccatggacgaacaggacggcgttgaggaagaaagaagactttgctacgttgcgatgacacgcgcaaagagaaaactttacataacgggtgcgcggacacgaatgctttacggcagaacaaacgcctgcttaccgtcgcgttttctccaggaaatcccggaagagttaacggacgttgtgcagacaaagatgcccgaacataaatcgagtttcgaaaaacagcgcgaacgaatacttcgtcacagagaagagtttgtgcgcaacacgatgacaaaaacggtcattccgaaaaaagaaacgacatccgtatacgaaaaagggatgagagtcaaacacaaaatattcggacagggcaccgtgacagatgttctggcaatgacttcggacaccatgctgacggtagttttcgactccgtcggacaaaagaaactgatggcgaattacgcaaaattggagatactctga

SEQ ID NO: 1322 - DNA, 1878 bp, Unknown
  Unknown gut bacteria
atgcaaaagggcgttttaaaaagaattttgaaaatgctcttcaagttctatcccgttcttgttcccgtaacgatcgtatgcataatcttttccgccgtggcgtcctccattcccgcaatattcctgcaaaaagtgctggcggtcatcggcgaatttgcgaagagcggcgattgggcgggcgcaagcgcacagataataccgaaagtgcttctgcttatcggcttctacgcgctttcgatagttaccataacgctttacagccaacttatggcatatataacccaaggcttcctctacaaaatgagagccaaaatgttcaacggaatgcaggatcttccgataaagtattttgacacacacaagcacggcgacatcatgagttactatacaaacgatatagacactctccgtcaacttgtttcgcagtcactgccgacgcttgttcaatgcagcgtcatcgttatatcggtgcttgcgataatgctgtggtacagcgtttggatgacgcttatcattcttgcgggcgttgtgctgatgatgcttatatccaaaaagataggcggcggttcggcaaaatatttcattgaacttcaacgcacgataggcaagcaggagggctttgttcaggaaacgatgaacggacagaaagtggtcaaagttttctgccatgagcccgaatgtatcaaagatttcgaaaaacttaacaacgacctttacgaaagcaacagaaaagcgcacgcttacgcaaatacgctcggtcccatactgatgaacataggcaacgtgctttatgttatcatcgcgcttgtgggcggcatattccttgtatcgggaacgccgaacctcgcaatttcggggcttgctttcagcattgacatcattgttccgttcctcaacatgacaaagcagttcacgggcaacgtcaaccaactttcacagcagataaactccattgttatggcgcttgcgggtgcgtcgcgaatattcgaactcatagacgaaaaacccgaagcggacgacggttacgttactcttgtaaacgcaaaaacggacgaaaacggcaacataaccgaaacggcggagcatacgggaaaatgggcttggaaacaccctcacgaagacggcacactgacatatacgccgcttaaaggcgatgtgcgcatggtggacgtcgatttcggatatacgccggataaaaccgttcttcacaacatttccgtatatgcggaacccggtcagaaagttgcgttcgtaggcgcgacgggtgcgggcaaaacaacgataacaaaccttatcaaccgcttttatgacattgcggacggcaagatacgttatgacggaataaacatcaacaagataaaaaaatccgacctgcgccgaagcctcggcatagttttgcaggatacgaacctgttctcaggcacggttatggacaatatccgttacggcaatctggacgcaacggacgaagagtgcatagccgccgcaaaacttgcgggcgcggacgactttataacaagacttcctaacggttacgaaacggaactttcgaataacggcgcaaacctttcacagggacaaagacagttgatagcgatagcacgcgccgccgttgcggacccgcctgttatgatacttgacgaagcgacgtcctcgatagatacgcgaacggaagccattgttcagcgcggtatggataaactcatggagggcagaacggtattcgttatagcccaccgcctttcaacggttatgaactccgacgtgatcatggttcttgaccacggcagaataatcgagcgcggaaatcacgagcaacttattgcgcagaaaggcacctactatcaactctatacaggggcatttgaactcgaataa

SEQ ID NO: 1323 - DNA, 1155 bp, Unknown
  Unknown gut bacteria
atggcattcaaaagtttagaagataaaacgctggtcaatatcaaggtcatcggagtgggcggcggcggaaacaacgccgttgacggtatgattcagtctgaggtcagagacgttgagtttatcgccatcaacaccgattgccaacagcttgaaaagcgttcgcttgctcccgtgaagattcctataggcgaaaaaatcacccgcggtttcggcgcaggcgcagatcccgaagtcggcagaaaagccgcagaagaaagccgtgacgccatcgcttccgcgatcaaaggcgcggacatgatatttcttaccgcaggtatgggcggcggaacaggcacaggtgctgctcctcttgttgcacagatagcaaaagagtccggcatacttaccgttgcaatcgttaccagaccgttcaatttcgagggcaagaccaagatagaaaaagcggaaaaaggtatcgaagaccttcttaaacaggttgatactcttgttgttattccgaacgagaacctcaaactcgtttccgaaagcagagtaaccatgctcaacgctttcaagatagcggacagcgttcttaaagaaggtgttgagtccatcacaacgcttattcagagccagggcataatcaaccttgacttcaacgatatcaccgcaatccttaaagatgcaggcaaggctcactggtgcgttcagtccgcaaagggcaaggacaaggcagagaccgttgcaaacgcggttatccagtctccgctgcttgaatcctccatcaagggtgcaaagggcgttatcctttacttcaacgccgatacagaagttaccatggaagacatcgaacttgcggcacagatcatcagagaaaacgccgctcccgatgcaaacatcatctggggtgttaaccttgacgatactcttgaagacgaacttcaggtaaccgttatcgctacccgttttgaggacgagaacaagtctttcggaacacagcctgtgacgaatgcggcttatatcgctccgtccagagttgctcccgaagttcccgctgctcccgcagcacccgttaaccccgctcccgtagcgcctgcggcacctgttgcttccgcttcgaccgaggatgacgacgaatttcttaaattgctcaacgatataacaaagggcaactaa

SEQ ID NO: 1324 - DNA, 1350 bp, Unknown
  Unknown gut bacteria
atgttcacttttgaagaacttcgaaaaaaatatccgacattcgtttacaggtcgtatacagtgagcgacgacggcggaaatctgaaagtcacatacgagtttgcgctcggcgacgatatcgtgttccgtccgagttgggtatttccctatcagaaagaaaaaatcgaaagcggcaaaaacgcaaaggtgctgaaacgcgttctgtttttgctcggctgcgtcgaacttgtcagttattggaaagccgcctgcccgccgaaagtcgttatcgaatgcggaaagttgacggacgaagaaacgctttggttcaaaaaactgtttttcaacgggctcggagagttcttttacaggaacggaatatcgaccgacgaaaagacttttatgaccatagaaagccatggcgaagcgtttgaaaaaacgcctttggcaggaattttttcgggcaatcttatccccgtcggcggcggcaaggactccgttgtaacaatggaacttctgcgcgcgcacaaagcggaaaacaaagtctttatgataaattcgctcggctcggctgtcgaaacggcgcgtgtggcgggatattccgaaaaggataccgtcgccccgaaaagacggctcgacctgaaaatagtcgaattaaactcacagggttttctgaacggtcatacgccgttttcggcgatagttgcgttctccgctcttttctgcgcgatcgcagagcaaaaaagatacattgttctgtcaaacgagagcagcgcaaacgacgtttacgtcaaaggtacgacggtcaatcaccaatattcgaagagcgttgaattcgaaaatgactttcgcgtgcttgtaaaagaccgcatttgcggcgaggttgaatatttcagtcttttgcgcccgctcaacgaatggaacataatcaagctgtttgtcggttatccgcagtatctgcccgtttttaagagctgcaatctcggaagcaaaaagaacgtatggtgcggagagtgttcaaagtgcctgttcgtatatataatgctttcgccgtttgtcgagaacgaaaaactcaaagagatattcggacacgaccttttggacgacgaaaatatgcttaaatactttgacggacttgtcagcgaacagttcgataagccgttcgaatgtatcggaacgcgtgaagagataaatgcggcgctgacgaaaacgctcgaaaagagaacgggacatcttcccctgctgcttgaaaaatacaaagagaaatattacgataaaaactttgacataacttcggttgatacattttttgatgagaacaacaatgttccgaacgaactgaaagaagagttgaaatggaaaaagaactga

SEQ ID NO: 1325 - DNA, 1395 bp, Unknown
  Unknown gut bacteria
atggaaagagtacaagtcagagaactttttgccgcgcccgacgacttcggcggcaagaccgtcaccgttgcgggttggggcagaaccattcgcgattcgaaagcgttcggatttatcgaacttaacgacggcagttatttcaagtccgttcaggtcgttttcgaggcttcgaaagtcgagaactacaagcagatagccgcattaagcgtcggttctgccctcgaggtaaaaggcgtcctcgaactgacacccgaaaacaaacagccgtttgagataaaggcggcggaaatcaccgtttgcggtgaatccgttcccgagtatccgcttcaaaagaaacgccattctcccgaatttttgcgtaccatcgcacatcttcgcccgagaacgaatcttttcagcgcggttttcagagttcgctccgttgcggcttacgccattcataagttttttcaggacagacattttgtctatgttcataccccaataatcaccgccagcgactgtgagggcgcgggcgagatgttccgcgttacgacattcgaccccgaaaacgttcccatgaccgaggacggtcagcccgactggtcgaaagactttttcggcaagtccgcgaaactgacggtcagcggacagcttgaagctgaaacttacgcgcttgctttcggttctatttacaccttcggcccgactttccgtgccgagaaatccaacacgacccgtcatgccgcggagttctggatgatagagcccgagatagcgtttgcggaccttgcggacgatatggatcttgcgagagacatgataaaattcgttatctcctacgttatggaaaattgcgccgcggagatggagttcttcaacaattttgttgacaagggacttatcgaaagacttaaaggcgttgtcgagtccgacttcgttcgcgtaacttacaccgaagcggtcaagattctcgaaaagaacaacgataagtttgaatatcccgtctcgtggggctgcgacctgcaaacggaacacgaaagatacctcaccgaaacggtttacaaaaagcctgttttcgtaacggactatccgcaggatataaaagcgttttatatgagactgaacgacgacggcaagaccgttgccgcggctgaccttctcgttcccggaataggcgagataatcggcggaagccagagagaagaaagacttgattatcttcttcgcgctctcgacaaattcggacttgacgaaaaggattattcgtggtatctcgatcttcgccgttacggcggctgcaagcacgcgggcttcggtctcggctttgaaagacttatcatgtatattacgggcgtttcaaacattcgtgacgttctgccgttcccgagaaccctcggctctgccgaattttaa

SEQ ID NO: 1326 - DNA, 1617 bp, Unknown
  Unknown gut bacteria
cccgacagtttgcttgcctcgctcggcggacagacgggactgacgcttgcgacagaacttgaaaaagacggttttctgaaagctcacaacgtacgccttatcggcacgaatgcggaagcgatagacaaagccgaagacagaaaactgttcaaggaaacaatggcgcagataggcgaaccgacggttccttccgatattgccacaacggttgaagacgctctcgaaatcgccgaaaagataggttatcccgtgatcatccgtcccgcattcacgctcggcggaacgggcggcggtgtggctaatgacgcggaacagatgaaaaaagccgcaaaaacggggcttgacgcttcccccataacgcagatactcgtggaaaaatacatattcggctggaaagagatagagtttgaaacaatgagagacgctgcgggcaacgccatagcggtctgctcaatggaaaatttcgacccggtcggaatacacacgggcgacagcatcgttgtcgcacccgcgctgacgctttcggataaagagtatcagatgctccgttcggcgtcgctgaacatcatttccgcgctcggaatagtcggcggctgtaactgccagttcgcgcttgacccgaacagttttgattattcggtgatcgaggtcaatccgagagtttcgcgctcgtcggcgcttgcatcgaaagcgacgggctaccccattgcgaagataacgacaaaaatcgcgctcggctacactctcgacgaaatcaaaaacgatataacgggcaagacctgtgcgtgctttgaacccgcgcttgactacgttgtggtaaagttcccgaaatggccgttcgacaaatttgtgggtgcatcccgaaaactcggcacgcagatgaaagcgacaggcgaagttatggctatcgcgccgtcttttgaaaatgcgctgatgaaagcggtgcgcggtgcggagatctcgcttgacacactcaatgcgcgcccgatatcggacaatgacctcgaaacaaggcttgcaacatccgacgaccgcagactgtttacaatattcgaggcgataaaagcgggcgttacacttgaacatatccacgacgttacccgtgtagatatgtttttcctgaacaaactcaaacaccttgcggactatgaaaagagcatagaaaacggacttgattccgaaaaatacctgcaaggaaagaaattcggctatcccgacaaggctcttaaaagactttcgggctgtgacattcttccctgcccgcgcttcacgctttcatataaaatggtggacacctgcgccgcggaatttgatgcggaaacgccgtatttctattccgttgcggacggctcgtgcgaagcggtcaaattcggcagaagcggaaagcccgttgtcatagttctcggctctggaccgatacgcataggtcagggcatcgagtttgactattcatccgtccattgcgtttggtcgttgaagcaaatgggatatgacgttgttatcataaacaacaaccccgaaacggtttcgaccgactatgacacggcggacaggctttattttgagccgctctgcgaagaagacgtgatgaacatcatacgcattgaaaagcccgtc

SEQ ID NO: 1327 - DNA, 1215 bp, Unknown
  Unknown gut bacteria
atggtatgctctatcttcgcgcttgcaggttgcaaaggcggagacacaactaacacaaccgatgctaccaagtccacagacggcggcgacgctacagtagactattccaagatcaagatcggtttcattttccttcatgacgacaagtccacctatgaccttaacttcatgaacgccgcaaaagcagcgcaggaaaaactcggtctttccgacgaccaggttatcttcaagtatcccgttgacgaatcctccgcttgctatgacgctgcggctgaccttgcagaccagggctgcaacatcgttttcgcggacagcttcggtcatgaacccttcattcttcaggcagcaaaagaattccccgatgttcagttctgccacgcaaccggaacaaaagcgcacaccgaaaaagtcgcaaactaccacaacgctttcgcatccatctatgagggtcgttatcttgcaggtatcaccgcaggtatgaaactcaacgaaatgatcgaatctggcaaaatcaccgctgagcaggccgttatgggctatgttggcgctttcccctacgcagaagttatttccggatacacctctttcttcctcggcgctcgttccgtttgcccgtccgttacgatgatggtagacttcaccggttactggtacagcgttgacgcagaaagagacgtagcaaactcccttatggataaaggcgcggttcttatttcccagcacgcggactccatgggcgctccctccgcttgcgaagcaagaaacgttcccaacgtatcttacaacggttccaccattgattcctgcccgaacacattccttgtttcttccagaatcgactgggagccgtactttgaatacattatcaactgtgttgcaaagggcgagtccatcgctgctgactggaccggcactcttgctaccggctccgttgttctgaccgacatcaacgaagctgttgccgcaaagggaaccaaagaagctgttgaagcagctaagaaagaacttgaagcaggcactcttaaagtgttcgacacctccaagttcaccgtaaacggcgaaactcttaccgagttccttgcggacgttgacgacatgggcgactatgttcccgagaccaacgcgatctccgacggatacttccacgaatccgaataccgttccgctccttacttcacaatcgaggttgacggtatcaccagacttgacaagtaa

SEQ ID NO: 1328 - DNA, 1302 bp, Unknown
  Unknown gut bacteria
atgaatatttttacgaccctgagaaatgcttggaagacaagcgacctcaaagcgaagatcgtatttacttgctttattataatacttttcagaatcggtataaacattcccgttccgtttgttaacacggacgcacttcaaagtttcttcagttcccaaagcagcacgctgctcggttacttcaatatgctttccggtaacgcgcttgcatacggaacactctttgcgctgacgatacagccgtacatcaacgcatccattatcatccagcttcttaccgttgccattcccgcacttgaaagattgcagaaagacggcggcgaagcgggaaagaagaaacttaaaaacgcaactcgtttccttacgataggaataggccttatccaggctttcggttattacacgataatgaccaacggctactccacctccctgatgaaccttcccaccggcatgcccgagtggttcggtatcgcgatattcgttgttcttttgcttgcaggctccatgcttgttatgtggctgggcgaaagcattgacgaaaagggaataggcaacggtatctccataatactttttgcttccatcgtttcgcgcggtgtcagccttgtcggttactgcgttcagaaggcgcagaccggctactggtggataatccccatctttgttgttctcggacttgttatgtttgcgttcattgtatttatggacagcgccgaaagacgcattcccatacagtacgcaaaacgtcaggtaggcagaaagatgtacggcggccaaagcacattccttcccgtaaaggttgcaatgaccggcgttatgcccatcatcttcacttatgcgatagtaggtcttcccgcaacaatagcgcagttcttcccgaacagcggcttggcaaagttcgtgacgaatcacttctcgtccacgagcccgatctacatcattctcgcatttgttcttatcattgcattcaacttcttctatatctccattcagtacaatcctgttgagatatcgaacaatatcaagaataacggcggaacaatccccggtatcagacccggtaaaccgacatccgatttcattatcagagtggttaacagagttacgatagtcggcgcgctgttcctcggaatcatcgcaaccgttccttacattctcgaagcgatcttcggtgaagcaatgaccggtcttgctctcggcggtacatccgtaatgattcttgtaagcgttgctcttgaaaccgttaaacaacttgaatcccagatgcttatgcgtcagtcgaaaggattcctcagataa

SEQ ID NO: 1329 - DNA, 1002 bp, Unknown
  Unknown gut bacteria
cttgtcaacgcggttccgctgtcagaccccgccggcagactcggaatgttttccgaagtggttgttttcagcacttatgcgacgtatgttgttatgtcgtttatgatgcttgttatgatcttcatgcttttcccgcaggcgcaggtctcggcggagcgtatcaacgaggtgcttgacaagtcttcgtcgatagtttctggcagcgtgacggagtgtgccgaaaacggaacggtagagttcaggaacgtatctttcaaatatccgaatgcggcggaaaattcgcttttgaacatcaatttcaggataggaaagggtcagacgcttgcgataatcggcgcaacgggcagcggaaaaacgacgcttgtcgggcttattccgaggttttacgacgctaccgagggagaggtgctggttgacggagtgaacgtcaaagaccttgacctcgatacgctttacaacaaactcgggtatgtgacgcagaaagcggtgctgttctcgggaagtataaaggacaacgtatttttcgggcagagcgcggcggaggagaacgacgaaaatcttgaagcggcgatagacctttctcaggcaaaagagtttgtggacaagacggaggacggaacggcgcacagaatagcgcaactcgggcgaaacgtttcgggagggcagaaacagagactttccattgcccgtgcgcttgcgagaaaacctgaaatacttgtttttgacgactctttttcggcgcttgactatgcgacggacgcaaaactccgcgcgggtcttgaaaagagtttgccgaacacgacaaaaataatcgtggcacagagaataggaacgattcgcaatgcggacaggataatcgtgcttgacaagggcgaagaggtcggaagcggaacgcacgacgaactgatgaggagttgcgaggtatacagacagatcgcgaaatcgcagttaagcgaaaaagaactcggacttaacgggaacggagagggggtagcgatatga

SEQ ID NO: 1330 - DNA, 879 bp, Unknown
  Unknown gut bacteria
atgaacatttcggacgcaaatgtttccgtgctgaaaggcgtcggaacaaaaatgcaaaaagaacttgaaaatctcggtatattgaccgttcgcgacctgcttgaatactttccccgaaagtatattgatttttcccaaatatcaaaaatcgccgaactcgaacccgatgtttcggttgttgtggaagcgactgtcgtcaaaaaaatgcgtccgtttaccgcaaaaggaataaccttttcgaagatagacgtttcggacggcacgggtgaagcacgtctgaccttttacaatcagccgtatgttatgggttctgtcgaggtcggcaaaaaatatctgttttacggcaaagtcgaaaaactcggtaagttcgttgatataaacgcccccgtgattgaaaaacctgagaataaatatatacaccccgtttattcgcacccgaaaggtatctcatcaaacagaattgcggcgcttgtgaaaacggcgctgactgcggtagggagcaatctctcggaaactctgaacagggaaataatcgaaaagtattcgctttgccctctttcggaagcgtacagacaaattcatttttctacatcttttgaagcgcgtgaaaaggctatgcgtcgctttgcgtttgaagaattgctgttgttttcgctcggtataatgacgctgcgttcggcaaaccgcaaacttgtcggaaaccccgttgagggcgattgcgacgtctccgattttctgaaaacgttgccgtatacgctgacaaacgcgcaaaaacgtgcgcttgacgattgcctttccgatttgaaaaaaaagacgccgatgtcccgtatagttcagggcgatgtcggaagcggaaaaaccgttgtcgcagccgcggtt

SEQ ID NO: 1331 - DNA, 1170 bp, Unknown
  Unknown gut bacteria
atgcctaagaaaagtttcggacgtcgccttgtaggcaataatgtcttccagacgatagttgcttccgttctctgtgtcataatcggactcatcatcggttatgtcgttcttctgtgcataaaccctgacggcgcattcaaagccattacggatatgctcaaaaactttatgacgttctcgcgcgccacgttgcgtgtaaagaacctcggcaatacacttgtaacgaccgttcctcttcttatgtgttcgctgtcgatactgttctgctataaggcgggacttttcaatatcggcgctgcgggacagtacgttatcggtgcaggcgttgctctttatgcggcgctcggtttggggcttccgtggtatctgtgcatactccttgcaatcgttgcgggtgctgtgctcggaaccgtcagcggtctgctcaaagcctattgcaacgtcaatgaggttatcagcggaatcatgctcaactggataagcctttatcttgtcaatatgcttttgaacattgtaaaagagcctaccagcccttacacaaagagcgttctcggtgttaattcaaaggcaattattccgtctctcggaataggtaaacttctcaataacaactatgcaacgattgcaattcccattgctgttcttgttgcaattataatctgggtagtccttgacaaaacaaaattcggttatgaattgaaggcgacgggctataaccgtcacgccgcaaagtattgcggtatggctgaaaaacgcaacatcgttgtaactcttgttatcggcggtgcgcttgcaggcttcggcgcggctctgtattatcttacgggtattatgcaatggtcgtgcagcgaatcttccgttccggcaatgggcttcaacggaattgcggcggcgttcctcggcggacttcatccgataggttcgatattctcgtcgtatttcattcagcacatcacaagcggcggtgcatacatcgacaagatggtatattcgtcacagatctccgacctgatatccgcaatcataatttacctgtgcggattcgtattctttgcgaagaccgtgctcaacaaatggcttatgacccgcgatgcggcagccgctcgcaaacttgaagaaaaacaggctgctgcggtttcttccgaagagaaaggaggtaaggctgaatga

SEQ ID NO: 1332 - DNA, 1053 bp, Unknown
  Unknown gut bacteria
atgctgaaaagaatacttaaaatattactgatagtgctgataatactcatcctcgttatcgcggggtacgtcgtttatgtttttgcttcgtaccaccgcgcggaagacaatatcacgctggaagtcgagggaaaagcgcatgaaagcgcacttcccgtttgcagaacacttacggcggtaacgtacaatctcggtttcggggcttacagcgacgatttctcgtttttcatggacggcggcgacgaaagtcgttgcagaacggaggaatcagcggaaagcaatatcaaaaatgcggttgaagccgtgaaaaaactcggtgccgacatatatctgttcgaagaggtcgatttcgacagtacaagaagccgcaatacagaccagcgtcaaattgcgtccgatgttctgggagatggttactgtcgtgtttttgcgcagaattatgacagtccttaccttttctggccgttgacatcaccgcacggagcgaacaaaagcggacttctgacattttcaaaatacggtataacgtcttccgttcggcgcagtctgccgatagaatcgggcgtcagaaagcttcttgatctcgaccgctgctattccgccagccgtataccgaccgaaaacgggaaagaacttgtggtttatacgcttcatctttccgcttacacaaaggacggcacggtggcgaacgagcagttgaaaatactgcttgccgatatggaaaacgaatatgcgaacggcaattactgcattgcgggaggagatttcaacaaaaatctgcccggagaaaaactgtcgcaggaacacgcttgggcacagaagatacccgacgatctcattccggacacgatgacactcgtcgcaccgcaggcagatccgctcagaacatgcagagacgcgggcgaaacttattcacccgaaacgtctttcacggtcacgcttgacggctttatcgtttcgaaaaacataatagtcattgagtccaaaacggttgacacgggtttccgttacagcgaccacaaccccgcatacatcaattttattcttcaatag

SEQ ID NO: 1333 - DNA, 1683 bp, Unknown
  Unknown gut bacteria
atgacaaaaaggattttccgctccgtctgcattgttgccgttgttgtgcttttcgcgtcgctggcacttgttatgggcgtgctgtacgattatttttcgggctcgcaggaaaatcagttaaaaacgcaaaccgaccttgcggcacagggcatagagcacgaaggttcctcatatttcgacgggcttgactccgaagaacttcgtataacgtggatagataaaaaaggaaaagttctctttgacaataaaacggacgcttcttcaatggaaaaccaccttgaaagcgaagaggtcaggcaggctgtcgaaaacggctacggtaaaagttctcgttattcggaaacgctgacggaaaaaagtctgtattccgcaaaaaaactttccgacggttcaattgtccgtctttcggtatcgcaatattcggttctgacgctgttcctcggaatgctgcgtcccgtgctgataatcgcgcttttggctgttgtacttgctcttttactggcttaccgcctttccaaaaatatagtcacgccgctgaacaaactcaatctcgactcaccgctttcgaacaaagtttatgaagagctttcgccgctgcttaaacgtatggacgcgcagcaaaggcagttaaaacatcaatcggaagaactcaaacggaagagagaagagtttgaaaccgcgacggagaatatgagcgaaggtcttattattctcaatgaaaaaggcgttattttaaaccttaaccgagcagcggcaaagatgctcgggctttcggaagactccgtcggaaaagatattttctccgaaaaaacgtccgtcaacctgaaagagccgacacaaatagcactttcggggaaaaataaggaagaagtttttgcgctgagagacggaaactgtcagttgctcgcaaaccccgtttcgaccgacggaaaagtgacgggagccgcattgcttgtgcttgacgtgaccgaaaaagaaagagcggagcagatgagacgcgaatttacggcaaacgtgtctcacgaactcaaaaccccgctccaaacaatatcgggatacgcggaacttctcgcaaacggaatggtcgcagataaggacaaaaccgctttcagcgaaaagatatatgcggaagcgcagcgcatgatacgccttatcgaggacattataaaactttcgaatcttgacgagggcgcagttgaactcacaagagagaccgtcgatctttacgttacggcggagaatacggtcagaagtctgcttcccgcagcgaaaaaagcaaacgttacgctttccttgaagggggaaaatgccgaaatatacggtatacctcaactgctgacggcggttgtttacaatctctgcgacaacgcgataaaatacaataaggacggaggaaccgtttttgtgagcgttaaaaacaatgcggaaaatatcgttctttccgtcagagataccggcataggaataccgaaagaacagcaagagcgcatttttgagcggttttacagagttgataaaagccattcgaaagaggtcgggggaacgggtctcggactttcgatagtcaaacacgcggcaaaactgcacgacgcaaaaataacgcttgaaagcgaagtcggaaaaggaacggggataaccgtgattttcccgaagaaacagcaaaacgctcctgcagagatataa

SEQ ID NO: 1334 - DNA, 1167 bp, Unknown
  Unknown gut bacteria
atggtgcttgttatgatctcttcaacggcaagcctgtatttcggtgcggacgacgctgtcaaaaaactctatccgagagagattaacacaaaagtcactttcagaagagctgatgcggcgacgaaagaaaacgcggcaaccgttcgcgatgaaatcgcaaaaacggcgacagaaaacggggcgacagtatcaaacacaagcgcttaccgaagcatatcattttcggcgctcgcgaggggttctgattttctgacaaacgcggaagatgtctattcctattccgaattcaacgcaacggcaagcggcgtatattggatatacatcatccccctctcggatttcaatgcgatgagcgaatatagcgaaaaacttgacaaaaacgaagtgatcgtctccttttacggaaacggtagaaaattcgagaacgacaccttgagtttcaacggcaaacagtcatatcatgttaaagacgtgatcgcgtcagattttgaaagaggcgatgcggcgaagaatctgtcgcagtctttgataatcgtttcttccgatcccgacgccatcattgaagacatatacgcagcgaaagatcctgtcaacgtccttttcaggtacacgttcaattttgacacaggacttgacgccgacggtcaaattgctctcgcgcaaaagatagcctactccgatacgctttcagatctttccctttccgaaaaactgggatacggttcaataaacgtcgaaagccgcgaaaataacaggaatgatttctattgcacatacggcggacttttctttctcggcatacttctcagcgtaatcttcatctttgccgcggttctgataatctattacaagcagataacggaaggctatgaggatcaggcgcgtttcgatattatgcagaagataggcatgactaaaaaagagatccgaaagagcataaactcacaactgctgacggtcttctttttgccgctcctttttgcggcgcttcacttggcgtttgcgtttccgatggtcaaaaaaatgcttgcgctgtccggattgcagaacataacgctttttgcgcttgtaacgataggaaccttttttgtttacgcgatattctatgcgcttgtttataaaataacttcaaacgcctactaccgtattgtaagcgacgcaaaataa

SEQ ID NO: 1335 - DNA, 960 bp, Unknown
  Unknown gut bacteria
atgaaaataacagttgtcggttgcggcagatggggctcgtgcattgcatggtatcttgacagaaacggtcatgatgttaccgttttcggagaagaggacgcaccgacttatgtagggtttaaagaaaacagaacaaacggcgttgtgacttttcccgaaagcatacaccttacggcagaccttgacgatgcgctgaacggtgcggaaaccgtcgttatctctattccgtcacagaatctgcgtacttttatgcagaccgcaaaagcacacgatatcggaaacaagacgttcgttctttgtatgaaaggcatcgaggtcgagacgggaaaacttctccacgaggtcgtggaagaatatctgccgaaaacttcatctcttgccgtgtgggtcggtcccggacacgttcaggaatttgttgcgggacatccgaactgtatggttatagacagttttgataaagatgtgaccgcaaaactcatttccgagttttcaagtgatctgatacgcttttattacggcacagatatgataggtactgagataggctccgcagtcaaaaacgttatcggcattgcggcgggtattcttgacgggcttaaccgttcttctcttaaaggcgcgcttatgtcccgcagcactttcgaggtcgcaaggcttatgaaagcaatgggcgcaaatccgttttcttcgttcggactttgtcacctcggcgattttgaggcaaccgtcttttcggaatattcgcacaacaggcagtacggagaatcccttgttaccggttgtgaaacgttcggtctggcggaggggtactataccgttgccgcggttaagaaacttgcggaaaaatataatgtggatatgcctatatgcgaagccgtttacgacgttatttataacggtgccgatgtcaaagactccatttcaaaacttttctcacgcagtcagaaagaagagtttatc

SEQ ID NO: 1336 - DNA, 2193 bp, Unknown
  Unknown gut bacteria
atgcttgacgagggagaaaatgaactcggagtttttctcggcgacggctggtatcgcggagaaataggtcttgaaaggaaaaaagatgtttacggctccgaatatcaggttgccgccgagttggtcttgacatttgcggacggcacggtggcggcactgcaaacggacgaaaattggcgcgcccgcgcaagttcctgcgtggaaaactcgatatacgacggtgaaaaacacgattttacacacccgacggagcactcttgcgaatgcgtattttcgaacgcacatttcccgacttgccccgatttcggcgcgccgacagtcgaaaaagcaatattgaaacctgcgcttatcataagcccgaaaggcgaatatattctcgattttggacagaattttgcggggtttgttcgcttttcgggtatgctcagacacggacaaatgctgaaaatatctcacggcgaagtgttgcaggacggctgtttttacaatgaaaatctgcgttccgcaaaagccgttgcggagtatgtcggagacggaaaagaacgtgtgtacgaaccgatgttcacatatttcgggttcagatatgcgcttgtcgagggaattgacgcagtttccgtctctgattttgagggcgtggtattcagcgcggatattcctcgggcgtgtttgtgcaaaactgcggacaacgacattaacatccttatagaaaacacatatcgcgggcaactttccaattttatagatgttccgacggattgcccgcagcgcgacgaaaggctcggttggacagccgacgcgcaggtatttgcctcgaccgcttgctttaattcggactgctactctttttacaaaaagtatttgcgcgacttgcgggacgatcagacgctttattatgcgggtgattttccgatgtacagtccgtctcttatcggaacgcctcccgctggcggtgcggtctgggctgactgcggcgttattctgccgtggaagttgtatgagttttacggcgatatcgtccttttacagaactgttttaagatgatgacggattatgtttccgttctccgcgaatgggatattgaacagggcgacagaggacttgtaacggaaggctttgctttcggagattggcttgcccttgacggacttgacgagacggcaatgggcggcgcgacagacaaaggctttataatgagcgtttactattataattccgtaaatcttacggcgaaagccgccgatgaactcgggcgtcccgaacgccgcgaactttttttgcttgcgggcagaataagaaacgcgatactgaacgaatatttttctcctgcgggcagacttgcgctcgacactcaaacggcgtatgttttaagcctgtattacggcatatatcggataaaagagcctgttgtcgccgcctttgaaaaacgtcttcaacgcgacgggtataaactggcaacgggctttgtgggaacgccgctgctgcttcccgccttgtttgacgcgggactgacaacggacgcttacagaatacttctgaaccgtgaatatcccggctggctttatgaggtcgggctcggtgcgactaccgtttgggaaaggtggaactctctgcttcctaacggcaaggtctccgaaacgggaatgaactcattcaatcattatgcttacggctcggtttgcgaggcggtctatacccgtatagcggggcttcggctcggtgaagcggggtggaagagcgccgttatcgaaccgtgtccgcaccgtcttatgcgttccgcggagatagagtatattgcgccgacaggcaaatggaaagtcaaatggaatcttgatatcgaaaaagaaaaattgtttattaacacggtcgttcccgcaggttgcacggcacggataaacattttcggaaaaaccgtttccgaagtgtcggacggcgaatattcttttgaagtccccgttcccgcagatataagttttccgttttcgtgcgacactcccaatatcgacattatggcattcgagccgacaaaatcgcttctgaaaaaatatctgtacccgatatatgccgcatgtgaaaaaggttcgcgcgcatttcttcttgaaaccgtccgttcctgtgcgatagcgttcgggataggtgaaacagacgaaaatttttccgaatatgaaaataaaatacgcaggatcaaagcataa

SEQ ID NO: 1337 - DNA, 2637 bp, Unknown
  Unknown gut bacteria
atgttcggcaaacccgacagaagaaaatacggagcaaagccgttctgggcttggaacggaaaactcgacaaagaagaattgataaggcagaccgaagttatgaaggaaatgggcttcggaggcttttttatgcattcgagaaccggacttgcgacggaatatttgtccgatgaatggttcgacgatataaacgcctgcgccgacgcggcggaaaaagaagatatggaatcgtggctttacgacgaggacagatggccgagcggttccgcgggcggcatagcaacaaaagagaaaaaatacagaatgcaatatctgcgctgcaatatcgtgatgaaagacctgttcgaatggtcggacgatattatattcgcatttgcggcggacgttgacggaataaatttttcgggcgaagtgcaaatatcaaaacatacggacatcgcttccctgccgacaaaagacattatatatttcacacaggaatatatggttccgacgccgacttacaacgagagcgcatatctcgatacattgagccgtgaagcgacagaacattttatagaaataacgcatgaacagtacgcaaaaaagtgcggaaagcgcataggcaaaagcatacagggaatttttactgacgagcctcacagaggtgcgctgatgacgggattttccgttccgaacagagaacctgcaatgcttgcgccgtatacggacgatctgtttgactgtttcaaaaaaacgttcggatatgatttgaaagataaactccccgaactgtttttaagaaaagacgggaaatattacgcaaaagtcaaatggcagtatacagaattgcttacggaacttttcataaagaattttatgaaaccgtatcataactggtgcaaagaccacgacctgcttttcacggggcatatgcttcatgaggacaggctttcgtatcaggtcagcacaaacggttcggtcatgcgctgttacgaacacatggacgttcccggagttgacactctctgtaatcacaactacgcatattgcatagtcaagcaacttgcgtccgttgcgaggcagacgggcaaaaaacacctgatgtccgaactgaacggatgcacaggttggcagatgcgcttttccgattataaaggtataggcgattggcaggcgataatgggaatcaatctgcgttgtccccacctttcatggtataccatgcagggagaagcgaaaagagactaccccgccagcattctgcatcagtccgcatggtataaagcatattcgtatcttgaagaccattatacccgaatcggtgaaattacgggaacgacggacagagtttgcaggacagccgttataatgcccgttgaaagcctttgggcgcagatatatgcgggctgggcagacggcatgatgaacgtatcggaaaaaatcaagccgtatgacgacgatttcgacaaactttacaataccctgcttaaagcgcatgtcgattttgatttcgcggatgaagaaatgctttcgagactcggaagcgttgaagacggaaaattggtaataggaaaagccgattacaagagagttatcgttccgagcatgctcacgatacgcagttccacgctcgaagtgttgaagcagttcaaggcaagcggcggcgaaataatctttgcgggaataacgccgatacttgtcgacgcggaggaatccgacgccgcaaaaacttttgccgatgtatgcgaaaagaccgaaatagaaaacctcgcagaactgcacgacaaaatccttgtttcgtccgataaaataatcattcagacttacaaggacgaagaaaacaaatactgtttcctgctcaacaccgaccccgataattcggttaaaggagtaacgacagatttcggaaaagatgtttcactgcaactttgggacaccgtttccggggaaatattcagcgttgactgcaataacgggaaatatacgacggattttgaagcgggacagcttatactgcttgtaataccgtatgaagaaacacttgacgttgaacctctgccgcaaagaaaagtgattgaaaaagtttctgcggacgatgaaacggaaatttcgacagatgagccgaatgtacttgttcttgattacgcaaagttcagaataaacgacggagaattttccgaaaagaaagaaatactgcttatagaccgttgtctgcgtgcggagttcggacttgaaccgcgcggcggcatgatggatcagccgtggtatacggcacagcgcaaattgcagacaaaagccgagatcgaaacggtatttgaattcgaaaacgacggatataacgaaaaagtcgttctctgctgtgaagagcccgagaaattcgacatcaaaataaacggcaaggctattgacaaaaagcctattgacggaatttatatcgacaagtgcttcaacagattcgatatttccgatctgatacaaaacggaaagaacgaaatatctttcagaacgcagttcagagaagattcaaacctcgaagcgatatatctgcttggaaactttgccgccgacatttcgggaaaaatctcaaaaagagaaaaactcggtttcggcaatgccgcggcgcaggggcttccgttctacggcggttcaatgaag

SEQ ID NO: 1338 - DNA, 693 bp, Unknown
  Unknown gut bacteria
atggcactttatgcaacagccgacctgcacctgtcggaaagcgtcggcaaacccatggacaaattcggcgtgcaatggcacgaccatgtacgcaaaataaaagaaaattggtgtcttaatgaagacgacacctgcgtcatagcgggagacacatcgtgggcgataaatctcgaagaagtcgaagcggacatgaggcttatccacggacttcccggcaaaaaaattatattaaagggcaaccacgactattggtggtcgactctgcgcaagataaatctttttctcaaagaaaagggctttgacgacatagaactgttgcagaacaacgcttttcatgtcggcgacaaatatatctgcggcacgcgcgggtggattccggatgtcggaacacaggaagacgaaagaattgtggctcgcgaagcgggcaggcttaaactttcgatatcagcggcaaaaaaactcgaccccgatgccgtgcccgttgtctttttgcattttccgccgctgtttgcttccgacagatgcgcgcccatcatggacgttttgcacgaattcggaataaagagggttttttacggacatctgcacggaccgacggcgcacgcacttgcggtcacgggcattcacgaagacatagatttcagactcatcgcaggagattacatcggcttcaaaccgatacttataaactga

SEQ ID NO: 1339 - DNA, 1638 bp, Unknown
  Unknown gut bacteria
atgaccgagcataaatttaagggatttttaacgggtctcggaataacctcgataattcagagttcgtcggcgacaaccgttatggtcgtgggttttgtaaactccggacttatgacgctgaaacaggcgacaaacgttatcatcggcgcaaacgtcggaacaacggtcacgggctggatactcagtctgacgggcataagaggagacaatgtttgggtaaatatgcttaaaccgtcatcctttgttcccatactcgcgctttttggcatagttatgcttatgatgtcgaaaaagcagaaatcaaaggacacgggaacaattttgctcgggttcgcaacgcttatgttcggcatggaagcgatgtccaatgcggtttcggggctggccgaaatagagggcttccgtaatcttttcatcgcgtttgaaaaccctttcctcggcattctcgtcggcgcggcgttgacttgcataattcaatcgagttccgcatccgtcggaattttgcaggctctttcaacaacggggcaggtttcgataggcgcttccgttcccatagttatgggcgacggcatagggacgtgcataacagccgttatctcttcaataggcgcaaagcgcgaagcaaagagagcggcggtaatacaccttgttttcaacataatcggaacggctttctgcatgacctgtttctgcgttgcgaaatatgcgttccttgacccgatgggctcggaactgctctcgtcctcggcttcggaactcacgatagcgatagcgaacacggcgttcaaggttgcaagcactattcttattcttccgatgtcgggaattcttgaaaaaatcgcaagaaaagtgcttcccgcaacaaaggaagaaaaaccggaagaactcgacacccgtctttattcaacgcccgaacttgccattgaacattgccgcgccaccgccgcaaaaatggcgaaccatgcatttactgccctcaaagagggaatgtcctgcatagacgcttattctttaaaacttgccgaaagcgtacgtaaaaaagaaacaaagacagataaatacgaagatatgctgagcgaatatctcgtcggtctgacggcgcttcccatacccgaagacgtaaccgttgcatccgcaaaactgctcaaaagtatcggagacctcgaacgaatcgcggatcatgcggtaaatcttgtcgaagccgcggaagagttgaaagacaaaaatgaaacgctctccgaaacggcaaaagcggaacttgccgtgcttgaaaaggcagttacggaagtgctggacagaacttacgcggctttttcggaagacgacccgttggcggcggaacatatcgagccgctcgaacaggtggttgacggactcaaagagcaactccgcacgaatcacgttctgcgtctgcagaacggcggttgcagtatggaagtcgggtttgtatgggctgacattctgaccgacctcgaaagagtttccgaccattgttcaaacattgcggactgcatcatagatgcggcaaacaacagcatgaatatgcacgaggaaatgcgcgaagagatgcgtacaagtcccgaatttgcaagggattacgagaagttcgaaaaaaaatacgcgctgcccgagcgttga

SEQ ID NO: 1340 - DNA, 1926 bp, Unknown
  Unknown gut bacteria
atgtctgaaaaaatcgagaggtacgacgaaagtcaaatacaggttctggaaggacttgaagccgtcagaaagagacccggtatgtatatcggatcgacttccgtgcgcggtcttaaccacctcgtgtatgaaatagttgacaacgcgatagacgaagcccttgccggttactgcaaaaatataaccgttaccatcaaaaagggaaatatcgttgaagtgaccgacgacggacgaggaataccgaccggaaaacacccgaaaatgggtatatcgacgcttgaagtcgttttcaccattttgcacgcgggcggtaaattcggcggcggcggatataaagtgtcgggaggtcttcacggtgtgggagcgtctgttgtaaacgctctttcggagtggttgaccgttgacgtttacgattcaagatcgcataaacacgtttttcaggagtataaacgcggaaaagcggatgctcccgcaaaagtgcttgaagatacggataaaacgggaacaaaagttactttcttccccgatgccaaaatttttgaaactcttgaatttgaatatgacactctgcttaaaagacttcgcgaacaggcgttccttaatgccggtgtccgcatagttttcaccgatgaacgcggagaagaacccgtagtaaacgatatgtgctatgagggcggtatcaagagttttgtagagtacatcaatgataacaaaaaagcaattcatgacgttatctatgttgcgaacgacaacggaacgtattccgccgagatcgcaatgcagtatacgaccaattacgatgaaaacatactttcgttcgcaaacgatattcatacggcggagggcggaacacacgaacagggtttcaaagccgctcttacaaaagtcgttaatgaatatgcgagaaaatataagtatcttaaagaaaaagattccgacctttcgggcgacgatgtacgcgagggattgactgccgttattagcgtcaaactgacggaggctcagtttgagggtcagaccaaaacaaaactcggaaattccgagatgcgcggttttgtaaacaaactcgtttccgaaaaacttgccgatttctttgaggaaaatccgacggtcgttcgcgttatcatggaaaaagccataaacgcacagcgcgcaagagaagccgcaagaaaggcaagagaacaaacaagaagaaaatcaggtctcgattcgggacagatgcccgacaaactccgcgactgcaacgaaagagacgcttcgctcacggaactttacatcgtcgagggagactcggcgggcggttccgcaacacagggcagagactcccgtttccaggcgatacttcccctttggggcaaaatgctcaatgttgaaaaagcgagagcggacaagatatacggcaacgacaaactttcgcccgttataacggcgctcggcgcgggtatcggcacggaattcaatatagaaaaactgcgttaccataaaatagttatcatggcggatgccgatgttgacggagcgcatatcagaacgcttcttctgacattcttcttccgctttatgaggcctcttatagaacagggctacgtttattcggctgttccccctctttataaactttcaaggggcaagaccgtccgcgttgcatacagcgatgaggaaagagaccgtataagcgcggaaatgcgtgagggtaacccgaatgcgaaaatagatatttcgcgttataaaggtctcggtgagatgaaccccgaggaactttgggaaacgacaatggatcccgaaaagagaacattgagaagaatagaactcgaagatgcggttgccgcagataagattttcagcattcttatgggcgaggacgttgaaccgagaaaagaatatatagaattgaacgcacgctatgcggttaatctggacttttaa

SEQ ID NO: 1341 - DNA, 1335 bp, Unknown
  Unknown gut bacteria
atgacggaggttcggaaagtgactgaaaacattgttgaacgcttttccgatacttcggaaaacgaaataatgataaaaattgataatgtcaaaaagcagtaccgtctcggaacgataggcggcggaactttgcggggcgatcttcaatcgtggtgggcaaaagtacgcggaaaagaagacccgaactcaaaaatcggcgcaaaagtctacaagaaaaacgaaaagttcatggcgcttgacgggataaccttggaggttaaaaaaggcgaaaggctcggcattatcggacataacggagcgggaaaatcgacgttgctcaaaattctttcccgcgttaccgcgccgaccgagggcacggtttatctcaacggccgtatttcaagtatgcttgaagtcggaacgggcttccaccccgaactgacgggcagagaaaacatctatctcaacggtgctatcctcggcatgacccgtgcggaagtcgattccaaaatagataaaattatcgagttttccgagtgcgggcagttcatcgacacgcccgtaaaacgatattcgagcggaatgtatgtcaaacttgcattctccgtcgcggcacatcttgacagcgaaattcttgtcatggacgaggttctcgcagtcggtgatatgaagttccagcaaaaatgtcttgacaagatgaatgacgtttccaaagaggacggcagaaccattctttacgtcagccataacatgaacactatccgtcaactttgctcccgctgcgttgtgcttgaaaagggtcagattatatttgacggagacgttgaggcagccgttcaggtctatatgaacaatgtgccggaaaacatctcttctcatcgggaacttgaaaatgcggtgcgtccgaattatatttcgggctctgcaaagttgctttcggcggatttcgagggcaaggaaaactgtgtttttgaagtgggggaggaaattcatctgttcttgcgttggcgcgccgaacgcgatgtggacaatgtgtgcttgcggctgacgctttgctctcccgacggagtgcccgtaggttctgccgtttcggtcggactcggaagtgcaaaagcgggtgaaacggtcgaaagcccggtatctgtttgttttaaggggctttcgcaatgtcgcggctatctcacttttgcccttttcagacccatcgacatgggcatgagtgacgttattgatgaagtcgaagagggttgtcccatgcgttttttggacggtgccgatccttcgacaaggctgcggtggcctcttcggaaatggggttttgtccgttttcccgatataacgcggcgcgataaataa

SEQ ID NO: 1342 - DNA, 948 bp, Unknown
  Unknown gut bacteria
atgggaagaaaaaatctgataactcaaatcgtgctggcactcgttgttgtcgggctttatgtgttgagcggttttctgtgctccggcagtacggacgcggacaagccgttgactcccgataatcccacgaataattcggctaaacaaacttcacaagggaacagcgatttttccgaaaacgatgaacaatataaatatgttttttcgcgtttggaagcacaggacgcagatccagataagacttgtccgagggacaagtattctcttcctctgcctgaaacggagcgttccgagtctttcaaagcgcttgtcgctcccgttaccgaaaaacaatcgtggaaagactttaacgacacggttttcataggagattcagttactctcggtctgcaaaaattcgtgaccgaaaaacgacaggcggaaacagattacttcggcaatgcaaagtttataagcgtcggcagttacggtgcggcaacagcggttgctcctgcgggagaagaaagcatacatcgttatttcaacggagtgagaacaccgccgcaggatatatgctcgtcatacggcgcaaaaaaggtatatatttgcctcggactgaacgatgtcggacaattttccgtcgatgaatatattgcaaattacaagacacttgtcgagaatttaagaaaagcgattcccgatgtcaaaattgcgattcagtcgataactccgataacgctttacggagaaaaacaagtattgtataatgcaaaaatcgacgaatacaacgaaagtcttgccgctttcgcaaaggaagcaaactgtgcctttcttgatattgcagatgtgctcaaagacagcaacggctatcttgcgacatctctttcaagcgacgattattgtcatttgatgcccgaagcgtatgaacgctgggtcgattatcttttatatcatggggtgaaacaatga

SEQ ID NO: 1343 - DNA, 1191 bp, Unknown
  Unknown gut bacteria
atgaaagaggtgaataacatggttagcggaaagtattcaggcggtgttttgactgtttctgtcacgggtaaaattgattccgcaaacgctgacgccgtagaaaatgagataaacgaacttcgaaaaaacgaacatgttgcgcttgtcattgattttgaaaatcttgaatacatatcaagcgcgggacttcgggttattctccgtttgaaaagatccgaaaaggatatgaaagtcgcgaacgtttcaaatgatgtgtacgatatttttgagatgacggggtttaccgaaatgatgcctgtggaaaaggcgtaccgtcgaatttcacttgacggcagcgaacggggcgcggagggcgcgaaaggtatagtttaccgcataaatgcggatactatggtaaaagtgttcaaggatgataactgtctgccgcttattctgcaggagcgcaaccttgctcgccgcgcctttgttctcggtattcccacagccatatcttatgacgttgttaaagtcggcgacaaattcggctccgtttttgaaatgctgaacgccgaacctctttctaaatttatacgagaagatcccgaacaccttgacaaatacgccgaactgtttgcggatcttctgaaaaagattcattcaacagttgttgaaacttccgacattccgtccgcaaaaccgtggctcgacaatatggtcaaaacggcaaaaacttatttgccgtccgatatttcggctaaaatcgagcatcttgtctccgaacttcccgaaccgcatacaatgctgcattgcgattatcataccaacaatatcatgcttcaaaacggagaggcgcttctgatagatatggacaaggtcagttacggacatcccgttatagagtttgcctgcatggcgctcggttttgtcatcttcggagaactcgatcattccgttaccgaaaaatttctcacatactcttacgaaacggggcttgaattctggcacaaagcggtcaaacgttacctcggaacagatgatgacagtcttgcgcactccgttgaggataaagcatacgcggtaggatatatacgatatttgtctcacgttctcaaacgccattcacatgacagcaaagaggggaaagatgccatagagttttgttcaaaccgtcttgaagatgtcctttcccgtgtcgaaacgctcgatttttga

SEQ ID NO: 1344 - DNA, 864 bp, Unknown
  Unknown gut bacteria
atgagacaaactgtatttacgggcgtactttcgcttatcatgtgcgccgttctgaccgttctcggtctgtttgattttccttataaagaaatcgtaatcagcgtagtcggcgttgctctgtttgctggcgcgtcgtatctgctgaaaaaactttcgcccgactcttcttacaaaaagtttttcggaatgaaaatggtgcgtttccgcgatgtcggcgcaatattgggctgcctttttgtactcgctttcggcgcgtttatgctcaactctcttgccgatgcgttttacggatttgtcgggataaacataacaaaaaacacggtcgctttgacaaacggcaattatgcggttctgatgataaccgccgttttgcttcccgccgtttacgaggagttgttcttccgcggtgctttgcagtcgtttatgactgaaaaaagtgagatatttcacgttgtatggggcgcgtttctttttacgttcatgcacggactcgacccttatttcctgacaacgttttttgcggggcttgtcttcggtctggttgtcaaactgacgggaagcgtatatgccgccatagcgttgcattttatcaacaacattctcagttatgcactttcgtattattcagacattctttcggaaattgaattgacgggtctgatgatttatttcgcgggacttgttttccttatcgccgtatatttcattttaagcgtgacgataagaaaaagccgcaaaaatcttaaaagggcgggcagaaagtccgtcgatggaggttcttcatggcaagagacgattacagaaacgaacgggaaagaagaaactcccgccgcagaaaaaagaaaaagagcaagggtaaaataa

SEQ ID NO: 1345 - DNA, 1374 bp, Unknown
  Unknown gut bacteria
atgactcaggaagaactttccgaacttctggaaaagaaggacttcaaatcaatccgcgcgtcgctcgaagagatgaatccggtagatattgcctcgctgctggaagatcttcccgataacgaactcgccgttactttcagattgattgagaagtctgttgccgctgagacgttctcttatatggacgccgatcagcagcagcttttgctcactatttttaccaacaaagaaatcaaagaagtccttgacgatatgtttacggacgataccgtagacctgctcgaagacatgcctgcaaacgttgtcagcaggatacttgcgaacctggacaaggacgacagaaaagcggtcaatgaaatactgcgctatcccgaggacagcgcgggcagcataatgacgacggagttcgtcgatctgcgcagaaaaatgaccgttaaagaggcattcgcaaaaatccgttcgacgggcttggacaaggagactgtctatacctgctacgttatttcgaacgacagaaaactcgagggcgttgtcaccgttcttgaaatgcttatggcggacggcgatacccatatcgaggacataatggacgacaacgtcatttccatcaatacccacgccgaccgagaacaggcggcgcagatgctgagcaaatacaacttcctcgcgttgcccgtcgttgacggcgaaaacaggcttgtcggaatagttactttcgacgacgcggttgacgttctcacggaagaggcaacggaagatatggaaaaaatggcggctatgttgccctccgaaagatcgtatctgaaaaccggcgtattcagcacgttcaaacagcgtataccgtggctgttgcttttgatgatttcggcaacgttcacaagtatgataatcacgaacttcgagggctatatccgcgcgcttgcgggcggggcggtgctgatagcttttatccccatgctgacggacacaggcggtaatgcgggcagccaggcatcggtttccgttatccgcggtcttgctttgggagacatcgaactgcgtgactggttccgcgtgctgtggaaagagatacgcgttgccgcgatctgcggaataacgcttgcttcgtgcaattttgtcaagcttttgcttattgacgggatgctgctccgcaactacgacgtaacgcctttgatagcgcttatcgtgtgtctgaccttgcttgcggcggtgcttatcgcaaagatagtcggttgtttgctgccgcttttggcaaaacgtctcggctttgaccccgcggtcatggcaagtccgtttataacgaccattgtcgatgcgctggctctgttggcgtatttcggaatttccctgcttgtattatctcctataatatga

SEQ ID NO: 1346 - DNA, 981 bp, Unknown
  Unknown gut bacteria
atgatctatattgaaacaggctccgacgacgtttattacaatttcggacttgaatattattttaccgtagaaaagcaactgcccgatacggtttttctgttttggcgcacgaccccgacgcttatggtcggaaaatatcagaacgttgccgaagaaataaacaaaccctatgccgacgaacatggtataaaactcgttcggcgtatgtcgggcggcggaacaatatatacggatctcggcggctggcagttctcgtttatctgccagggtgcggaaaaagagatagagttcagccggtttatcgagcctgtcatagacgcgcttcatgaaatgggcgtcaacgccgggtttaacggcagaaacgatttgacgatagacggaaaaaagttttcgggcaatgcgcagtaccgcctcggagaaagtctcgttcatcacggctctttgctgtttgacaccgatatcgaacagatggtcgcgtcaaccaccgttgacagttataagattatttcaaaaagcataaagtctgttcgcgacagagttacgaatatttccgagcacttaccgtccgcaatgagccccgatgaatttaaggagtgtatggtcagacacataatgcggggaagttccgatgtatataaagtaactgccgaagacgacagacgcattcgcgagattgcaaaagaaaaattcgaaagttggcagagcattttcggcgtcaatcccaagttcaatatcgaacggacgggacgtttcgacggcggaaagataacattcagactcgatgtttccaaaggtgttatcaaaaatgcctccgtattcggggatttcttctcgacgctcgacgcggagacgatctgttccgctttgataggttgcagatatgaaaaaggcgatgttttgcgagcgcttctttcaaacggaatagacggtgcggtttaccgcatatctgcggaagacatggcaaaaacaatagcagactga

SEQ ID NO: 1347 - DNA, 1701 bp, Unknown
  Unknown gut bacteria
atggaaatactcagtatcgaaaatctgactttcacataccccaaaaccgaaactcccgccgtcgaaaacgtcagtttgcaagtgggtgagggcgactttgttttgctctgcggcgcgtcgggctgcggcaagaccacgcttctcaaactgcttaaacgcgaacttatgccgagcggggaacaatgcggcaacgtaaaattctgcggcaagccgctttcttctctgtccgaccgcgaagccgcctccgatataggttttgttatgcaaaaccccgatgaacagatagttacggataaggtctggcacgaactcgcatacgggcttgaaaatctcggcgttccgtccgaaacgatacgcctgcgcgtcggagagaccgcaagttggttcggcatctcggacagtttccgcaaatccacggacgaactctcgggcgggcaaaagcaacttctgaaccttgccgccgtgactgtgatgaacccgcgcattttactgcttgacgaaccgacgggacaacttgacccgatagccgcaacggaatttgtctcggtgctcaaaaaactcaaccgcgaactcgggcttaccgttataatcgccgaacaccgccttgaagatattttccccgttgccgacaaagtcgccgttatggaacacggaaaaattgttgtctgcgacgctccccgtgccgtgggcaaacgtttggctgcgataaacaaaaatcatcccatgcttgcggcgcttccgtctgccgtccgcatttattcggcgcttgaaggcttttcggagacttgcccgctgaccgttcgcgagggcagggacttcctcgaaaaaaacttcgcgcccgctccgaatgctccgctgccgtccgatgaacccgattcgtccgctgcggaaaaagataaaacgccggcagttgaactcaaaaaagtgtggtttcgctatgaacgcgacctgcccgatgtgcttcgcgccacctgcctgaaagcatactcgggagagattttctgcctgctcggcgggaacggtgtcggcaagaccacaacgctgaacgtcatcgcgggacttaaccgcgcgtatcgcggaaaaactcttatcaacggcacgccgataacaaaattcaagggcaattcgctttatcgcaaaaacatcgcgcttttgccgcaagacccgcagaccgtttttgtccgcgacgaggttcaaaaagacctcgaagaacttgccgaagcgtgcggactgtcaaaacccgagcgcgaaaaacgtatttctgaaatttccgaaaaactcggaataacaccgtttctgaaaaaacatccgctcgacctttcgggcggcgaacagcaaaaatgcgcccttgccaaaacgcttttgtccgagccgaagatattgcttctggacgagcctacaaaagggcttgacgccttttcgaaagcgtccttggcgtctcttctgcaaacgctgaaaaatgacgggctttgcatttttattgttacccacgacgtcgaatttgccgccgaaaacgccgaccgctgcgctcttttctttgacggtgagatacttgcctgcgactctccgacccgctttttctccgaaaacaatttctacaccaccgccgccaaccgcatggcgcgccgtctttggaaaaacgctgtcacctgcaaaagcgttgtcgcaaaatgcagagcgcagaaaaagagcggagaataa

SEQ ID NO: 1348 - DNA, 2535 bp, Unknown
  Unknown gut bacteria
tcgcgccccgtttacgaaaacggaaaggtcgttaaaggttacggctgtgccgttccgagcatgagaacagaccccgtttccgcgggaaaaactcttttttcggaagtcagttccggtgcggcgggaacggaatactacgaaaacgcttcgtacgaaacgtatcagacgcttttcggcgcgggcagttttgccggcaagggcgcgataaacgtcgatgcgttccgacgcacattttgttcccgttttgcggacggtacattgctcagccacgatataatcgagggtgaattcttgcgaacggcatacgtttccgacgccgtctttacggattcctctccgtcaaatcttttgtcgtatatgcgccgcgcccaccgctggacgagaggggacatacagaacatcgtatttctgtttaggaatatccgcttaaaatacggcgttgaaaagaaccctctttccgccgtgtcgcgattcaaggtattcggaaatgtattgcgcgcgctgtcgcccgtttttctttttgcggtgcttttttcatctctgtttttaggtgttcccgcacttttgctcggactgttttatatcttttttccgacgctttcggttattttggcatatctgccgtcaaaacacgggtctcccgtccgctatgcttcgggcaaactctgtgccgcgacatcaaattttttgcaatgccttttttcgcttgcgtggcttccgtttgaagcgctgacaaaagccgacgccgccgtgcgcgcgctgacgcgacttgtgacacgcaaaaaactgctcgaatggaaaacctcgtccgccgtggacgcgctcgacataggaaagggtaagtattttcttgaaatgcgggcgcagtatgtcggcgtgtttttgttcttttctcttgcgtctctgccgctcggcgttttgtggctgctcggtatttcgcttgcccttgtcgcttctgcggaacggaaaattccacccgttgaaaataccgaggaactgcgtgcggaagcggaaaagatgtggactttctttcgcgatacggtaacagccgaaacaaattttctgccgcccgacaatctgcgcgtcgagccgctttccgccgttgcggaacgaacctctcctacaaatatcggaatgtatctgctgtcctgtctcggcgcggaaaaactcggatttatcgacgccgacgaacttcttatgcgtgtttccgagaccgtttcaacgctcgaaaaactcgaaaaatacgacggacagattttgaattggtacgacacacgcacgctcaaaccgctttctccgcgctttgtttcaaccgtagataacggcaatcttgcggtttgcctttatactcttgcggcaggacttcgccgcctttctcccgcatcggatatgctcgtttaccgaatagagagccttctttcgtccattgaccttgcgtttcttttcgaccgcgacacggggcttttttatatcggtttcaatgccgaaaacggctctttttcgccgtcgcattacgatttttatgaaagtgagattcgtctgacggtcttttacgccgtcgcaaccggtcaagtcccgtattccgcttggagagcgcttgaccgcgccgcgttttcgtccgacggggtattgtatgcccgctcatggtcgggtacgatgttcgaatatcttttgccgacgatttttttgccgacttatccgcttacattcgacgatgcggcgcttgcccgttgcgttgaattgcagaaaaaaacaaagttcggcggcgtttggggcgtttccgaaagtcaatattacgctttcgacaaattgcttaattaccaatatcaggcgttcggtattaagtcttgcgccgctgaccccgccgcttattcgcgcaaagtcgtgtccccctattcgacgctcctcgctctgccgtttgacgctcccgctgcgctgaaaaatctcgaaaaactgaaaaaactcggcgtatacggcgattacggcttttacgaggctgtcgattttacggacggcgaacccaaaaccgtcaaaagttatatgtcgcaccatatcggaatgtcttttctttcgattgtcggatacctttgcgataatatcattcaaaaaacatttttcgatacccgtatttccgctttttccgatatgctcaaaaacgcgccgccgtttttcgcccgcagatatgaaaatgcgtttgtctccgctcccgatacaacccgcccgacaaaaacggaagaatcgcttttcgttccgcctgccccgaaaggcgaagtgcgtgccgttttcggcaaagatactgtctttttcggtgtggattcgggcgaaagttttttgagcgcacgaggtgtcgatataacccgccgcccgtcgctcaaccgtcccgcagggcttgtcgttctgcgtaaaaacggaacgaaaacgacctccttttcacgcttcccgattgcaggagaaaagacttcgaagtatatgcactcggacggcggcgaaatctgttacacctgccgtgacggcggggtttgtggggggtttttc

SEQ ID NO: 1349 - DNA, 1686 bp, Unknown
  Unknown gut bacteria
atggggtataaagagagttacgaaaaatggttaaacagttctgctgttgatgaaaagacaaaagcggaacttcgtgccgttatcgatgaaaaagagattgaggacagattttgttcgatgctcggtttcggaacggcaggtctgcgcggcattctcggcgcgggacttaacagaatgaacgtttacaccgtcagatatgcgacacaggggcttgcgaggctgataaaggacgagggcgaagaggcctgcgaaaagggcgtcgccgttgcctgtgacagccgcaatatgagccgtgagttttccgaagaggtctgctccgtgcttgccgcaaacggtatcaaaacatatcttttcgacggcccgagaccgacgcccgagatgtcttttgcgatacgaagactcggctgtgcggcgggcgtcaatataacggcttcgcataacccgagagaatacaacggttacaaggcgtattggtcggacggtatccaactttcgccagaacaggcaaaggtcgtttccgacacgatagcgagcattgatatttttgacgatgtcaaaaccgttccttttgaagaagcaaaagcgaacataacaacgctcggcgaagattttgacgatatctatctcgaaaaagttctcgaacagcgcatcgaccgcgaagcaatagcggaaaatgcggatatgaagatagtttacactccgcttcacggcgcgggacacagacttgttccggaagttctcaaacgtgccggcttcaaaaatgtttcgcccgttcccgaacagatggttttggacggaaactttcctacggtaaaatccccgaatcccgaaaatgcagaggcgttgacacttgcggtagagcaggcaaaacgtgagggagcggatcttgttatcggcaccgaccccgactgtgacagggtgggcattgccgcaagaaaatcggacggagagtttgcgctgctgacgggcaaccagacaggtgcggtacttctcgattacgttataaacgcaagaaagagaaatggcacgttgcccgaaaacgcctgtgttgttaagacaatagtcacttccgagatagcgacccgtatatgcaaagcaaacggtgttgccatcgaaaacgtgttgaccggattcaaatatatcggcgaaaaactgcaacattatcttgattcgggcgagcatacttttcttatgggatatgaggaaagttacggttatcttttcggtgattacgcccgcgacaaggatgcgtgcgtagcgtcgatgatgatagcggaagccgctgcatattacagaagcaggggcatgaccgtttacgatgcgctgatgtccgttttcgagcgttacggtttctccgtagaaaagacgctgaatctcgttatgccgggacttgacggcgcggaaaaaatgaagaagatgatgcaggaactgcgctccgaaccgcccaaagacatcggcggtgtcagcgttctttccgtaaaagattattcgcaggggcttgacggactgccgaaagcaaacgttttgtcttacgctctcgaagacggctctacgctcatagtccgcccgtcgggaacggaaccgaaagtcaaggtctatatcatgacgagcggaaaagacgaagccgaagcaaaggcaaaagaagaacgccttgaaaagggcttcaaagaaaaacacgccaactaa

SEQ ID NO: 1350 - DNA, 1710 bp, Unknown
  Unknown gut bacteria
atgcgtttttcaagagcggtcgtaaaataccgcataccaattctgataatcgccgttctgcttatggtgccgtcggtgctcggaatgataggaacgagaataaactatgatatgctcgactatcttccctccgatatggatacggtagtgggacagaacgaactgaaagaagacttcggcaaaggcgcgttctctttcatcatcgttgaagatatgaaagacaaagacgttgcggcactttgtgacaagataaaagaagtcgatcacgtcgattccgttatatggtattcgacgttggcggacgtttcgattccgaaagaattgattcccgataaaatatacaatgaattcaacaccgacaacgcaaccatggttgccgtattctttgacagcgcgacgtccgaagacgtgacaatggacgctataagagaaatacgttccatagcgggcaaacaatgctttgtttccggtatgtctgcgcttgtaacggacttgaaagacctctgcgaacaggaagagccaatctacgtcggacttgcggttctgtgcgcaacggttgcgatgcttatatttctcgacggctggctcgttccgtttgtattccttgcctcgataggcatgatgattcttctgaacctcggaacgaactacttcttcggcgagatctcctacataacaaaagcgctttcggcggttctgcaacttgccgtaacgatggactattcaatcttcctctggcacagttacaacgaacaacgggaacgctgtgacgaccacaaagaagcgatggcggttgcgataaaagaaacgctgacatcggttgtcggaagttctataacaacggttgcgggctttgcggcgctctgctttatgacgttcaccctcggcagagacctcggcatagttatggcaaagggcgttatcttcggcgttatcggctgtgtaacggttctgccggcgctgatacttgttcttgatacccccctgcaaaagacaaagcataaatccctgcttcccgatatgacaaagtttgcgggcaagttaacaaaaatattccccgtattccttattatattcgcggttctcattccgcctgcttattacggttacagcaaaaccaacaatgaagtttactacgatatgggacaatgtctgcctgacgatatcgaatacgttatagcgaactcgaaactttccgacgacttcaatatcgcttccacgcacatggttcttgttgacgcaaacctcgaccaaaaatccgttaaaaatatgatgaaagaaatggaagaggttgacggcgtcaaatatgttctcggtcttgaatcggttataggttcgagaggggccgaagaagtaattcccgacagcataaagggcattttgaagagcgacaagtgggaacttctgcttatcaactccgaatacaaagttgcgtccgacaacgtaaacacccagatagacgaacttaacgccgtgcttaaaaagtacgatcaaaaaggaatgctgataggcgaagcgccctgcatgaaagacatgatagagacaacggacagagacttcaaagttgtcaacgccgtttccatcgtggctatattcgtcatcatcgcccttgttgaaaagagcatttcgctgccgttcattcttatagcggtcatcgaacttgcgatattcataaacctcggacttccccactatctcggtcagtcgctg

SEQ ID NO: 1351 - DNA, 2418 bp, Unknown
  Unknown gut bacteria
atgagttataatcacatacaaattgataaaaaatggcaagaatattgggataaaaatcaaacatttaaaactccatcgtattctgataagcctaaatactatgctatggatatgttcccatatcctagtggagctggtttacatgtaggtcatcctgaaggttataccgcaactgatattatttgtagatacaaaagaatgaaaggctttaatgtaatgcacccaatgggttgggatgcatttggcattccggctgaacaatatgctattaaaactggaaatgatccaagagaatttacttataaaaatatcgctaattttaaaagacaaattaaaatgcttggtttatcatacgattggactagagaaattgcaacatgtgatcctgaatactttaaatggacacaatggattttctgccaattatataaaaaaggtcttgctgaattaaaggaaatcgaagtaaattggtgtgaaggattaggaactgtacttgctaacgaagaaataattaacgtaaatggtaagatggttagtgaacgtggtgaattcccagttgaaaaacgtcctatgaaacaatgggtattaaaaataactgcttatgctgaaagattattaaaagatttagatgaaattgattggcctgaatcaattaaagaaatgcaaagaaattggattggcaaaagtaatggggcactagttgattttaaagtaaaaaatagtgaagaaaaatttacggtgtttacaactcgttgtgatacattgtttggtgctacatattgtgtacttgctccagaacatccactagtggaaaaaattacaacaccagaacaacataatgctgtaaaagaatatgttaatttcgcaaaagctaaatctgatttagatcgtacagaattaaataaagaaaaaactggttgctttacaggagcatatgcaattaatcccgtaaatggaaaagaaattcctatttggattgctgattatgtactagtaagttatggaacaggagctattatggcagtacctgctcatgatgaacgcgattatgcctttgctaaaaaatttaatttagatatcattcccgttttagaaggtggagatgttaccaaagaagcatatactaaagatggtatacacattaattcaggattcttaaatggcttaaataaagaagatgctattaaaaaaatgggcgaattcttagtcgaaaaaaatattggtaagttatcagtaaactatcgtttacgtgactggattttctcaagacaaagatattggggtgaaccattcccaataattcactgggaagatggtactattgaattattagatgaaaaggatttaccattagaattacctataatgactaaccttaaaaaatctggtactggtgaaagtccacttgctaatgccaaagaatggttagaagtgacaagagcagatggtgtaaagggacgcagagaaaccaatactatgccacaatgggcaggtagctgttggtattatattggatatttgctaaaagatgatggtaaaatgttagatttaacagatccgaatgttcaaaaaatggttaacagttggcttccagttgatttatatattggtggtgcagaacatgcggtactacacttactatattcaagattctggcataaagtattatatgattgcggcattgtaacttcaaaagaacctttctataaattattcaatcaaggaatgattttaggtgaagatggagttaaaatgtctaaatctagaggtaatgtaataaatcctgatgatatagttgaaagctatggcgctgatactttaagagtatatgaaatgtttatgggaccacttgatgctatgaaaccttggtcaacaactggtgtagatggtgctagacgtttccttgaacgtgtttatcgtttagttactgaagttgtgaaaatagatgaaaatgatcattcgcttgaaaaaatttatcaccaaacagttaaaaaagttagtgaggatattgaaaatttaagatataataccgcaatctcgcaacttatgatttttgcaaatgaagcttataaaaatcctactatgccaaaagaatatctagaaggatatattaagatggtttatccattcgcaccacatttaggtgaagaactttggaattatataggtcatactaacacaataacatatgaaagttggccaacatttgaagaacataagactattaaccaagaaattactgttgtggtacaagtaaatggtaaattgcgtgataaactacaagttgctattaatactccaaaagaagaacttgaaagattggcattaaatagtcctaaaattattgcaaatcttgccggtgctatacctaaaaagattattgtagttccaaataaactagttagtatcgtaatttaa

SEQ ID NO: 1352 - DNA, 1632 bp, Unknown
  Unknown gut bacteria
atgcaagtatataataaagaaaagaggggcaaagaaatgagattaagaaaaatagcatatgcactatttattattgcaactatatgtttatttactagttgtaataaagaatgtaaacatcagtcaatagaatgggtaatagacaaacaggcaacatgtacagaagaaggaattgaacatgaagaatgtacaaaatgtcacgaaaaatttgatataaaagaaattaaaaaattaaaacatatatgtaatgatgaaggaatatgtacaatatgcggaaataaagtagcaacatctggtttaatatataaattaaatgaagataagaaaagttattatgtttcagagtatattggaatagatatagatataataataccagctaaatatgacggactatatgtaacaagtataggagattctgcattttctaattttattggtctaacaagtatagaaattccaaatagtgttacaagtataaaatatggtgcattttcaggatgtattggtttaacaagcatagaaataccagatagtgttattactatagaatcttttgcatttagtggatgcataggcctgacaagggtagaaataccagatggtgttactatcataggagcttttgcatttagtggatgcacgggcttaacaagtatagaaataccaaatagtgttacaagtataagatattttgcattttcaggatgcacaggtttaacaagtttggaaattccagccagtgtgataaatatcgaagattctgcatttagcggatgccaaaatttaacaagtataatagtagataagaaaaatcaaaaatatgattcaagaaatgactgtaatgccataatagatacacaaaccaatgcattaataatgggatgtaaaaatactataattcctgaagatattaaaagtataggagttgatgcattttacagatgcacaggcttaacaagtataaaaataccagatagtgttaaaactataggaacgcgtgcatttaatggatgcacaggcttaacaagtatagaaattccaaatagtgtaacaattgtagactattgtgcatttgatgattgtgacaacatttcatataatatatataataatggtaaatatttagggaatacagaaaacccatatttggtaattgtaggggtaacgaataacacaacagaatctttttctattaatcctaatacaaagttaataggtggcggtgtattttcaaaatgcagaaatttaaaaagtatagaaattcctgatggtgtgacaagtataggagtttctgcatttaattggtgcggaagtttaaaaagtataaaaataccagatagtgtaacaagtataggtgactctgtatttagtggttgcacaagtttaaaaagtatagaaatcccaaatagtgtgacaagtataggtgactctgcatttagtggttgcataggtttaacaagtataataatcccaaatagtgtgacaagtatgggtgatgaagtatttaatatgtgcaaggctataacagtatactgtgaagtgctagaaaggccaagtggatggtctgagtggtggaattatagtaattatggcaattgcaatgtagtatggggatataaaaagaattaa

SEQ ID NO: 1353 - DNA, 2124 bp, Unknown
  Unknown gut bacteria
atggctgatatgaaaaaaagttccaacaaacgttttggattaggcgacataattatatttggaattattttaataatgattatatttttgtttgctggatcatgcagtggttctaaaccaactgaaataacagtcgacaaattttatgaacttttcttcactgattttgaatcaggtaaaaaagcacgtgaagatttaattaagaatggtgaaattgatccaaccaatattcaaacaaaagaaaatttgatagtaaccaatgttgtttggcaaggtgcaccaggttctggtaatcaaactatttattatatatatatttatacaaaagaatcggcaaattgttcaagtttatttggatcaaattcaaaagtatattcgtttaaaggatctgaagaagatacaaaattagtaagagctattgctgaagctatttatcaaagagataaagttgctgcatttgaagttaatccaaaagtaaacaagactgttgatgttggtagcatcgttatgatagttgcaacactagttgttgctggaatacttatcttctctttatttagaggagcaaaatcaaataatcaagcatttgactttggaaagagtagagctaaacttgctaaacattctaacgtgacatttaaagatgtagctggattagatgaagaaaaagaagaaatgattgaactcgttgatttcttgaagaatccaaagaaatactttgatatgggcgcaagaattcctaaaggtgtattattagttggtagtcctggtactggtaaaacattaatggcaagagccgttgctggggaagcaggagttccattctatacaatttcaggttctgacttcgttgaattatatgtaggtgtcggtgcaagccgtgtacgtgatatgttcaagactgctaaacaaaatgctccatgtatcttatttatcgatgaaatagatgctgttggacgtcaaagaggtgctggacttggtggtggacacgatgaaagagaacaaacattaaaccaattattggttgaaatggatggattcgcacctaactctggtgtaatcgtcatggccgcaacaaaccgtgcagatatattagaccctgcactacttagaccaggtagatttgatagacaaattactgttacaaatcctgatgttagagcacgtgaggcaatcttaaaagttcatgctagaaataaacacttatcaccaagggttaacctaatggatgttgcaagacgtactcctggatttagtggtgccgatctagaaaacttattaaatgaagctgcattacttgctgcacgtgaaaactgccgtgaaataaagatttatcatattgatgaagcaattgatagagtaatgatgggtcctgcaaaacgtagtagaaaatatactgatactgaaaaagctctaattgcatatcatgaagcaggtcatgctgtaataggattaaagttaaaacatgctgaagtagttcaaaaaattacaattgttcctcgtggtcatgctggtggttataacctaatgactcctgaagaagaaaacttcctagaaacaaaacaaacacttactgctgaaatcacaagtttcctagcaggtagaattgctgaggaattagtatttggtcaaatgacaactggtgctcaaaatgactttgaacgtgctaccgcaatcgcaagatctatggtaacagtatatggtatgagttcacttggacctgtacaatatgaaagcgaatctcacaatgtattcttgggccgtgattatatgagtgacaaaaacttctcagataaagttgctcatgaaattgacttagaagtacgtaagataattgatgaatgctatcaaaaaggtgttgaagtaattaaagaaaatcgtgcacttcttgatttaatcgctaaacatctagtagaagttgaaacattaactaaagaagatatcgatgagttagttaacacaggaaaacttaattggtgggaaaagaaaaaagctaaaatggctcaagatgctggtatcgtagatactgatactcctgctcaaagagtaaatcctgcagaacaaacttcttcacaagaacaacaaacaactgaatctcaacaaacagattcaaaagaagaataa

SEQ ID NO: 1354 - DNA, 1278 bp, Unknown
  Unknown gut bacteria
atgataaatttgaaatttgaacaaattattaataatctcaaagaaactatcaaagaccaaaaagtactgcttgcttgctcaactggggttgattctatggttttgttagatttattacttaaagctacagtaaaagaaaatattacagtagtgcatataaatcatcaaaaaagagaacaatcaacaatagaagaagaattcatcaaagatttttcaaaaagccaaaatattacttgttttgtccatcatttaccacactatgatggtagcaattttcaagaatgggctagaaaaaaaagatatgaatatttctatgaagatgcaaaactaacaaatagcacagtaattttattagcccaccatgctgacgataattttgagactataataatgcgactactccgttcgtcttcaatagaaggatatgctggaatacgaaaagaaaaaatgcatagaggtttcctaatatatagaccgcttttagatgtaagtaaagcatctatatatgaatatgcaaatgaatccggaataaagttttttgaggatagctcaaaccaagaaaacgattatacaagaaatcgtataagacattacgtcattcctaaattaaaagaagaaaattcaaattggataaaggcaattgaaaattatagtaatacattatttatggctgctgattattttgaaaaaattgaaaatgattttataaaagagataaattatgtatataataataacgattattatgtagaatttatggcagaaaaattattgcattatgaagattttttacaaatgcaaatactatttagaatcttaaaaccatttaacttatctaaagaattggtaaaagaaatgctaaatatgattaaaagtgcccaaaataaaattgttagtaaaatctcaaatgaattactgtttgtaaaagaatatggtaaagtgataattactaacagaatttacgaaaatgaagaattttatttagaaatttctgaaagtggtacatataaactacctaatgaaagtactttaatactcgataaaaatatttgcacgtttataacatcaaaagtaaaaatatggtataatatccatagttatccaattattgtaagaacaagaaaagatggcgataaattaaagttaaaaagcggaactaagagtgttagtaattatttaactgacaaaaaagttccctatttagaaagaacaaaagtgttgttgttgtgtgatagtaataatcaaccaatatcgatacttggttttataacaaaataa

SEQ ID NO: 1355 - DNA, 1335 bp, Unknown
  Unknown gut bacteria
atgaaaaaacaccatctttcgattgtaggtatattgtttctaggatattttattactattttaattggaacaatattattgcttttacctatatccaaaaatattacagaaaaaattgaatggtatgacgcgatgtttgccgcaacatctgctacttgtgtaactggattaataccattccctaccactaattggagtacatttggtcaaattgtgcttttagtcctaattcaaattggtggtcttggttttatgacaattataagccttatacttatgatgtttaaaaagaatattggcatttatcacagaacagtgttgatgcaatctgcaggaagctattcaatttcaggcgttacaaatctaataaaacgaattattcttgtcactcttttttgtgaaattgttggcgcaatcattttgtcacttagattcagttctgatatggaaattggcaaagccatatattttggtattttccattctgtttctgccttttgtaatgctggatttgatttatttggagtgtcattcattaactatcaaagtgattggattgtactatcaactgtaatgctattaattatttttggtggattaggctttgttgtttggtcagatttcttcgaccatggtttaaaattcaaaaaatacgaattacattctaaaattgtcttagtatttaatggcatcataatattagttcccgctatattttattttattttcgaatttacaaattttggtaatgccggcaaatttacatatctaccttttaatgagaaaatactgaatgcactatttttgtctgttagtccaagaactgccggtttcaattcactagatttaaacaatttaacaagttctggaaaactactgacaatggtactaatgtttattggtggatctacaggatcaaccgctggtggagtcaaagtaactacaatagttgttgtcatcgcaaaccttgttagcctagctagaggtaaagataaaattgtcttatttaaaagacgggttaataataatattgttaaacaatcaagtgcattggttttagcatatttgattataaccattatttcaacacttgttatttgtgctattgaacccaatgtaatgtttgaaagtgtattatttgaagttatttcaggtattggtactgtaggtttatcacttggattatctagttatgcgtgcgttgccacaaaattaatactcacatttttgatgtatgttggaagattgggcgcattctcactgtttgatttattattgaaaaagtcagaaaatatttatttagaaaaaacagaaggaaaggtattggtaggttaa

SEQ ID NO: 1356 - DNA, 2076 bp, Unknown
  Unknown gut bacteria
atggctcgtgaatactcattattacatactcgtaatatcggaatcatggctcacatcgatgccggtaaaacgactttcacagaaagggttctatatcacacaggtaagattcataaaataggagaaactcatgatggcgcagcacagatggactggatggaacaagaacaagaaagaggtataacaattacttctgctgcaaccacagcattctggaagggccatcgtataaatatcattgatactccaggacacgttgactttacagttgaagttagtcgttcattaagagtacttgatggtgctgtaactgtactagatgctcaagctggtgttgaacctcaaacagaaactgtttggagacaagcaactgaatatttagttcctcgtattgtattcgttaataaaatggataaaacaggagcagatttcaaatatagttgccaatctctagatcatagacttggtgctaatgctcatccaattcaataccctattggtgctgaaagtgatttccgcggtatcatcgatttagtaactatgaaagccttcatctatgaagaaggtagtgttgatgaacacggaactgaagttgaaattcctgcagatttacttgatgaagcagaatattatcgtgatgaattaattaacgctgtatcagaatttgatgacgatttaatgatggcatatttagaaggcgaagaaataactgaagatatgttaaaagcagctatccgtaaaggaacacttgctgtaaaattcttcccaattctttgcggaactgccttcaaaaataaaggcgttaaaaaagttcttgacgcagttatcgattatcttccatctccagttgaagttgctcaaatcaaaggtcatgatgaagatggtaacgaaatcgaaattaattcaagcgatgaagaaccatttgcagcacttgcatttaaagtaatgactgacccatatgttggtaaattaacattctttagagtttatcgtggacatttagaatctggatcatatgttcttaactcaactaaggacaaacgtgaaagaatcggtcgtatcttattaatgcacgctaataatcgtactgaaattaaagaagtatattcaggtgatatcgcagctgcagtaggtctaaaagatactactactggggacactatgtgtgatcctaactgccctgttatccttgaaaaaatggttttcccagaacctgttatttctgttgcaattgaacctaaaactaagggtgaccaagataagatgtctgtagcactatctaaacttgctgaagaagatccaacattcagaacttatactgacattgaaactggccaaacaattatttctggtatgggtgaattacacttagatatcattgttgaccgtatgagaagagagttccacgttgaatgtaacgtaggtcaacctcaagtttcttatcgtgaaacaattaagaaagcagctgaaatcgaaggtaaattcgttcgtcaatctggtggtcgtggacaatatggtcactgcgtagttgtatttgaacctaatccaggtaaaggatacgaattcgttgatgaaatcgttggtggtgtaattccacgtgaatatattccagcagttaataaaggtatcgaaaatgcacttgctaatggtaaccttgctggattcccaactatcgatattaaagctcgcttagtatttggttcttatcatgatgttgactctagccaaattgcctttgaagttgccggtggtatggctttcaaagcatctgctgaaaaatgtcaaccagttttactagaaccaatcgaatcagttgaagttatcgtaccagatgaatatgttggtactgtaattggagatttatcaacacgtcgtggacgtattgatggacaagaagctagaggaaagagccaatcaattagggctttcgttccacttgcagaaatgttcggatatgctactgcattacgttctaatactcaaggtcgtggtaattacactatgcaatttgaccactatgaagaatgtcctaagaatgttgcagaagcagttataaaaaaacgtaatgctcaataa

SEQ ID NO: 1357 - DNA, 1602 bp, Unknown
  Unknown gut bacteria
atgattgctataggaatcgtgagtcttgtattagggcttattgttgcacttccttttcgttcaattcctggattgaacaatggcgaaaatatatttgtcgttgagtcagttctaaaacttatacttggtgttgttgcaatattacttgcaatatatccagcaatcaaaaaatatcaacaattatataattatcgtgaagtttctaaactaactttagttatggcttattttccaattgttatttatataattgcaacaattattaatatcattcaaactctttcattcgattatgtttctgccggtgttggtagtgtattatcagaaaaaatgttaggtgttgtagtgtctgcacttgtagcatattttgtatttgcggtatacgcattacttagagcatacaaaataatgatgcgttttgatatgaaagataatatcattctagatgttgttattttcttatttattgtttgctttattttacttgaatggcgtataaatgctgtttatggtaaagcatatggtgatattgcagaatataaattaggtaattcactaattttcttcgtttacattctattagttattgctttttgtttaacattaagatggataattcgtacctttaaaaaagatgaacaactaattcattatgttggcggtgaaggttacgaatatgaaattaaacaaaaagaacatcatcgtgcatacaatgatattcttgatgattttgaaatgtattttgatgaaaactcagatgactattcaaaacttcaaattgaagaagtaactggagaagaaagtcatgaagaagaagtacaaacagtggaagttcaagatgaatatgaagatgaggaagaagataatcaagaagtattcgttgctgaacctactttagaagaaataaatacaactgatagtgaagaagttaaatctttaaattcagaaaaagctgaaattgcaaaagttgttgctgaaaaacatgcaatgttaaatgaaattgaggcaaaacaagcagctcttgaagaagctaaagctgaattgcgtaaacaaagagctgattatgaagcattacttgctgaagttcaagctatgaaacttgaaagtgtagaagttgaaactccagaggttgctgctcctgctaagaaaactaagaaaattgttccttcatttgaaaaaatggttgaatatgcaaattcatttagtgatcatgagggcttcaaagcagttgctaatcctaaaggcaatcttatcaaatattacattggtaagaagatgtatttagtaatgcaatcaactaataacgattatcgtattagctttataacttcatcaaataaattcgttgaatacttaaaagctagacctggtgaattaatcgctcctaaaaatttaaaagataattattgggttaagttaactaataaaggtaaagaagaagctaaatttatgcgtaaggttataaaagaggcggttcttactgcagaaaaacaaatagctgatgaagctgctgcaaaacaagctgaaagaaaagctaaggctgccgctcgtgcaaaagaacgtgctgctttaaaaaaagcacaacaagaaagcaataaatag

SEQ ID NO: 1358 - DNA, 2709 bp, Unknown
  Unknown gut bacteria
atgaagaaattaacaggaaatcaaatacgtagtatgtggcttgaattttttaaaagtaaaggtcacgaaataataccaagtgcatcacttattcctcataatgatccaactttattatggataaatgctggtgttgcaccattaaagaaatattttgatggtcgtgaaaaacctaaaaatccaagaatgactaatgctcaaaaatcaattagaactaacgatattgaaaatgttggtaaaacagctagacatcatacttttttcgagatgttaggaaacttttcaattggtgattattttagaaatgaagtattaacttgggcatatgaattactatttagcccagattggtttgccctagataaaaataacatttatattacttattaccctgaagacaaagatacttttgaaaaatggcaatcattaggagttgaagcaagccatttagttccgattgccgacaacttttgggaaattggcgaaggaccatgtggaccagataccgaaatcttttatgatagaggtacaaagtatgaccctaataatatcgggttagatttactaagaaaagacattgaaaatgatcgctatatcgaaatttggaacattgtatttagtcaatacaattcagttagtggtctaccaagagaacaatatcctgaattacctagcaaaaatattgatacaggtagcggattagaaagactagcatgtatatttcaagaaactgaaactaactatgaaactgatttatttatgccgatgattaaattcttagaacaacatactggttgctcttacgataaccctgcttacaaaatggcatttagagttatagttgaccatgtaagaagtgttacatttgcgattgcagatggcgcaacttttgctaatgaaggtcgcggctatgttttaagacgtattttaagaagagcagtgcgttatggtaaaaaattaggtattaaacaacctttcttatatcaaatggttagcatcgtaattgataatatgaaagatttttatagttacttagttgataaacaagcaataatcgaaaaaatcattaaaacagaagaagaaaatttcttaaaaactttagctactggtgaaaaaaaattaaatgatataatgagtaattctaaagaaaaagttatcagtggtgcttctgctttcttattatatgatacttttggttttccaattgaacttactcaagaagccgcaagtgataatggcttcacagtagatatagtaggatttaacgaagaacttgaaaaacaaaaaaatcgcgctagaaatgctcgttcaaatgaacaatcaatgaatattcaaaatgaagaatatttgaactttaaaagaaaatcagaatttgttggttacacgacgttagaacaagaaagcactgtaattggattatttaaagatggtaagaaagtaaataaagccaatggtttactatttgttgtattggaaaaaactccattctacgcagaaatgggtggacaagctggtgaccaaggtatatttacatataaaggtcaaaactttgatgttttggatactttcaaacttcctaatggccaacatgcccatagtgttgattttaagaatcaagaaatttcagttgatgacattgttttagcgtgtgtaaatgctgattaccgacttgcggtaagccaaaatcattcagctactcaccttttaaatcaagcattacgagaagtacttggtcaacatgtagttcaacatggttcacaagtaacaaaagagaatcttcgttttgattttaatcactatcaaaatttaacagtagaagaaattttaaaagttgaagaaattgttcttgatgccataaagaaaggttatgaagtaaaaactattgaaacatctttggaaaatgctaaaaagttaggcgctcaagcgctatttggtgaaaaatatggtgatgttgttagattagtagatatgacttttagtaaagaattatgtggtggtactcacgttaaaaacactagtaatattaaaaactttgctattacaagtattgaatctaaaggttcaggcatttttagaatagaagcagttgcaagtgataatatttttgatgaaattcaaaacgccgttaaaaatactaaagatgtcatactagatgtaataaacaaatgtaatgatttagtaaaaactgctgaaaaagaaaacattaagctaactaaaccaaatttcgttttaccaagtatagtaggtagctatcaagatattattaattatcgtgaatgttgcaacaatgctaaaaaaattcaaaaagaattagaaaagtcttacgatagtcaaaaacgtaatatggaatctgctgattacaaagtatttgaaaaaaatgcttatgttattaatagtacaacagtaataattcaacaggttgaaaatattgatcctaaagcactaaaagacattgttgataaaattgctcttgattaccaaagttcaattttgtttttcgctgatgtaattgacaatagtcgtatcaattttatcgctaaagcagttggtaacaatgtaaattgtggtcaattagttaaagttgccgcagtcgcgactggtggaaatggcggaggtcgaaatgatttcgcacaagcaggtggtaaagaagtcaataaacttgttgaagctttgaaattagtagaggaaaaaattaaatgcgatatatag

SEQ ID NO: 1359 - DNA, 666 bp, Unknown
  Unknown gut bacteria
atgatacaacttggaaataactgggataacattttaaaagatgaatttcaaaaagaatattatttaaatttacgtaaatttttaaaagaagaatatgaaaactaccgtatatttccatcaatgtatgatatttttaatgcattaaagtataccgattacaacgatgtaaaagtagtaattattggtcaagacccttatcacgaaatcggtcaagctcatggattatgtttttctgttcaagatggggtagcatttcccccatcattacaaaatatttttaaagaactaaatgctgatttaggtattccaatgcctaaaagtggcaacctaactaaatgggcaaaacaaggtgtacttttattaaacacggttttaactgttagggagcactatgcaaatagtcataaaaataaaggttgggagacatttaccaacgccgtaatcgaaaaactaaatgaaagagaagacccaataatctttttattatggggaaatgacgcaaaaagaaaaaaagagttaataaccaataaacaacatattgttttaacggctgcacatccaagtcctctttcggcttataatggcttttttggatgtcaccatttttcaaaaactaatcaactactaatcaatatgggaaaagaaacgattgattggtcactataa

SEQ ID NO: 1360 - DNA, 783 bp, Unknown
  Unknown gut bacteria
atgaataatccatttctaaaacgacgaagaaaagaagcaatcaaagtattaattgcccaaatagttattttagttttatttgtagggttatgggaattactatcttcacttgaaataattgatgccttcttatttagtaaacctagtagaattgtgaaattgttagaaacttatattgttacgaaaacaatatataaacatattggcatatcattacttgaaacaatgttgggattagttattggaaccctagctggtttacttatcgcaattattctttggtggaataaaataatagctaaaataatggaaccatttttagtagtattaaatgctttgcctaaaacagctcttgcgccaatcattataatttggatgggaaccggcataaagggaatcactgcggtggcggtttcaatatcattagtgttaacaattatttcagcatacaattattttattcaagtagaagaagaaaaaataaaaatgctacaaagttttaatgcaactaaattacaaatattatttaaattagttattcctgctaatctagccaatataataagtttaattaaaataaatattggtatgagttgggtaggcgttattgttggtgaattcattgtttcaaggtatggaattggctatttaataatgtatggttcacaagtgtttaatatggatttagttatgatgggggtcattgtcttagctataatttcatttgtgatgtatgaagtagtcaatataattgaaaaaaatataaaaagaaagaggaattaa

SEQ ID NO: 1361 - DNA, 720 bp, Unknown
  Unknown gut bacteria
atgaagaatgtaagtaagacattttatactgaaataggagcacttgatgtattagaagatataacctttaatttaaatgaaggagaaataattgcaattgttggaccgagtggttcgggtaaatcaacactactaaacataatatctaaattgattgaaccaactgagggggaaatctatgttgttggtgaaataggctacatgtttcaacgcgatcatttatttaattggcggacagtttggaaaaatataatgctaggattggaaataaaaaaagaaaaaaatcaggaaaatatcgataagacaaaagagttattaactaaatatggattaatagattttataaatagttaccctcaagaactatcaggtgggatgagacaacgcatagctttaattagaacactagctactaatcctcaagtgttgttactagatgaaccattttcagcattagattatcaaactagaataaatgtcagtgaagatatttttaaaatgataaaagattctaatgtttcggcaatactagttactcatgacatttcagaagcaattgctatggcagatcgagtaatagttttatcacatcgaccagcaaagttgaaaaaaataattgacattaaaaccgattcacctgataatacgccatttaataaaaggctatctagtgaatttagaaagtattttgatgaaatatgggggcttttaaatgaataa

SEQ ID NO: 1362 - DNA, 3651 bp, Unknown
  Unknown gut bacteria
gtggctaatttgagttataaaaatgtccaatatggtagaacacgtgttcgacgcaattatgcgcgagttcaaacaaatgttgaactgcctaacttaattgagattcaaacaaagtcatttgattggtttatgaaagacggcttaagtgccttatttaaagaactttcaccaattaaagaccatggcgatggagaaaagtttgaacttcattttaaagaacatgagtttgatgaaccaaaatattcaattagagatgcaaaaattcacaaagtaaattactctcgtgcattacgtgttaatgttgaattagaaaataaagaaactggtgaattcaaagacgataaaatatttatgggggaaattcctgttatgacaccatggggaacctttattattaatggttctgaacgtgtagttgtaacacaaattgttcgttctgctggtgttttcttctcagaagaaattgataaaaaatcaggcaaatctatctttgcgggtcaaattatcccaacgcgtggtatttggattgaatttgaaaagaacaacaaagatgtttggtttgcaaaaatcgaccgttcaaaaaaagtatgcctccctacttttatccgtgctttaggtgttccaactaacttagatatgattaatctatttgttggtgaaaacgatgatattgcaccacgtccacaaaacatcttagatatgtttagtaaaacatttgaaaaagatgattcgttccgtgaagatgatgcaataaaaaaattatatgataacttacgcccaggtgaaaaaacttctcctgatacagctagaaaatatattgcaagcagattatttgaagttcgtcgttatgaccttgcaaaggttggacgttacaaatttaataagaaacttgatgttgttgctcgtgctgtaggacatcgtttagctaatgatttagtaaatgttgaaacaggtgaagtaattttaccagctggtactgaaattacataccgtcgtaaccctaatactggaaagagtacagctgatattttaagtgaaaatcgtgaaagtttccgtaaaacttacgaatatgaagtaatgttacaaggcaatagcgttgttttggaaacattagatgtattagtaaagacaaatgaaggtgacttaaaagtaagattacatggtaatgatcaacgtgaagatagatgtcatgtagtattatctgatatttttgctacaattagttattacatcaatttacatgttggtgttggtaaagttgttggtagaattgatgatatcgaccatttgagtaatcgtcgtttacgtttaatcggtgaattattacaaaaccaattccgtatgggtatgatgaaagttgaaaagaacattcgtgatagaatgtcaacatcagctgaagttaagagtgttactccacaaaatttagtaaacattcgtcctttaactgcaacattccgtgaattctttggtagtagccaattatcacaatttatggaccaaattaacccattatcagaattaactcataagagacgtttctctgccttaggtcaaggtggtatctctcgtgaccgtgctggtttcgaagtacgtgacgtacactcatcacattatggaagaatttgtccagtagaaacaccagaaggtcaaaacattggtttgattaactcacttgcatcttatgctagagctaatgaatttggttttattgaaactccatatttaattgttaagaaagataaagaaaatcgtcttgcaattatcacagatgaagtaaaatattttactgctgataaagaagaagaatttataattgcggaagcaaacgttaatatgggtaaagatcctaagactggtcaattagttatccttgatgataaagtaattgctcgtcaatatggtgaatttattgaaactgatcgtatgaatgtggatttaattgacgtttcaccaaaacaaatcgttgctatttctacagcatgtattccattcctagaacacgatgatacaacacgtgcgctaatgggtgccaacatgcaacgtcaagcaattccgctattaaagcctgaagcaccatttgtaggtactggtattgaatacaaggccgcaaaagactctggtgttgcaatctgcgcagactttgattgtgttgtagaatatgttgatggtaataagattatcgtacgcgatatgaaaggtgaaaaacatacttacctattaaacaaatatgatagatctaatcactcaacttgtgtaaaccaaagaccaatcgttgaaccaggtgaaaaagtaaaagctggtgacgttttagctgatggttcatcaatggatcaaggtgaacttgctttaggtagaaacgttgtaattgcctttatgacttggaacggttacaactttgaagatgccgtaattatgagtgaaagacttgttcaagatgacgtatatacttcaattcacattgaagaatatacttgtgaagttagagatacaaagcttggtaaagaagaaattactcgtgacctagatggtgaaagtaaagattctattgctaacttagatgaaaatggtattgtatgtcttggcgctgaagtaaaagaaggcgatacactagttggtaaagtatctcccaaaggtattactgaacctactccagaagaaagattatctcaagcattattctcagataactcaaaagatgttagagtatcttcattaaaggttccacatggtggaagtggtattgtacaccgtatcgaacgtttcaatcgtaaatcaggtgccgaattaccaccaggagtaaatgaagtagttagagtttatatcgtacaaaaacgtaagattactgaaggtgacaaaatgtcaggtcgtcatggtaataaaggtgttatttcaaatattttacctattgaagatatgccattcatgtcagatggtactccaatcgatattatgttgaatccacaaggtgttccttcacgtatgaacattggacaagtattagaaatacatcttggtatggccgcaaagaaacttggcgttcatgttgcaactccagtatttgatggtttaactcatcaagatatcgtagatataatgaatgaagctcgtgaaaaagacgaagaattagctagagaaaatcctgctaacaaacgtgctattatcgatgaaaatggtaaaacatatttgttcgatggtcgcacaggacgtcgttttgataacaagatttctgttggtgtcatgtatatgattaaacttgcacacatggttgatgataaacttcatgcaagaagtgaaggaccatacacactagtaacacaacaacctatgggtggtaaggcccaaaacggtggtcaacgtttcggtgaaatggaagtttgggctctagaagcatatggagcagcacatacattacaagaaatgatgacaataaaatcagatgatattattggtcgtaacaaagtatataaagccatcgttgatggtgaaccattacctacaccaggtattccagaagccttccgtgctttaattaaagaattgcaaggcttaggcttaagtgttaaacttgttgacaatgaaggtgttgatgttgccaataagagtctcgtagatgagtttgcgcaagcacaagcaagtaaacgaggcctataa

SEQ ID NO: 1363 - DNA, 1905 bp, Unknown
  Unknown gut bacteria
atggctaatgaaaaagttcaaaataaccgaagaccaatgggtggtccaggtagaggccctggtggtcgttttatgatgccaaatgaaaaaccgaaaaatgttaaaaaagttgttagtagattattaaaatatattggagcatttaaagtattatttataatcttaataattgtagtaatactttcaactcttgcaacacttgaatctaacattgcgataaaagatcttgttgaatctcttggttcatatgatataataaatcatagttgggtaataaaagatggtgttacacaactacctagtaaaacgctattttataattcactattgttattagttggatgttacgttttacaagtaatttgtcaatatttcacaactttaattggtgcatatcttgcaattaaaaccacaagaaaaatgcgtaatgatttatttgcaaaattagttaaattgcctatttcatatacggatacgcatgctcatggtgatttaatgtctagaatgactaacgatgtagataatatctcaaatactgtatctagtactcttggttcactagtatctggtgttttaacaattattggatgcttggccataatgatatggtactcaccattactaactttggtttcaatggtttctttagtacttacattactcgttaccgcattcatgagtaaatttatgagaccattatttcaaaaacaacaatcactattaggaaacttgaatactcaaactgaagaaatggttactggtataaaaactgttgcggcatacaatcaccaagaaattgctaaagatgaattcaatcactttagtgatacttattgtaaagttggtttaaaagctcaaattatatctggttcaatgggtccagttatgaattttattggtaacttaggatatttcttagtttgcttctttggcgctatttttgcaatcaaaggaattggaactactctacaaggagaagtaatcggagctggtattattgctatgtttttaaaaactagtaaacaatttaccagaccaataaacgaaattgctcaattatattcacaaatattaacagcactaacaggtgcagaacgtgtattcgaagtattggatgaaaaaaccgaagactttacaggtgaaataaaagtagattcaagtaaacttcatggcgatattgattttaaacatgtcgcattcggatatgtaaaagataaaccagtattaaaagactttacggttgatgtatattcaggacataaaattgctttagttggggcaactggatcaggaaagactactattgtaaatcttctaatgcgtttctatgatattgattcaggtaaaatttcaatcgatggcattgatatttctaaaatatcaaagaaagatttgcgagataatattgccatagtattacaagatgcagtattatttgaagatactattgaaaataatgtcaaatatggcaaagaaaacgcaaccgatgaagaatttaaccgtgcaattgaaatggcaaattgtgcaaaattcattagacgtttaccagaacaagaaaaaacaatgttaactgaaggtggagctaatttatcacaaggtcaaagacaattgttgacaattgctagagcagtacttgcagatcctaagattttaatacttgatgaagcaacttcaagtgtagatacaagaactgaaaagaaaattcaagatgcaatggtaaaattaatgaccaatagaacttcaataataattgcacaccgtttatctactattcaagatgccgatttaattgttgtattagatcaaggtgtagtagttgaaatgggaaatcaccaagaattgttagctaaaaaaggtgtatacaatcgtttatatcaaacccaattctctggacttgatacatag

SEQ ID NO: 1364 - DNA, 1623 bp, Unknown
  Unknown gut bacteria
atgacaacacaagaaataatattttttattgttaaagtactagctggtactggcgtatttttagtaggcgttagtatgctaacagccaatattgaacaattagctacttctaaaataagaaagatttttaataagacggctaataaaaaactggtaaatgttggtattggtactttaactactgcctttattcaaagctcaggagtaacaaccgttttaattgttggttttgtaaacgttggactaatcaatttggcacaagcaacagctttaattatgggtgcgaatattggtactactattactgctcaaatagcagcgctaagtgctttcccaattacaacatatcttgaattactatcttttattggtattatgattgctatgttatgccaaaaagatcgtacaaagaaagttggatatataattgcgggacttggacttgtttttattggcttaaagattatgtctgatgccatgcaaacaaatcgtgaaactcttcaaggaatttttgaagtagttactaatcctttctttttattgtttattggaatacttgttactgcaattgttcaatctagttctgccacaacttcagttattattgcaatgtcagttgcgggacttacaattggaacaggaagaaacgaagttttatacataattttaggtacaaacatcggttcttgcgttactgcactaatgtcttcatttggtgctggtccaaacgctaaacgagctagtttaatccatctattatttaatgtgtttggatcagttcttttctttatattcttaatactatttccaaatttcatgtgcgttacattccaaaaatggtttaactctactgcaactcaaattgcaatgttccacacattcttcaatgtaacttgcacaataatcttcttacctttctctaatttatttgttaaattatcacaattaattattaaagataagaaagaaagtcttgaaatcacttatcttgatgaacgtattattaattcagcatcacttgctatcactcaattagaaaaagaaatgatattactatcagatgttgcaatgagttcatttagattatcttatcaatcttttgttgagcgtgatgtatcgagagttgatgaaatacaacaaggaattgataaagctaatcgtataagccaaagtattatcaattatctaatcaaggtttccgcaaaatgtactgttcaagaagaacaatatatctccaatattcataatagcataggtgatattatgaggattgcggaaatcgccgataacttcactaaatatactagaaatgaagttaccaaacatattgaattctcagatcaagttatgactgaaattaaaaatatgataggtgaaattgaaaaactttattcattaactaaagatgtagtaacttctaaaaatgacaaactacttattcaagttgatgaagttgaagaaggtattgataatcttcgtaaacgtttaattgatgctcacatcgaacgtttaaataaaggtatctgtaaagctgaaagtagtggtatttttattaacctagtttctaatcttgaacgtttaggtgaccaccttacatatatagctcattcagttatcgtataa

SEQ ID NO: 1365 - DNA, 1206 bp, Unknown
  Unknown gut bacteria
atgctagataagaaattttttaaaattatatgttttatcgctttgttattaactagtgttatttctctttcaagttgtgctaataacaatcaactattattactaaattggggtgaatatataaatgaagatttagtaagagaatttgaagaagaatataattgtagtgtttcaattagtgttgcggaaagcaatgagttgttttactcaaaaataaaaagtggaacaaccgcttacgatttagtaattccatcagattatatggttgaaaaaatgtataataagggactacttcaaccaattgatttttccaaactccctaactatgatgaaaacaatttattaccaggagctaaagctatcattgaacaattagagttaacttttgaagatgctagaagttatttagttccatatctttggggtacctttggtttgatgtacaataaaaataaagaaggattggaagaaagtattgttaataataatggttgggcagcttactttaatcatgacttattgccaagtggtactaaggtaggtatgtataatgtgccaagatttacttatgcgacaactatgttttatcaaaatatgagtccaaacattgtaactaaagatacaatagccataagtaagaaaattctaacatcaacaaagtttaaccaatggggtactgaccaattaaaaaaacaaatagcaagtggtaatttagatcttgcttatatgtatacaggagatttcttagatcaactttatattgaattgcaaaatggtactaaactagaagatattagctttgatatatatattcccgacaacaccattgcttttatggacaatttagtaattcccaaaaaagcccgtcatgtagaccttgctcataaattcattaacttcatgataaaaaaagaaaatgcatatttgaactcatcggttgttggttattgtacaccataccaagcttcatatgatatgattgtaaattggcaaaccgttgatgaaaaatggaagctatattttaacgaagaagaatatggtagtgattggttgaaaaattggagttatgcaatgcaaacatattatccactaccaaaagcaagtgataaagtaaagtttaaaggtacagtactttctaacaaaaacataactaatgatgatttaactgatataaccaatatggttaataatgcaaaggtaaattaa

SEQ ID NO: 1366 - DNA, 1368 bp, Unknown
  Unknown gut bacteria
atgctaaaatggttgattactaaaataaaaaaagtaaatcacccagtgttggtagcatcagatatggaagctggacctgggacagcaattgtaggaactacagaatttccatcaattcgagcaatctgtgaaacagaagaagaaagattagcgtacgaaacaggaaaaattgccgcaatagaatcaagagaagcgttatacgattggacttttggaccatgtgtagatattttaaaaaatcatttttcaccaataacctcaataagaagtgctagtgaagattataaagaagtaattaaatacacaaaacagtacattctaggcttacatgataatggcttaattgccactgcaaagcatttccctggcgatggagcttgtctatttgagcatcatttaactactccaataaatcctctttcaaaagaagaatggaataatagttacaaaaaagtatatgaagaaattattaactcaaacattaaatcaataatgattggacatattgcgttaccatgttatgatgaaaaagatgaagaaactaatttttatcctcccgcaaccctttcatatagattaatgactaagttactaaaagatgaattaggttttgagggacttataatatcagatgctacagaaatgagtggcttttgtggatatatcaattactatgaagcttgtgcccgatttttaatgagtggcggcgattgtttattgtttgcacatcctgatgaggaatttattatgaaaatgtctgaattaatcgataaagggattttgaaattggatatcttagtgaatagagcatatagagttattagttttgtaaatgattgttataatatatctactgatataaaatttgatatagaagaacatcaaaaaattgctagagaagtagtagaaaaatctgtcaaagtttatagagatagaaaaaacatcttgcctttatctaaaaagtatttaaaaattgctcatatagttattgctaaacaaataaaaacagatattatcggggaatttaccaatgaacttgccaaatatgcggaagttactgagtttattgatccaggttgtagcgctataaagaatcttgcaaaaagcaaggcatatgatgcgataatatgtacgataggatgttcacaatggtatggaacaaatcaaataacgctatcgggaactgttgcaagaaatatgatgaatggttggatgaaatatgaaacacctacaatatttgttgattttggcaatccatacattcatgaagaatatgatgcaatgatagatacgctcatttatacttatggttatgctaaagatagttgtagagtggtcgctaaaaaaatatttggagtaagtgagtaa

SEQ ID NO: 1367 - DNA, 1272 bp, Unknown
  Unknown gut bacteria
gtgaagggaaaaattatggcaaagaaagaaattttagaaaacaatgaaaaccaattgactaaggaagaaaagtatcaacttgcaaaagaatgctttgaaaaagaagattatgaacaagcagtaagtttttatgaacaagctgcaaaattagactgcgcagatgcagaatatgaattagcacaattatatcaagctggtgtaggagttgctaaagatgagaagaaagctgcatattattttgaacttgcagcaatgttagaacacgcagaagcacaaaatgcgattggagattgtttctattatggacaaggcgtgccaagaaactataaaaaggctgtttattggtatagacaagccgcaaataaaggacatgaatatgcacttgaaagtatagcaaattgctattatcgcggtgaaggtgtagttcaaaattatgaacaagcaattaaatatttcactgaagcagctgaaaaaggaagcgtttgggctaactactatttaggcgaatgttattactacgcaaaaggtgtagaaaaagatgaagtaaaagctgctgaatattatacaaaagctgcagaagcaggaaatacacttgcacaatcaagtttaggtgattgctatttctatggtaatggtgtagctaaagattttgaaaaagctgttaaatactatacaatggctgcagattcaggaaatgaatgggctttaaataaattagcaaattgctattactatggcgatggtgtagaacaagatgaagctaaagcaattgaatactttactaaatctgcagaagcaggtaataaaaattcaatgtgccgtttaggtgattgctactactatggtagaggtgctgaacaaaactacgaaaaagcatttgaatactatacaatggctgcagaagcaggacataacgttgctaaatgtaatttaggtaactgttattttaatggttatggtgtagaacaaaactacgaaaaagcagttgaattatatttacaagctgcagaacaaaatgttgaaagtgcatataacaaattaggtgattgctatacatatggttatggtgtagaacaaaactatgaaaaagcaattgaatggtatacaaaggccgctgaaaaaggtaatgcatgggcccaagacaatcttggtagtttctatgaatatggaaaaggcgttgaaaaagatattaacaaagcaattgaatggtatacaaaggctgcttcaaaaggcaacaaacacgctaatacacgtctttcaagattaaaataa

SEQ ID NO: 1368 - DNA, 1830 bp, Unknown
  Unknown gut bacteria
atgagtaaaattattggtatcgatttaggtacaacaaattcatgcgttgccgttatggaaggtggcgaagcaaaggttattgttaatgcagaaggtatgcgtacaactccatcagttgttgctttcaagaatggtgaaattgtagttggtgaaagtgcacgtagacaagcagcaactaaccttgatacagtcttctcaattaagagacatatgggaactgattataaagttcatattaaatcaacaaataaggattatactcctcaagaaatttctgcaatgattctacaaaacttaaaggctactgcagaagcatatttaggcgaaaaagttacagaagctgttattacagtacctgcttactttaatgatgctgaacgtcaagcaactaaggatgctggtaagattgctggcttagatgttaaacgtattatcaacgaacctactgccgctgcacttgcttatggtattgataagaatgctggcaataaagaacaaaaggtattagtatatgaccttggtggtggtacatttgatgtatctattctagaacttgctgatggtacatatgaagtattatcaacagctggtaacaaccgtcttggtggtgatgactttgataatcgtgtagttgattatatggttaaacaattcaagactgaaaagggtatcgatttaagcacaaataagagtgcaatgtttagattaaagttagaagctgaaaaagctaagaaagatttaagtggtgtaactactactgaaatcaacattccatttattgcaatggataacgaaggtactccagtacactttgaaatgagtttgacaagatctaaatttgaagaattaattcgtgacttagtagattctacaactaaatcagtacgtcaagctttaaaagatgctaacctttctacgtctgatattgaccaagtattattagttggtggttcaactcgtattccttgtgtacaagaattagtaagaagagaattaggcaaagaaccaaatcgtagtatcaaccctgatgaagttgttgctatgggtgctgctattcaaggtggtgttttagccggtgatgttaaagacgtattattacttgatgtaactccactttcattaggtattgaaactttaggtggtgtatctacagtattaatccctcgtaatacaactatccctacatctaaatcacaagtattctcaactgccgctgataaccaacctgctgtagacattcatgttttacaaggtgaacgttcaatggctgctgataacaagactcttggtcgtttccaattaagtggtattccactagctccacgtggtgttcctcaaattgaagtaaaattcgatattgatgctaatggtatcgtacatgtaagtgctaaagatttaggtactggcaaagtacaaacaatcactattagtggtggttctggattatctgatgaggaaatagatcgtatggttaaagaagcagaagaaaatgctgcaacagataaagcaaagaaagaagaagctgatttacgtaatgaatgcgaacaattgatttttgctgcaaagaaatctgttgaagatttaggtaatgatgtaactgctgatgaaaaagaagctattgaaaaagctactaaagaattaaatgaagctttaagtggtaatgacttagaatcaattaaagctaagaaagaagctttggaaaaggctgctcaaagtgttgcagttaaagcatatcaaaaagctcaagaacaacaagctggtcaaaacaaccaaggtcctaaagaaaacgaagacggaactgttgatgcttcttacgaagaaaagaagtaa

SEQ ID NO: 1369 - DNA, 639 bp, Unknown
  Unknown gut bacteria
atgcaagaaaataatcgctatcgcgaagaagaaaaagaattagaagaaaaaaatgaagttgaaaacgaaaatcttgaaaaaacagaagttgaagaagatgaagttgaaactgaaaaagatgaaatagagcaagaattaaaaaaagattctaaacaaattaaaaaattgaaaaagagaaataaccaactagaaacagaagtaaaagaactaactgatcaagttgcatttctaaaagatcaattgttacgaaatcaagcagagttagaaaactttaaacgtcgtacgaatgaagaaagaattcgtgaacgtaaatatgcaatgcaagatttcttttcagaaattatcagtgttattgatactttcgatagagttgtcagcgcaaaaactgatgatgaaaaacttaaaaaatatttaacaggctttgttatgataaataataacattaagcaaattatggaaaactatggtgttaaaaagattgattgcttaaataaaccttttgatccagcatatcatcaagcaattgaagttgttgaggttgaaggtgttgaacctaatatcgtagttgaagtaattgcggaaggatatttatacaaagaccgagttttaagacctagtatggtcaaagttagtaaataa

SEQ ID NO: 1370 - DNA, 1143 bp, Unknown
  Unknown gut bacteria
atgagtagatgtatagggtgtggtgctaaaattcaaacaactaatcctgaaaaaataggatatgttcctgaaattgctatgatagaacgtggtgaacaagtatattgtaagagatgttatgacattcgtcatcacaatgcattatacacaccagaatatgatacaaagatgtattatgataaaataaaaaatattaaagatgaaaatgccttagttattcttatgattgatataatggatatctttggtggctttatcccgaatttaagtgaatatattggtaataataaagtattaatagtagttaataaaatagatgttttaccaaaaagcgtaaacattaagaaatttgaagaactaatctcacttatttcaaaacgtaaaaaattaaatgtcgttggtattatgatgattagtgctcgaaaacaagatgatgttgaaaaagtaattgctagaatatcgaaactaaaatatgccgcaaagaaaaaatataaccatgaaaaagaagtacgctttgataactgttatataattggttgtgcaagtgttggtaaatcgacttttatgaatatgataggtaaaataactttgaattatcctagtgatgttattactactagtaatcaatatcaaacaacccaagatttcataaagtggccactagatcaaaaaagttatttgattgatactccaggatttattaatcctagtcactatggtgcttacattgataataaatcattacaagtgttgattcctaaaaaatacattaaagtaagaacatatcagcttaatcctgatcaaactatctttattggtgggcttgcaaaaattaaatttgatggtgaaaataaaataaatgttagtttctatatttcaaatgaactatatttacatcgtacaaaaacgattcaagcggataaaatattagaaactcaacagtttaaattattagtgccaccatatactgaagaagaggctctaaaactaaatgaaaaagcagtttacaattatgagataactggcacaagcgatatctttataagtggaattggctttattcatataactagtgaaaagtgtaatgttgaggttcaagttcctaaacctatacttgtagaaaaaattgatggttttatgtaa

SEQ ID NO: 1371 - DNA, 1209 bp, Unknown
  Unknown gut bacteria
atgaataagagaatagaattgttagcaccagctgggaatcttgaaaaggctaaaattgccctaatctatggcgctgatgcggtatacgtaggggggaaatcatttagtttaagagctagggcatcaaactttgaaattgatgatattaaagaattgtgcacttttgcccatagtcttaacaaaagagtgtatgtaacaactaatataattcctcatgatgatgatttaaagaacttagatgaatatttattagctttgaaagatgctaaagttgacgcaataataacatcaagtcttgccataatgttaagggcaaaagaacttgtcccttcaattgaaagacatgtttctacgcaaatgtcgataagcaatcatgaaatcaccaaattctatgaaaaaattggttgtactagggtagtcctcgcaagagaagttaatctcgaacaaatggcaaaaattaaaaaagcttgtaatttagaactagaagtgtttatccatggtggtatgtgttcaagttattcgggacgttgtgtattaagcaaccatttaacaaaccgtgatgccaatcgtggaggttgtgctcattcatgtagatggaactaccgcttgtttgatggtaagcaccgagttgaaaataaaaaatatttcttcaatatgggatctaaagatttaatggcattaaaatatattcctaatttcattgatttaggtatatcttcgctgaaaattgaaggaagaatgaagtcagcttattaccttgcaactgttgttggctgttatcgtaaagtaatcgatttatatctaaataaaggaaaactaaccgaagaagaaattaaagcctttgaaacagaaatttcaaaagccgaaaatcgattaactagtacaggctttctaaataatgatgtaacaattaatgagcagttatatgatactactgccgaacatccaactaaagaatacattggttatgtacttgattatgatgaaaacaatcagatagccaagattgaacaacgcaattattttgaaattggtgatgttgttgaattctttgggccaaatttagaaaatactaaaatgaaaatcgaaaagataattgatgatgaaactggcgaagaaatagctgtcgcaagacatccattacaaattttaagaattgaagtacctttcaaactttcaaaagatgatatgatgcgaaaggtaaagtaa

SEQ ID NO: 1372 - DNA, 3003 bp, Unknown
  Unknown gut bacteria
atgaaaaaaatttgtacactactaattatttttactttaacttttgttagtttcttttgtaaatttagtgtaaaagccactaatgattctagtaatttaactaatccaagtacagaatttagagccgcatgggttagttattatactggtgatatatcttataaaaatgaaaaagactataaaaatcaaatagatcaaattttagatacaatggaatattacaatatgaatgcaatgatatttcatatcagggcaaatcatgatgcttggtataattctaaaatcaataaagttaatagacaattgtcaaatgttgatttttcaaaatttgatccattagagtatgttataactgaagcccataagagggggattgaatttcatgcttggatgaacccttatcgaattggttcaacgtatgcttctgtcgaggatgttgcaagcgcatatagtgattatccaaataatcccgcaagcaaaaaagaaaatgtactaatgggtagtacactacaaatactaaatcctggtattcctgaagttagagattttatcgttgatacttgcatggaagttgtaaataactatgatgttgacgctatccattttgatgattatttttacgcaagcggtattaatgacgaaagcactatcgcaaaatataatacagaaggattatcaacatcagattttagaagaaaacaagtagatttatttattaaagatttaaaagataatttagatcaattcaataaaaagaataataaatttgttcaattaggaatatctcctactggtgtttacaaaaatgcatcatctagcagtgaagctaataccccgctttctaaatatgtatacaatgaaaatggcgatttgatttatcctactggtgctactattggttgccaaatgcattacgaatcatatttatattgtgatactttaaaatgggtaaataacgaatggataaattatattcttcctcaaacttattggtcaacatctcatagcagagcaccatttgaaaagttaatcaattggtggaatatggctgtaaaaaataaaaatgttaatttatatgcggggatgggcatatacatgtggaaagacaccgccggtgaagcagtaaaacaactcaatataacaagtggtttagcaaatgtattaggaacttcaatatatagttatggtgaaattaacgaagcatatcaaaaaattgacactaatcttactgtacaaatgagtcaagtcaaaaacaaggtatggaaaaatttaactatattacctgaaatagcaggtattgatcctgttaaacttggaagtgttaataatttccaagcaagtaataatatcttaagttgggacaaacttgatggtgctaaattttatataatatatcgtagtaatgattgcatcacttataacaatgatgaaattgttgatatcatttcttcacctaatgatattgttagttgggaagatagcgataaaggtgagtatgtttatgatgttgttcccctttcttataccaatactcttggtgaaggatatatccaagtagctgaagatagtgattcaccaattcatgcgcaaatatcactcaatagtgatggctcatcactatttgaagttgctagagcttataacgtagaactagatgctaaaaacgcgtatgtattcttaagcgatgatgcaactgataaatcacgtttaaattatgattggagcagttctgatgaaaaggttgctaccatcagtgaatatggaactataaccctaaaatcccttggaaccataacaataaaaggggtattaaaaactgataaaactaaatattgcgaatttaaattaaatgtatgtaacaaagaattgttagctaaagaatttacagttaattttaaagactcagatggcaaaatattaaagactgttaaagtaaaatatggtaatgcagctactgcacctgaaaatgttagcaaagctgctactgataaatattcatatgaatttattggttggaacgaattatattataacgttacaagcgatcttgatataattgcggtatacaaagtaataattagaaaatatcaagttacttataaaaatgctgatggtacaatcttaaaacaatatgaagtaccttacggaacagttcctactcctccaacaaatcctacccttgaagcagatgataaatatacctatacgttcttagaatggtcaatcgttgatcaacaaattactgaagacaccataatttttgcaagatacattgaaaatgctagattatacacccttagtgtaaatttaggaaatggtagtgaaattaaaaaacattattattactctaccgatgtaattgaatatgtcgaagcagaatatgttgaaggttttgaatttgttagttggtattatgatgataattttgaaaacgaatgtatttttccattagagttaagaaaagatataaccatctatgcaaaatatgctaaactaattgaagtaaaaatagcagatgaaaatgacaatattataaaagaatatactgatcttgaagaaaataacttaccatcatttgactatattactcctaaagagggctatcgtataattggttggtcaataaaagaaaatgatgaatttattcctattgaaaaattaccaaatagtgattgtgtaatataccctatatatgaaaaaatttctagcacaattaatgtaaaaatctatgatgaagttggtaaccttgttcatagctacactgctaacgcaaatgatcctttaccaagtaatactttcgcaaaagacaaaaaaggttatgtctttgatggctggggaattgttaaaggtggtagcattgtaaaaataactactcttccagatactgattgcgaattatatccgatttataaaaaaacaagtaattgtcgaaagtcatgtggaacaattctactaataccacttactttacttgctttatgttactttcgtaagaaacactaa

SEQ ID NO: 1373 - DNA, 1833 bp, Unknown
  Unknown gut bacteria
gtgatttacaaaacaataactaattataaagaagctacaaaagacttcttagaaaatgaaaaacaatttcatttaggtgttattcctacagaacaatctaacccattaacaaagaatcttagtgctacaatcgctaaagatacagctaagggtgtaaagacaattttatcagcagataaatatattgctgatgttgctcgtggacaatttaatactcctgaattccaagcatttgttgatgatatcaagagatgtatggatgaaaaaagaaaagttgttttctcaagcgttggtgcatcaggaagaatggctattcaaatggatggtgcttggcgttcattctggcaaggattagtagataaaattcctgctcatcgttttgaatttttacaaatggctgaagttgtaagtagtttcacaactggtggtgaccgtgctttagttcgttcagttgaaaactttgaagactatatgacttttggcgcaaaacaagtagatgaagctgaaatgaaacctggcgatgtactagttgcattatctgaatgtggactttcggcaagtattaatggttctgcagtacgtggttatgaattaggtatcaaaacatattatttattctgtaatccagaagaaattttaagaaaacaccttgatcgtgctcgtaaagtatttgaatgcttagatgaatatcaaagcaataaagctaaaggtatcgacaatggtaaatatatcgttaagattccgctatttgttggtaacatggctgtttctggttcaactcgtatgcaagtaactactgttgaattattagctgctggtgctgctcttgaagttgccgcaaaccgttggttaaaagaacatttaacagaacaagaattatctgtagttaattgtgaaatgattgacttaaatgcttatgcagatgcatttgtatcattaaataaacaattatcaagtggtaaagctttaaaaggtcttgctaaagcagttgactttgaagttaatacttacaatcaaaaaggtttagtaacttatattactcatgattatctattagatataatgacagatactactgaacgtcaaccaacattcacattacctccattcagaaaattcgctgatcatacaagtgaagtttcttgggcatatattaaggatcctctatatcctaatgaagttgcatggcaacaagtattccgtcgtccaattaaaggtctagaatggactaaagaagattatatcgaaatgaaagcaagccaagacatcattaataatcctccactagtaagtggtgatgaagttcttgaatatgatattggtaacaaagatgatccatcaagatactctcgtccttgctcacaattagtattaatcgatgttaatggttcagctactcctgaagttgttgcatggtataacaaagaattaactaaatatagtggcggtatcgtattacgttttggtcaaattcctgcagctaagatttctaaagatgaaattagaattcctgttgaattaccaagaacttgcacagatattatgtatcacttattagttaaagttgcattcaatgctttatctactggtacaatggctaagatgggtagagtatttggtaactggatggttcaagtattacctacaaataaaaaattaatcgatagatcatcaagaattattgcaagtcttgcaaaaattccatatgaaaaagcagttgaagaattcttctattcttactacaaccgtaaaccagaagatgaatatcgtgaatcatatgtagttgaaacattaaaacgtcttggatttgatccaaacgctgatattaagtaa

SEQ ID NO: 1374 - DNA, 1122 bp, Unknown
  Unknown gut bacteria
atgaaaatattattgttatcttgtaagactggcggaggacatgacgctgcagcaaacgctctaaaagaacaatttgaaaaaatgggacatgaagcattcgtttttgattatttgactttagctggcgaaaaagttgctaaaagagttgccaatgtttatgttaaaactgttcaaaaaatgcctagtgcatttggatgtgcctacaatgttggaatgtttatcagcaagcgtaccaaaaaatcaccagtatatttagttaaccaaaaaatggataaatatctagaaccttatctagaagaacacccatatgacgcaattgttatgacccatttatatccagccgaaactttaacttcaatgagaagaaaagaaggtgctaaattacctccaatatttggcgttttaactgattatactttaacaccgttttgggaagaaactgaatgtgacgaatacattattcctcataaagatttaatggatgaatgcgttagaagaggtttaccaaaagaaaaacttcatccctttggaatacctttttcacctaaaatacttgcaccatatagtcagatcgaagcaaagaaattattaaatttagatgaaaataaaaaagtaatcttgttaattggcggaagtatgggagctggtaaactcgtagcacttaccaagtctttttcaaaagaggaaagaataaatgattttcaagtaattgtaatatgtggcaataatgaaaaaatatataataagttagtaaaaaaatataaagacaatcatgccttcgtaataatgggacatactaaccaaatgccaattttaatgaaagcatctgatattgtatatacaaaaccaggtggtcttacttcaactgaaacagttgccagtagaaaaccaatgataataacttatccaataccaggatgtgaaaatgccaatcgtgatttttttgtatcacataatatggcattatcagctaatactccagatgaattagtaaaagttggaattgatttattagatgacgatcgaaaaatcgaggcaattaaagattctcaacgtatcaacattgatgaaaatgccacggttaatattgctaactttatattaaactatttagaaaaataa

SEQ ID NO: 1375 - DNA, 1482 bp, Unknown
  Unknown gut bacteria
atgagacaaagcggaatcttactaccagttacatctttacctagcccatatggtattggaactatgggcaaaaccgcatataattggattgattttttagaaaatgcaaagcaaagttattggcaagtattaccacttggtccaacgtcatttaaagattcaccttatcagacttttagtgcttttgcggggaacccatatttaatagatttagatatgctagtagaagaaggtctactagaagaaaatgatttaagtgaatatatgacttctgaattaactattgattatggtttattatatagttggcgttttaaaatattaaaaaaagcttatgaacgctttgatgaaaatgatgaagattttaaagcatttaataaaaacgaatcatattggttaaatgattatgccctatttatggccataaaaaattattttcaaggtagatcatggcaagagtggcctaacgaatttaaattaagaaaaaaagttgctattgataagtttattaaaggcaatgaggtagaaataaaattttataaattcattcaatttattttcgcaaagcaatggcacaagttaaaagcatatgcaaacgaaaaaaaggttgaaataattggtgatgttccaatttacgttgctcttgatagcgtagatgtttggtctaaccctgaagaatatcagttagataatgacttaaaacctaaaagagttgcggggtgcccacctgatgattttgctaaaaaaggtcaattatggggtaatcccttatatgattatcacaagatggagaagaataatttcaaatggtggaacgcaagaattaaaaaatcatttgagttatatgatgtagtaagaatcgatcactttagaggttttgaatcatattattcaattgatgctttagaagaaactgccgaaaatggaaaatgggtaaaaggccctggcatgaaattatttaaatcaataaaggattgtaaagacttacatatcattgcagaagacttgggtttcttaaccccagcagttcataaattacttaaacaaacgggatttcctggtatgaaaatacttcaatttggtttcgataaagatggagatagcccatatgcaccacacaattatttacctaactgtatagtttatactggaacacatgataatccacctattagaacttggtttgaaacgctcgataaagaaactaaacacatggtaagtgaatatgttaatctaacaagtgatgataaaatatgcgatagaatggttagattagcgttgtcaagtgtagcgaacattgcaatcattccgattcaagattatttaggacttggcattgaatctagaattaataccccttcaactagtgaaaacaattggcaatggcgtttagatgaaaaatatataactaaagaattagccgattatatattatttttaacaagattatatcgaagaactaattttaaaatagaagtttaa

SEQ ID NO: 1376 - DNA, 1143 bp, Unknown
  Unknown gut bacteria
atgaaaaaaattgatgaattagtaactatcttaaaagaagccaacgagaataatgtttggcataaaaccataaccgcatatggttatcaatttgattatgatactgttgtgtatgctagtgtatcaaaatattggtttggcaaaaatgagatagaggaatttatatgtccactaaattctgaaagtgacaataacaatagacctggaactaaaaaagaaagtacagaatatataactgttcatgataccgcatcttcaaaagataccgccgatgaatatgctcatgcaaaatacgtaactaatggtggtggtggcactagttggcactattcagtaggttcaaaaatggcatgccatcaagtacctgatgatgaggtagcatatcatgcgggggactcacttgatgtaagatttgaattatttaatactaatgtttcaggaactaataaaaaccctactattactataaatgatggcttttattatattgatggtattaaatcatcaataaaagtacctcaagtaagttttgaatatcgaaatgatgaattagtatatgcatcagatggcgtaaaacaaggaagaaaagcccctaaagatgccaaagaaggaagaactgatattgttttgactactgccgatataaatgatgccggaataagaatagatctaaagggtgatggatattattatattggccctacatattacaatgctagttttggaaaaattgctaatcgtggtgggaacttaaatagcattggtattgaaacaatgattaatcaaggttcaaacttaatgagaacttggcaccgttgtgcaaagctagttgctaatttattggttgataataacctagatccatcaagagttaaaccacatcatttctttagtggtaaaccttgtcctaatacacttagaactaatggattgtggaattattttatggaatgtgtaaatactgaatataaaataagaaaagactttagtgatataaaaattgaattaatcaatcattcgcaaggattattagaagatggcttaattgatcaagatcatcttaataataatgtatcatatacagttaaattaactgatgataaagaaactagaataattgaattacacaataaggttgaatag

SEQ ID NO: 1377 - DNA, 2586 bp, Unknown
  Unknown gut bacteria
atgaaaaaagcgttaataaaagttttaggattaattgtttgccttctattaattggttgtaccgaagaacaattaaaaactcgttataccgttgaatggattggctttaacgatgttatgatagaaaagaaaatatataacgaaggtagtaaactagattatccaacaccaccaacaattgaaggatatacttttattgggtgggataaaactattaaaaaggctagcgaaaatgtcgtaataaaagccatttatgaaataaatacttatacaataaaatttgttgatataaataatgatttgattttagaacaaaaattaacatataaacaaaaaataatatatcctgaagaaccgactattccaggatatgaatttattggttgggataaagatgttaaatacgcaacaaaagacttaacgataaaagcagagtatataaagcttacttacaatattaagttttatggtataaatggtaaattaattgatacatttgatttatcatatggctcaccaatctactaccctactcctcctcaggttgatggctatcagttcgtaaaatgggataatgaaccagaatttgtagaaggtgatgcagtaatcaacgcaatctatacaagaattgaatttgaatatactaattattcaagttatgttgaagatcttactttagatgatcctcaagatataaccgactttatttctaaaattgattatttaaatgatttaattggcgaattagatggtataatatatggaaaatttagaggtgaaaacgaactacatgcttatgatgtaagtaactatcgtagtcgcaactcatatggtcatgaaattgcaataaacaagaatggcgttgttattgcctcaagcactctagttgatttaccaactgatggactcattatatcaggccatggtaaagctggcgatagtttaaatagtaatgttaaagttggcgattatgttatttatgataaagaaaatggtacaataaaaatatatcgtagtgaaaaagttcaaagaatagttacagcttatgaaagaatgaaatcagctaaaactaagattattgatgcatataatagctataaagctcttgattatcaaaaattaaaccttaaatattttgcatcacttgatactttaaataaaataataagtgatggttaccaagatggattaatgaaaacattagaattgttagtagttgaattacattacctagcaattgaaagcaatgttattgaaactaaagccttttggcattatgcaactcgcgcaaccggttatcctgaaaaaacaactagtgaagtatgtaactttcttgataaagtaagtgaaattggaattaacaccatttatctaaatactaactttggtggtgcttgcctatatacatcacaatatctaaaaaatagaactacgggaacatatacttatgaaggttataaggactatttagaatgttttattactgaggcacataaacgtaatattagagtagtcgcttggactaatacttttatttgtggcgatggctatttacctaactatattaataaagattatgttgctattgattataatggcaaaaataattacaatggtatgtatttttatgatataactagaagtgaagtaaagactctattaaattgtgtatttgatgaattagccgcaaattatgatttggatggtatcgaatttgattttattaggtaccccgcaagcaacttattgtcatttactgacacaattaccgatattactaaactaaatgatttttgctatactgacagttcaatcaacttatttaaaggaaaatacaacatcacaggtgatgttaaaacattaatgcttaatgatgaaaacattagaaaattatggcaagaatttaaagtaaataatgttactgaaatggtaaagatgttatctagcaccataaagaaggctaatcctaacactaaagttagtgctgctgttatgacaagtataagtggcgcaataaaaacatatgctcaagatttcttaagttgggtagaagaaggatatgttgattgtttagaaccaatgatgtatgtcggatcaaattcgtatttaatgacaagacttgcaagttttgttgaattgattaatggtaaagctgatatagtagttggtatatcaccagataataacggtggtgatgtaattactttgagtgaccaaattgctattgttttaaattatttaaatctaggctttagtgaattttcttcaagaaacatttttaaaaatgaagaaatcttgttaggattaagtagttgtaagaaagattataccaagacacaattggcaaccaaagatgaaataaaaaaagcatatctaaaaaaactattagactgcctaacaaattattatcaatatgttgataaagcgatagatatggctacttttaaagaagcaataaatgaagcatactatgatactaataattttagtaaattagtgttattaataaatgaaatacaaaatgaaaatattaaaaataaattactagcagagtataacaatattgctagaacaataggagaatga

SEQ ID NO: 1378 - DNA, 504 bp, Unknown
  Unknown gut bacteria
atggaagatagaattgcaaatattaatatgaccattaataatgatgatgattttttatcacatttttgtgaaactggaaaacctttaatttctaccgaacttgcagatttcatagaaaatagcgctaatgattttcatccaaatgaaaaactatcactaaatatctacagtaattgtattacagatgatgaaaaagtaatatacaaccaagcaattaagaattattttcaattacaattaaaagatgtaatccgttctttaaaacaaaaaagaataattgcgatatctttttcgattgtcggtattattgccttggcttttatgtttatttgttctaacatgggaatcaaacaaatttggatagaatgtataaatatatttgcttgggtatttatttgggaagcagttgatttacttttcattgaacaaaattctttacttattagaagaaagcgattgataaatttcattgaaatgagcattaactatcataatacgcattaa

SEQ ID NO: 1379 - DNA, 3549 bp, Unknown
  Unknown gut bacteria
atgtctaaaaaagttttccaatctatggatggtaatcaagctgccgctcattgcgcctatgcttttaccgaagtagctggtatctatccaattactccatcatcaccaatggctgagtacgcggaagaatgggcatctaagggtaaaaagaacctatttggtatgcctgtaaaaattgttgaaatgcaatcagaagctggtgcagcaggatcagttcatgggtcattacaaactggagctcttacaactacatttactgctagccaaggattattattaaagattcctaatatgtataagattgctggagaattattaccaggtgttatacatgtttctgcaagaagcttagctgctcaagcattatcaatttttggtgatcatcaagatgttatggcttgccgtcaaactggttttgcgatgcttgctacatcatctgtacaagaagttatggatttagctggtgttgctcaccttgcagcaatcaaaacaagcgttccatttatgcacttctttgatggatttagaacttcacacgaaattcaaaaagttgaagttatggattacgaagtatttgataaattactagatcgtgatgctgttagaaatttccgtgaacgtgcattaacatttgaacaccctgtaacaagaggttctgcacaaaacgatgatgtttacttccaaacaagagaagctcaaaacaaattctataacgaagttcctgcagtagttgcagactatatggctaagattagtgaagtaactggtcgtaactatgcaccatttgtatactatggagctgaagatgctacagatgtaatcgtagcaatgggttcagttacagaaacaatcaaacaagttgttgattatctaaatgcaaaaggtagaaaagttggttgcttaacagttcatctatatcgtccatttgcaaaagaatatttattcaatgtaatgcctaagacagttaaacgtgttgctgtacttgacagaactaaagaaccagggtcacttggtgaacctctatacttagatgttaaagctgcatactatggcgtaaaaggtgctccttcaattattggtggtagatatggtctatctagtaaggatactacacctgctcaaatgatagctgtattcgatcatttaaagaaaaatggttttgatggcttcacagtaggtatcgaagatgatgttactcatttaagtattcctgttggaaaagaaattaaattacttgaaggtacttctgaattagtattctatggtcttggtagtgatggtacagttggtgctaacaaaaatactattaagattatcggtgataacactgatttatatgcacaagcatactttgcttatgactctaaaaaatctggtggtgtaactcgttctcatttacgttttggtccaaaaccaattactgctccatatttagtaagtcatgctgacttcgtaagttgcagtcttgaagcttatgtagaaaaatatgatatgttaagctgcttaaaagatggtggtacgttcttactaaatacagttagaaacgcaaaagaattagaagaacatctacctaattcattcaaaaaacaattagctgaaaaacatgctaaattctacattattgatgcagttcatctagcacgtcaaatcggtttaggcggaagaactaatactattttacaatctgcattcttcaaattaaatgaacaaatcatgccttatgaaacagcacaagaattaatgaagaaatatgctgcaaaaacttatgctaaaaaaggtgaagcaatcgttcaattaaactatcaagcaattgaaaaaggtgcagaaggcttagttgaagttaaagttaaatcagcttggaagaaacttccagtagaagaaaaagttgtagatgaaaatcgtcctcaatttgttaagactattgctgttccagtaaatgcaattaaaggttatgatttacctatttctgcatttaatggttatgaagatggtacaatgcctaatggtacttctgcatatgaaaaacgtggtagtgctaacttcgtaccaatgtggaatcctgaaaactgtattcaatgtaatcaatgttcattcgtttgtccacatgcagtagtacgtccattcttagtaaatgctgaagaagctaaaaatgctcctgaaggtgttcaatatttagcacctactggaaaaggctttgaaggtcttcaatatacattacaaatttcaacacttgactgtactggttgcgaagtttgtgttaatacttgccctggtaaaaaaggtgaaaaagctcttaagatggttcctatctctgatgctcttgaagctggtcaagcagttaatgctaaatacttctttgataatgtaacttataaagaaaacttagtagataagatggcaaatcctaagaacagccaatttgcacaaccattatttgaattctcaggtgcttgtggtggatgcggagaaactccatatgttaaattagttactcaattatttggtgatcatatggtagttgctaacgcaacaggatgttcatcaatttatggtggtagcttccctgcaactccatatacaacaaacaaagaaggtcgtggtccagcttgggctaactctctattcgaagataatgctgaatttggtttcggtatgttaaatgcaagcaatgcattacgtgatcaaatcgcaactcatatggaagaagcattagaagaatgtcaagattgtggtgatcgtgttcatgaattatttaagttatggcttgaaaatagagaagattacaaagtaacaagagaagttgctaacgaacttgttccattactaaaagataaagattgcccacatgcaaaagcaatctacgaattaagagatcatttagttaaacgttctcaatggatctttggtggtgacggatgggcatacgatatcggttacggtggattagaccatgttatcgctaaccaagaagatgttaatatcttagtattagacacagaagtttactctaatacaggtggtcaatcttctaaatcatctcctacagcatcaattgctaaatttacagctgcaggtaaacatggtaagaagaaagacttagctgctatagcaatgagttatggacatgtatacgttgcttatgttgctcatggtgcaagccaagctcaattattaaaagcaatgcgtgaagccgaaagctatcatggaccatcaatcgtaattgcatactcaccttgtatcaaccatggtttaaaacgtggtatgggtaaagcacaagaacaagcaaaacttgctgttgaatgtggttactggacattattaagatatgatccacgtcttattgcagaaggcaagaaccctcttcaagtagactctaagactccagattgggatagatatgatgaatacttaatgagtgaaacaagatatgctcaattaaagaacatcaaccctactgaagcagatgctcttcttgcaaagaataaagcagaagcaatgagaagatatacaagctatcaaagatatcttgaaatggatttctctaaataa

SEQ ID NO: 1380 - DNA, 927 bp, Unknown
  Unknown gut bacteria
atggaacaaaatcaaaacgaattaaaccaaaatgaattaaatcaaacaaatccagtggaggaaaagaaaaacagatttgttaaatttatggatgacaaattaattaaagcattatttattttattaatatgtaatgcatcattaacagttttatcatctataatggccgggaataatattttatctttagcacttgatgcaacattcccagtacttttcactgtatttttaggattggcaattaatgccaaaaaaagaggtagtgatgatttacaaaaatcaatgaacgctatcgcagtaacttataaagtatacgcaattttattatgggtattgctagggatagtaatcattgcattactatatgctttatctgcaactgatattattagaaccattcttgttgaatctggtggaaatcaacaggaaattgatttatttttatatgtatatagttggattatggtagtagtgttagttgtttttgtaatagctacagttatcataacaatttataatgttaacttaatgaaagtgttaaagggcatggcagatgcagctaaaactggcgaacatagatatggtaaatacataaaagtaactaaaatattttcactaataatgggtatatttataggccttaatgccctttataacatttcaaagatgtttgatatcgcttcttgggaaactacaatacaacaatatgccgaaatgataaaagaagcttatggagtggatatatctgcttatttaagtgcaagtagtactgccttaggcgtaattaatgtcttatttaatgccgtttctgccgcaatctacattttactttatgctatcttaaataaagttgaaactgaacttgttttaaatcaaggaccaacatcagttagtgattatagtactaaccctatgaatccattttaa

SEQ ID NO: 1381 - DNA, 1197 bp, Unknown
  Unknown gut bacteria
atgtataaaataatggcagtaaatgcaggtagttcatcacttaagtttaaattatttgaaatgcctgaagaaaaagttattgcggaaggaatatttgaaaaaattggtttatctgatccattgttcaaaatcaaatatggaacaattgaagaaaagcaaagagtagatattaaaaatcaccaagatgcagttgaaatgttattaaaagttttagtagataaaaagattgtatcaaaattagaagaaatctctggtgtaggtcatcgtattcttcattgtggtgagttctataatgattcagttttaatgactgaagaatcaattaaaaatgttgcttctgtcaatgatttaggtccattacataatcctgctaatttaatgggtgtagatgcgtttatgaaagctttacctggtgttccaaacgtaggtgtatttgatacatcatttcatttaacaatggaaccagaagcatatatgtatgcagtgccttatgaatggtatacaaaatatggtgtaagaaaatatggtttccacggaacatcacacaaatatgtttctaaagaagctgcaaaattcttaggaaaaccaattgaagaattaagattaattacatgccatatgggtaatggtgttagccttgccgcagtaaaatatggtaaatgtgtagatacaacaatgggtcttactccacttgatggaacaccaatgggaactcgtagtggtacacttgatcctgctgttgtaagttttattgcaagtaaagaaaacttaactgctgtagaagtagtaaatattttgaataaaaaatcaggatatcttggtatttcaggaatatcaagtgattcaagagatttaagagcagttgaagatacaaatgaattagccgcattggtattaagaatgcaagaaaagaaagttgcagattacattggtagctactatggatatatgggtggtgcagatgcaattatctttactgctggtatcggtgaaaattcttcagaaacaagaaaagctatttgtaatagattagaagaagcatttggtatcaaaattgatgaagctagaaatcttgccgcaagaggtcataatgcattaatttctgcagatgattcaaaaattaaggtattagtaatacctacaaatgaagaaataatgattgcacgtgatgtaatgcgcattggcaatattaaataa

SEQ ID NO: 1382 - DNA, 1245 bp, Unknown
  Unknown gut bacteria
atggataataaaacaaaagaattattaatcgataaacttgcaacattagcagttagagtaggtgctaatgtccaaaaggatcaaattttagttatatcatcaccactacacgcaagtgtactagcaaagaaaatccaaaaggaagcatatcttgttggcgcaaaaaaagtatatatagattggaacgatgatgaattaactagaaactattatacatatgctaaagatgaaactttacaagaaattgaagattttcaactagcaagaatggaatattttgttgaaaataatgcatgtagaatttcaattgactcacgcaatcctcatggtatgagaggagtagatatgggaagagtaatgcttgcaaatagggcaataggacctaaaacgcactttttccaggaacattatggatcaagtaaatcacaatggaccattgttgcataccctaatgacgaatggtgtaaaacggtttttcctgacctccctcttgatgaagcgtgggataaactatttgaagctataatgtatacatctagagtaagtattgacaaagatccagctgaagaatggaagaaacatacaaaaatcctagaagaccatagtaaaattatgaatgattataattttaaaaaattacattttaagaaccaacttggaactgatttagaagttgaattagttgaaaaccatatatgggcaggtggtggagaaaatggtggcaatggtatttattttgttcctaatattcctactgaggaagtattcacaatgcctcacagaaatggcgtaaatggtaaagtatttagcacaaaaccattaaattatcaaggtaatttaatacgtgatttctattttgtattcaaagatggtaaagttgtagactataatgcaaaagaaggatatgaagcgttgaagagcttagttgaactagatgaaggttcatcaagacttggagaagtcgctttaatttctaataattcaccaatatcaaatttaaatatattatttaatgatactttatttgatgaaaatgcatcttgccatttagcattaggaaatgcatattctatgaatgttgttggcggaactacaatgagcattgaagaattaaaaaagattggctataatgtttcaattacacatgttgattttatgtttggttcagctgatatgcaaattgtcggaacaactcatgatggaaaagaagttgtaatatttgagaaaggaaattttgtgatataa

SEQ ID NO: 1383 - DNA, 1410 bp, Unknown
  Unknown gut bacteria
atgtatacaaataaattttcaaactatttaaaaaagaaaaaagaactcatcaaagagttaataaaaagactaggcgaagaatttgaatatgccagttgcctagctactgatgttaaaggaacatcagtaagagtaaataaaaacgttactagcgttaatcctagttcattaaccgaatcaggatttgtaattaaagtaagaggcaaaaacttatatactgaatattcaattaacgaaattaatgaaaaaaatttagatgaagttgttgaaaaagtaaagagtttagctaatacatcatatacatcaacaattgtaaattctaatcttatagccgatgaaactcttcaaaaagcttttgttagaaaaaatcctggtaaagattacaaagtagatgaaataattgatatagctaaaaataaagtaaatgaatacttaaaaaaaggtcaaaagttagtaaatataaacttagcagttgaatgtaatgaaacatctaaaatgtttatatcgaaacatcgtgaattaacgcaatattatacatggactaatgttacgtgcttagcacttgccaaggaagaagataattttaaagattgctatgcaggtaatggatatcctagtttagaagaaggtataaatgatattgataatttattaacttacgcaacaactacagctgttttacttttgaaagctaagcctcctgttcctggtgtttatacggttattactaatccatcaattactggtttaattgctcatgaagcatttggtcatggtgttgaaatggatatgtttgtaaaggatagagctaagtcaaaagaatatattaataaatatgttgcttcagaacttgtaagtatgcatgatggtgcgtcttcaactctatcagcagcttcatacttttttgatgatgatggtgtgttagctcatgatacattaatcattgataagggtgttttaaaaactggtatatctgatgctttatcagctgccgaacttggtactatacctactggaaatggtcgtagacaatcatacaaacgtaaggcatacactagaatgactaacacattctttgaaggtggcactaacactttagaagaaatggttgcaagtgtagattatggatatatgatatttgatactaataacggtatggaagatcctaaaaactggggtattcaatgtaccgcattatatggtaaagaaataaaagatggtaaatttactggtaatatcatttctccagttgtaatgagtggatacgtaattgacttattaacatcaatcagcatgatttctaaagacatagttgttaccggaagtggctcatgtggtaaaggttacaaagaatgggtgcgcgtaagtgatggtggagcatgcttgaaagcgaaggtgaaaataggatga

SEQ ID NO: 1384 - DNA, 4002 bp, Unknown
  Unknown gut bacteria
atggttatatcaataataccaaataagactactaacgctagtggcacattagtagggataacaacaagtagtggtagtgatttaacctatcgtaatagcactgaaaaagtttatagattgtctgaatacaattacccaacaaatcaactaagagctgcttgggttagtcattttgcgggagacgttcaaagttatcaaaatgaaagtcaatataaacaaatgatgacaaccgtaatggataatatggtaagaatgggaatgaacgcaatgatttatcatattagaacccataacaatgccatgtacaattcaaaattaaatcctcgcgcaagatggtgggccaatgtagattttgataaatttgatcctcttgaatggttaattagtgagtgccatagtagaggtattgaattccatgcttggcttaacccttatcgtgtttcaactaatggtgataatccttcaaatagcgtaggaagccttccaagtgtaaatccagctaataatcctgataatttaattacagtaggaaatagtattattcttgatccgggtattcctgaagtaagagattttattgttgatacatgcatggagattgttgaaaactatgatattgatgctattcactttgatgattatttttacattagtggagcagatgattctaaaacccgtgaaaaatataacacagaaggtttatctttaggtgactttagaagaaaacaagttgatttatttattgaagacttatcaaatcatttaagatcttataatactacaaataatcgctgtgtacaacttggtatatctccttctaatgtatatagaaatggtggctattcatcaactccacgctatgatgaatcaggtaatttaataagcccactttattctaatacaggaggttttgctcactatgatgattatctatatagtgatacccttaactggataaatcatgaatggatagattatattatgccacaatgttaccactctttagaaaacaaatatgcaccatatgcagattgtatcagatggtggagttgggctgttagatataaaaaagttaacctatatgctggtcttggaatatataaagcactagaagatgatgccacatggaaagctcataccgatgaaataaaattacaattgctagtttctgcacaatatgaagaatttaaaggtgcatctttttataaatatgcatcgttattaaaatcatcaaatagtgtagtaagtgatgcggtaaacacaatatcaaatgattattggaagaaacgtattccaggggcagttattccttattacaaatcaaaattagctaaggttgctcctgaaaatgtaaaatttgatagtggtgtaataagctgggatgctgtagataatgttagaggttatatggtatataaagttccagttgatagcgttcttgatcaaaataattatgattatatatatcaatatactacttcaacttcagttgtgactgataataatgttagttacaactactatgttgctagtgtaaatctagccaatgaggttagtaatccagtattagttaatttagagttatcatatgtcgccgcaatcaaaatgattaatgatttaccttcaactgttacttatgaccaaaaagcaaatattttacaaataagaaaatattatgaatcattgtcagatgaagataaagcaaaagtactaaatattgacaaattagtagaggcagaaaaagttattagtagatatgatgtattatcaaataaattagatatatatataaatagtattgataaacatattaaaactgaccgtgttttacctactgatacatatattacgttagcatataaaaatactagtgatgctgaaaaatataatttaactacaggtaaaaggctaaaagactatcttgcaaaaacatatattacaattatcgcaacaattgaatatgataatcttactttatcaaaaaactttgatatcaacattggttatgttggtgaaaaccaaaatggtttattctaccgtaatgatccaagtagtatgagtgaagtagatgaaggtgaatgtggtgtaggtacaaccaaacacattggttggtcaggacatactgtagttgttaataataatgtcttatttattgctaaagacaattactttgaaataaatgatgctagtcaaataactagatgtaactgggtatcagttgctggaacatatgtaaataaaacgggtgctaagttaagttttacaatgggagatgcatttgaaagtagatctagtaataatgatggtttcttcataatttctaataataaaattaaagaaatatctgcaggctttgatagtactaaaacaatcaaccttgaaaatgatgaggctgttgtaattgttcgttatttagattcaaccattgaagcttcaccacttgtaccagttactcaacttgaagtaggtactaaagcatatattgatgaagaaacagtagcttccgatgaagaacttgctcaagtaattattaaattaatcaatgatattgaaacaccaattaccctttcaagtgaacaagctattctaaaagctaaggctgcatatgagaatgcaactcaatcagtaaagagtttagttactaatagtaacttgttagatacttattataatgaatacttaagactaaaagctgaaaaagaattaactgattacaaaaacactaagaaaaatcaactcaagaattccgttaatttaaatgattatagtagtgctaatcaagcaaaaataactgacattataaatgaaactctaaacttaattgattcatcaacaacaacagttgaagtagataataacattaaatcagctaccgaaaagatagctaagattaaaactattgcaatagaagaaaaagaattacaagactatcgtaatcaatatatccaaaaaattgatgatttaattgcttcatatgatgtaagtgatgcggttagaaaagagcttaatacttatggtgataagttcaaaaaacaaattcaaaatgaaacatcatactcagaaattaactacatctatacaagggtagtagcaactttacgagaatattttgaaaatgctgaaattgccaaaaatgaggctaaaaaagcaattgacgattatgttgcagaacttaattatagccaaaaagaaatggctgagattgctaaaaaagtaacagttacaaaagcaacaattgatgaattagcatctatttcagaaataagaaattaccctgaagtatttaaagaagaagtaactgatgctcataataaactacaagcaaaaattcaagaaaatattggtaaattaaatgaattaccacaaagttggtatagtgataatcaaaaccaagcattaaaagaaataattgcaaatgcaacaactttactaaaagaagctggaacaattgaagaagcagacaagataactgaagattatttagaaaagggtaattcatatataacagagttaagaaataaaattgatgaagcccaaaaatattttgaatcaaagaaaatagcatatttaccaataactaatttagttaacctaactaagaaaaaagtatttgaagttgcaacaattgaagaagttgttgaaataactgaagaatttgatacaacatataatgttttatattcagaatatcttgattcactaaaggtaaaagtaacgtttagtaatgagggtgctttaaaaattgttaaaattgaaaaagatacatgtattactaaaccggttgatccaactaaagaaggttatacattccttggatggtataatggtgatgaattatttgatttcaatcaaaaagttactagtgatattcaactagtggcaaaatgggaaaagattaagaaaaacaattgtaatggtaacgcaataatcttaagatatgttgcaatactaatatgtttatcaatgtcaattgttgtaataaagaaacatgcgtttagataa

SEQ ID NO: 1385 - DNA, 627 bp, Unknown
  Unknown gut bacteria
atgtcaaaagtaacaatttttaatcatccgcttattcatcacaaattaacaataattagagatgaaaaaacaaacacaaaagattttagacaatcagttagtgaaatagctaatttgatggcatttgaagtaacgagagatttaccagtaaaagaagtttacactaaaactcctattgctgtggcaaaaacatatacacttgattgtgaagttgtaattgtaccaatcttaagagccggtcttggaatggtagatggaatacaaagtttaattcctactgctaaaattggtcatattggtttattcagaaatgaagaaacattagaaccacaactatattatgcaaaatttccacctactctaaaagaagcaacagttttcttagttgatccaatgcttgctactggtggaagtgcagttgcagctattgatatattaaaatctcgtggagctaaaaaaataatttacattggaatcgttggtgtaaatgaaggtattgaaaatttgcaaaaacatcaccctgatgtagatatttatcttgctgcaaaagatgaaaaattaaacgaaaatggttacattgtaccaggacttggtgattgtggcgatcgtatttttggtacaaaataa

SEQ ID NO: 1386 - DNA, 1035 bp, Unknown
  Unknown gut bacteria
atggctgataaagcaaaacaactaaaaatagaagatattgaaccatcaaaagattctgttaaagaaaaagcattagctgatgccttgaagtcaattgaaaagacttatggtaaaggctcaattatgaaattgggtgatgctaatttagaaaaagtagaagttataccaactggttctatcacattagatattgcacttggagttggtggttaccctaaaggaagaataattgaaatatatggacctgaatcaagtggtaaaacaacttttgcattacatgcgattgcagaagcacagaaaaaaggtggatatgcggcatttattgatgcagaacacgccctcgatcctgtgtatgccaaagctcttggggtagacacagataatttaattttatcacaaccagataatggtgaacaagccttagaaattgtagaggctttagttagaagtaatgctgtagatataatagttatagactcagttgcagctttagttccaaaagctgaaattgaaggagatatgggtgatagtcatgttggcttacaagctagactaatgagtcaagcaatgcgtaagttagcaggtattatcaataagagtaaaacagttgctattttcatcaaccaaattcgtgaaaaagttggcgtattgtttggtagtcctgaaacaacatcaggtggtcgtgctcttaaattctatgcaactattcgtttagatgtaagaagagtagatcaaattaaacaaggttctgatgcaattggtaacttaactagagtaaaagttgtgaaaaacaaagtagctcctccttttaaaacagctgaagttgatttaatatatggtaagggaatttcacatgaaggtgaagttttggatttagcaactaatttagatatagttgaaaaatctggtgcttggttttcatataatggtgaccgcttaggacaaggacgcgagaatgtaaaagaattattgaaacaaaacccagaacttactagtgaaatcgaacaaaaagttcgtgaaaaaatgttaggataa

SEQ ID NO: 1387 - DNA, 1722 bp, Unknown
  Unknown gut bacteria
atgcttaaaaaattattcaaaagattaaacaaatatacatttttaataattgttattcttgttttagcaataattaatgtaatgactacactagccatcccaattttaattggtgaagcagttgatcttattgttggtgtaaatgatgtagattttgaagcgattaaacctattttaggatatattgcaatttgtatagtagtttctaatttattcggttatttatatgaatacttaatgtcaattgtttcagaaggtttcattctagatcttagaaaagaaacttttaataaattaacgtatttaccactttcatatatcgataataaaagacaaggtgatttagtaagtttattaatatctgatattgaacaagtttctaatggtttattacaagggtttaaacaattatatcgcggcataattatgataatagctactcttggttttatgttttacattaaatggcaaattgctttaattgtagttggagttaccccattatcactatttgttgcggcattcatttctaaaaaaagtcatacatattttacaaaacaagccaaagtaaaaggaatcttaagcggttatgttttagaaatggtaaccaatcaaaagaatgtaaagagtatgtgctatgaagatagagcaatcgatgagtttaagaatataaatcaagatttatataatgttggtgttaatgctcagtttgtttcatcaacaactaatccaagtactagatttgttaatggattggtgtatgctttagttggaattgttggcgcaatttttgtaatcattaatcccgtaggctttcaaattggtcaattgtcttcattcttgtcatatgcaaaccaatataccaaaccctttaatgaaatttcaggagtaattagtgaagtacaatccgcatttgcttcctttaagagagtagtgactctattagaagaaccaaatgaggtagatgaaggtactaatgaaatagtactaccaattgataaagttgaatttagacatgttgaattctcatatgtaaaagaacagcagttaataacagattttaatcttacaataaaacaaggtcagaaagtagcaattgttggtcctacaggttgtggtaaaacaacaatgataaacttattattaagatattatgatccagtatctggtggaatttatattgatgacgtaaatactttggacattaagaaaaatagtttgagaaaagcatacggtttagtattacaagatacatggatatttagaggaaccgtccgtgaaaatattgcctacgcaaaaccagaagcaacgcttgaagaagtcattgaagcagctaagttagctcatgcacatagctttattaaacgtcttcctgatggttatgacaccgttattagtgcaacaagtggtttatcacaaggtgaaaaacaacttattaccattgcaagattgatgatgactgttccagatgttgttattctggatgaagcaacttcttcaatagatactcttactgaacaaaaaattgttgaagcatttaattatataatggatggaagaacaagttttgtaatagctcataggctttcaactattcaaggtgctgatttaataattgttatgaataaaggtaatattgttgaggttggtaatcaccaagaattaatcaagaaaaatggattttatactaaattatataatcaaggtattgttgataattaa

SEQ ID NO: 1388 - DNA, 1479 bp, Unknown
  Unknown gut bacteria
atgagggcttttgccctcattttttattggtttatacaaaaaataaaaaaggagaaagaaatgtcacaaaacaaaaaattaattttagatgccaaagataggccatctacaggtaaatggattgcattaagttttcaacatgttttcgcaatgtttagtgcaactattttagttccaatgttaacaggtttaccaatttcagtagctcttttcgcttctggtgttggcacactaatttacatcttatgtacacatgccaaagtcccaatttaccttggttcaagctttgcttatatcagttatatccaagcagctacatcttcccttggcacaggatcaattgcttctgctttaacaggtattgttgttgcgggaataatatatgtaattgttgcaattataatttcctttgcaaaagtcaactggttgaaaaaattgttaccaccaattgtagttggaccaacaattatggttataggccttggacttgcaacaaatgctgtacaacaagccggcttttatttcaatggtcaagcatatgattggcgtaatattgttattgccgtgataacaatggctgttatttccgtagtaacattacgtgccaaaggatttctaaaaattgtacctttcttaatcggtattgtcgttggctatattgcaagtattttaatcggtctaattcctaacggcgaagctggatctataattaattttgaacccttaaaagaagttcttagcaacccttcacaatggtttaaaataccagaatttacattccttggttggaaagatgctgatttaggtgctggcatttctatggtaaaaataaatttcagcgctgcaattgcggtaattccacttgcctttgttactatttgtgaacatatcggtgaccatgaagttctaggtagtattactggtaaagattatcttgaagatcctggactacatcgtacattactaggtgatggtatagctacagcctttgctggtttaattggtggtcctgctaatacatcttatggtgaaaatacttctgtagtaggcatgacaaaaattggatcagtgtgggttactggtggtgcagccgttattgcaatcttgttatcattctgtaatatattcacaacccttattgcttcaatccctggagctgtaatgggcggtgtatgcttaatcttatatggcttcattgccgcaaacggtctacgtacattggttgacgcaaaagttgatatgacaaaatcacgaaacttaataatcatatcagttatgttagtaattggtattggtggtggagcattaagaataactcaagatatccaattctcaggaatggctcttgctaccatattcggtgtattactaaatactttccttcctaaagaagtcgaaagtgatgtagaaaatgttgatgaatctttagaaagtgaaaatagttcagaagaaaacaatttaaatgaatctcaaaactag

SEQ ID NO: 1389 - DNA, 1614 bp, Unknown
  Unknown gut bacteria
atgacgaaatatatttttgtaactggtggagtagtttcaagccttggaaaaggtattgttgcttctagtttgggaagattattgaaaaacagaggattgaaagtttttatgcaaaagtttgatccatatctaaatgttgatccaggcactatgagcccgtatcaacatggtgaagtatttgttactaaagatggagcggaaaccgatttagatttaggacattatgaaagatttattgatgaagaattaactaaagaatctacagttacttctggtacaatatataaatcagttttagaaaaagagcgtgctggtgattatcaaggtaaaactgttcaagtcatacctcatgttactaatgaaataaaatcacgtttattgatggccgcaactgtttcaaaagcagatgtggttattaccgaaattggtggaacagttggtgactttgaatcattaccttttttagaagcaattagacaatggcgtcgtgatgttggtgtagaaaatactttttatattcatacaaccttattaccttttgtacgtgccgcatctgagttgaaaactaaacctacacaacatagtgtaaaggaattaagatcactaggtattcaacctgatatgttggtattaagaagtgaagttgatgtaaatgatgaattaaaagaaaaagttgcattattctgtgatgtaaacaaatctgcggtggtaatatcaaaagatgttaaaattctttatgaagtagcgaataatctacataaccaaggaatggatgaatatatttgtaactattttagtattcaaaatacggtttctgatatgactgaatgggataatttaattaaaacaatcaaaaaattatcaggtgatgttaatattaaattagttggaaaatatgttcagttgcaggatgcttatttatcaattaatgaagcattaagacatgcgggatataaatatggtaagaaagttaatattcaatatattctagctgatgatataactaaagataatgttaacgaattattagatggtgccgatggaatcttagtaccaggaggttttggaccaagaggagtcgatggaaagattttagctatacaatatgcaagatgcaataaggtaccattctttggaatttgccttggtatgcaacttgcagcaatagaatttgcacaagacgtcttaaaacttgaaaatgctaattcaactgaactttgtgaagatactgctaatccaatagtagattacttacctaaccaatatcgtggaataggaataggtggaacacttagacttggtgcatatgattgtaaattgaaagttggttcgaaagcatatgaagcttatcagaatgaattaatatctgaacgccatcgccatcgttatgaatttaataataaatatttagaaaaatttgaacaaaatggtatgattgcaacaggaatcaatcctgaaactggtttagtagaaattttagaagtagaagatcatccttggtttgttgcttgtcaattccacccagaatttaaatcaagaccaaatcgtgctcatccattatttagtgaatttatccatcacgctttattaaaaaagaatgggaataatgagtaa

SEQ ID NO: 1390 - DNA, 1908 bp, Unknown
  Unknown gut bacteria
atgtcaaaaaacaaaaaactattaattagaataatagtaagtgctgcaatctacattgtagctattatcttgaaccacttctttgaattagaagaaattgtagatttatttaaatataatctatttactgtacctaaagtaataactcttgtagcttttcttgcatcatatttaatactagcatatagtgtaatttataaatcttttagaaatgtaagtcatggtaaattacttgatgaaaactttttaatgttaattgcttcagtaggcgcattcgctattggtaattacatcgaaagtgttgcggtaatgatattttaccaagtaggtgaattatttgaaagttacgcagtaggaaaatcaagaacttcaatttctaatttaatggatataagaccagaaattgctcacaaagtattagaagatggtactactatagatttagatccaactgaagtagctatcaatgatgttattatggtaatggttggtgaaaaaataccactagatggtgtagttgtatctggtgctacaagccttgatacttccgcattaacaggtgaatcaatgcccaaagatgttaatgttaatgatatggttgaaagtggtacaattaataaaggtgcagttataaaaattagagtaacaacaacttttgaaaattctactgttgcaaaaattttagaattagttgaaaatgcttctaataaaaaaacaaaagctgaaaactttataagtgtatttgctaaatattacactccaattgttgtaggattagcagtagttattacggttattccaagtattattactcatgattttgttacttggttttatcgttcattaaacttcttagttgttagttgtccttgtgcattagtaatcagtgtacccctaagtttctttggtggaatcggtggtgcttcaaaagaaggtattcttgtaaagggaagtaattattttgaagtattaaataaggccaatatctttgtatttgataaaacaggtacattaacaaaaggtaattttattgttaaagaagcaaaaagttatacaaccgatgaagaattgaatttggccgcatatctagctgaaaaagatagtactcacccaattgctcgtagtattataagtcatattggtaatatagaagtagataaaagtactttagaagtagaagaaatatctggtaaaggtatgctagctaaatataatggtacagtatatcttgcggggaacactaaattaatggatgcctataatattgaatatcctaatgttgatgctattggtactattattcatgttgcaactactgaaaaatatttaggctatttcgtaatttgtgatgaaataaaacctgaaagtaaatcattaattagcaagttaaatagcaagggctatcaaacaataatgctaactggtgataatgaaaaagttgcaaaagccgtttctgaagaattaggattaacaaaatattatgcaggtttattaccaaccgacaaagttaacattcttgaacaaataattgaaaataagaataaaaatgatgttgttgcatatttaggtgatggtattaatgatgcaccagtattaatgcgtgccgatgttggtatttcaatgggtcaacttggaagtgatagtgcaattgaggctagtgatatcgtattaatgtttgatagattaatggatattcttaccgcaaaacaaattgctagaaaaacaatgcgtattgttaaagaaaacatcatatttgctttatctgttaaaatcttagtaatgatttacagtattgttgtgcctaaccctatgatgtggctagcaatatttgctgatgttggcgtttctgttatagctatttgtaactcaatgcgagctatgaaggttaatcacaaacatacaatataa

SEQ ID NO: 1391 - DNA, 1173 bp, Unknown
  Unknown gut bacteria
gtgaataacaattttgataatattcctaatcgtagaaacactttttcattaaaatgggatgtttcagaaaatgaattaccaatgtgggttgcggacatggattttgaaactgcaccatgcataaaagaagctttaattgaaagagcaaaacatggcgtttttggctacagcattattcctgatgaattttttgaaagtattattggatggtggcaaagaagacatcatataacttttgaaaaagactggatgattttttcaacgggagttgttcctgccatttcatcaatagtaagaaaaatcactacaccggcagaaaatgttttaatacaatcgcctgtatacaacattttctataattctatttttaataatggcagaaatattttatcaagtgatttagtttatgaaaatggagagtatcatattgattttgttgatttagaaaataaattgaaaaatccacaaactacattaatgattctttgtaatccccataatcctattggaaagatttggagtagagaagaacttgccaaaattggtgagctatgtcataaatataatgtaacagttatttctgatgaaattcattgtgatataactaatccaggaaaggaatatattccatttgctagcgtaaatgatgtttgtcgtgacatatcaataacttgtatagccggctcaaaagttttcaacttaggtggattacaatcagcatgtgtagtagtccctaataagtttttaaaacataaagtagagcgtggcctaaatactgacgaagtagctgaacctaatgcttttgcgatgagtgcaaacattgcgggattcaaatatggtgatgaatgggttagcaaattaaataactacatatacgaaaataaaaaaatattttgtgattatgtaaataaaaatttacctaaactttacattataccatcagaagcaacttatcttttgtgggttgatgtaagaaagtataccgatgatgcaacaactttatgtgaataccttcgtagtaaaacaggattatatgtttgtgaaggatcagaatatggagttaatggtaaagccttttttagaataaatctagcaacttcaaaatataacgtattagatgctttagaacgtttgaaagccggtttagaattatttgaaagtgagacaaaataa

SEQ ID NO: 1392 - DNA, 1515 bp, Unknown
  Unknown gut bacteria
atgaacaaacaagatattattttggagttaattaatgttaacaaaaagtatgatgacagttatgcagtagaaaatttcaatctatatgttaaaaaaggtgaatttatcactttcctgggaccttcaggatgtggtaaaacaacaacccttagaatgatagcaggatttgaaatgccaacaagtggccaaatattattaaatggagaagatattgctcaacttcctcctcataagagaccacttaatactgttttccaacgttatgcattattctctcatttagatgtatatgataacattgcatttggtttaaaattaaaaaaggttccttatgaggttactgataaagctggtaataaagtaacaaaatatcgaaaataccgtagagatgaaataaatgaaaaagtaaaaaaagctttaaaaatcgttgatctagaatcttttgaaacaagaaatgtttcaactctatcaggtggtcaacaacaaagagttgccattgctagagcaattgtaaatgaaccaaaaattctattattagatgaacctcttggtgcattagatttaaaaatgcgtaaagaaatgcaactagaattaaaagagatgcaccgtaaattaggcattacttttatctatgttactcatgaccaagaagaagctttaacaatgtctgatactatcgttgttatgaaagatggtcaaattcaacaaattggtacacctatggatatttataatgagcctaaaaatgcgtttgttgcggacttcattggtgaatcaaacatttatgtaggaacaatgattgatacaaaaaaagtgcgtttcttaggtgctacttgggattgtatcgatgattttcctaaaaatgaaaaggttgatgttgttgtaagaccggaagacattattattcatcctaatggtaagggaatggtaaaagcccatattgttaacaaaatatttaagggaattcactatcagtttaccgcaatggtaggtaataatgaagtattaatacaatctacgttagatcacaacattgatcaagatgtttcgttaactattgaaccagatttaattcaaataatgaaacgtgaatatgatgcaaacatttatcaagatgcttatataaataataagaacaaagtagtttttgcgggagcaacttgggattgcgatgtcactcaattggttgaaggttcttcattagatgaagaaggatatttccatactaaagaaggtaaaacatatgatttaaacgatattgacgtagtagctacagtaggtatggatgacgttgaaataagtgatgatttagaagatggcaacataactggtcaaataatccaaatggtttggaaaggcgaccattaccaattaattgttagaactgaagatgaagaagattttgtagttgatacagtctggacttggaacgaaatggatactgtaagtataaagattgatccaagtaaaattaaattaaagttaaaggaagacttgtcaaaatatgaaatttaa

SEQ ID NO: 1393 - DNA, 1923 bp, Unknown
  Unknown gut bacteria
atgagtaaagttttaactaaagaggaattattaaataaaattgatcaaacatatgacacactagtaattggcggtggacacgcaggaattgaggctgctttagccaatgcaagggtaggccttaatacaattatggtttgtggagcttttaagcgtatcggaaatatgccatgtaatccatctattggtggtcccgcaaaaggtatcttagttagagaaattgatgctcttggagggcaaatggcaaaatctgccgataagacttgcttacaggtaaaaatgcttaatctatcaaaaggacctgctgttcgtgcaatgcgtgttcaatcagataaattagtatatgcaagatacatgcaaacagtagtaactgaccaacctaatctagatatatatattgcattagtagataaaataatggttgaagatggaaaaatccaaggggttattttagaagatggaactaagataaaagcgaaaacagttatagttacgacaggaacatatctatcttctagggtattatgtggtaaagaaacaaaaccatcagggccagatggagaagatactaactatggtttgtcacaatcattaagagaaaacggctttaggctaataagattaaagactggtacaccaccaagagtttatacagatacaattgatttttcaaaaggtcaattagaattaggtacaaatatgcctttaacatttagttatgaaaccaatcccaaagatatgataccattcgataaacaagtcccatgttacttgatatggactactcccaaaactcatcaaattattagggaacatttaaacgaatcaagtatgtattcgggaatagtagaaggcattgggccaagatattgtccatcaatagaagataaactagtaagatttgcggataaagaaagacatcaattatttctagaaccagaaagtatggaaattaatgaaacatatatacaaggtttttcaacaagtatgcctcattatgttcaagaacaaatggttcattctttacctggttttgaaaatgccaaaattgcaaaatatgcgtatgcaatcgaatatgatgccattgatccattggaattaaaaccgactttagaatctaaaaaagtaaaagggttgtttttcggtggacaagttaatggtacaagtggatatgaggaagcagctgcccaaggactaatggctggtatgaatgcaagctgtttagtaagaggaaaagaacaaatagtattaaagagggatgaagcatatcttggtgttttaatagatgacttggttacaaaaggtgttactgatccatatcgtatgttaacatctagagctgaataccgtttactattaagacatgacaatgccgatcaaagacttattaaatatggataccataccggattaattagtgaagaaagatacaataactatttgaaaaagatggagactttaaaagacgaaaaagaacgtctagcaaatactcgcttaactcctaaacaaaatataaatgattatttaactagtataaattctccaattttaaaagatggtattagtgcattagaactaatgaaaagaccagaaatcagttactttgatattgtaaaaatggctaattttgataatcctctagattatgaattaggtgaacaagttaatattgaagttaaatatcaaggttatattgataaagaatttaaagaagcgaacagagtattaaaacttgaaagtgtattgataccagaagatataaactatcaagaaatcgccaatttggccagtgaagcacgtgaaaaattaatgcgcgtaaagcctcgtactatcgctcaagcaacaagaattagtggtgtaaatccatcggatatagctatcttattagtatatatagaatcaaacagaaagagaaaaaaataa

SEQ ID NO: 1394 - DNA, 1944 bp, Unknown
  Unknown gut bacteria
atgtgtgaaaaatgttatgttagtacaccaatttattatgctagtggaaaaatacaaatagggaatagctacactactgtagcatgtgatacatacgctagatataatcgacaaatgggaagaaaaactttctttttaactggtatggatgaacatggtcaaaaaattgaagaggccgctaaaaaagctaatattgaacctcaaaaatttgttgataatgttgcggaagaaactaaagcactttggaaaacaatgcatattgattatgactattttgttagaactactgacaaaaatcacgaaaaagtagtaagcgatatatttgaaagaatgttaaaaaatgatgatatatatttaggagcttatagtggtaactattgtgtttcatgtgaaacattctttactgaaaaacaactaggtgagggtggtacttgtcctgactgtggcaagccaactaaaataatatctgaagaaagttattttttacgattaaagaaatatgaaaagccattacttgaatttataaaaaataatcctgatttcatcaatcctgtaacaagaagaaatgaagtaatttcatttattgaatcaggactagaagatctgtgtgttagtagaacatcttttaattggggaattaaggttgattcaaatcctaaacatgtaatttatgtttggattgatgccttatttaactatttaactgcattaggatatgatcaaaaagataatcataattatgaagaattctggctaaataatgatcgcgttttacatgttgtaggtaaagacattttaagattccacgcaatatattggccaataatgttgatggcacttaacattccaatcaagtttaaattatatgttcatggttggattcttacaaaagaaggtaagatgtcaaaatctaggggtaatgctgtatatccaatggatttaattaataaatatggtgtagatagtgttagatattatttagcaaaagaattaccattaggtaatgatggtttattcagttatgaacgttttattgaaagatacaataatgaacttgccaatgatttaggtaatcttgttagtagaacagtttcaatggtagaaaaatattttgatggtaatgttcctcatatgttaacttcaaagactttatttgatgatgacttgaaaaatgttgcaacaaatgctatcgcaaagactaaagaaaactttgaaaaatttgagctacaagaggctattaatgaaacatggattttaataagaagagttaataaatatattgatgaaactgcaccttgggtacttgctaaagatgaaaacaagaaatccgaacttgaagctacaatggctaatttaatagaatcgcttagagtaattgctcatcttgtttctccatatcttgttgaaactgcacctaaaatattagaggcaattggacttgcaaatgatggctttaatttatcaaatctaaattataatgttggaactgtaacaggaaaagtaagtaaaataccagcgttattccaacgtttagatgttgaaaaagaattagaatattttaaaaataaagcagaacaaactaaaaaagagagtgtaaaagaagtaaaggaagaggaaaaaatttctgagataagtattgatgattttgccaaagtaacacttaaagttggcaaaattattagttcaaagaaacatcctgatgcggaaaaattactagtatcacaaatagaaatcggcaatgaaacacgtcaaatagtttctggtattgcgaaatattataagccagaagacataataggcaaaaaagtaatagttgttacaaatttaaaacctgctaaaattagaggtattgaatctaatggtatggtgctttgtgcttctaatgatgataaattagaactaatagaagttaacggtttaccaagtggttcaatagttcgatag

SEQ ID NO: 1395 - DNA, 1353 bp, Unknown
  Unknown gut bacteria
atgtttgataaaaataacattaaattatataattcattgtcaaataaaatagaagtttttaaaccaataaaagaaaatgaagtttctatgtatgtttgtggtcctacggtttataactatatgcatataggaaatgctagacctgtaatattttttgacacagttaaaagattctttgaatatgttggctataatgtaaaaatggtttctaattttactgatattgatgataaaatcatcaaaaaagcaaaagaagaaaacacaactgaagaggtcattagtgaaaaatatatcaaagcttgtctagatgactatgaaaaacttggctgtgaaaatgatgttattcatcctagagttactcaaaatatccctaatattattgaatttattgaccaattagtaaaaactaatcatgcatatcaaactggtgatgatgtttattttagtgttcgcagcattcctaactatggtattttaagtaatcaaagattagatgaactagaaagtggttctagaattgatattaataataataagaaagatcctgctgatttcacactatggaaaaagacaaatgatgatggaaaaaaatgggatagtccatttggcttaggtagacctggttggcatactgaatgcgttgtaatgataaaagacatttttggtggtatgattgatattcatggtggtggtaatgatttaaagttccctcatcatgaaaatgaaattgcccaatcaatggctttatataacaatgcaattgctaattattggattcataatgctagaattgatttgagtggagaaaaaatgagtaaatctcttggcaatgttgtatggctaaaagatattgttaatatgtatccacctcaagcatatcgtttatttgttcttaataatcattatcgacaaacaattaattattcagaagaaatgatgaataagatggttaatgaatggaataagattgagaaagcttacattagtctatatcgaaacctagatttaaaaggagcgttaaataaacaagaagttttaccaattatggatgacttcttaaatgaaatggcttatgattttaacactgctaatgcggtaacagcattatatagtcacataaaaaatataaataaagatttacgtaacgctagtgaagatgtcttgttattacaaaaagacttagcaacatttgacgcaatgctatatgttttgggcttaaaagtagatgttaaacctcttactgaagaagaaaaagaattagttaacaagtggaatcttgctcgtaaaaacaaagattttgacactgctgatactttaagacaagaaatagtaaatagaggtattgtcctataa

SEQ ID NO: 1396 - DNA, 1158 bp, Unknown
  Unknown gut bacteria
atgggaagaccaaaaggtagtaaaaataaaaaaactatacaaaaagaacgagttaaaacaattaaaaagttgcctacatggcttattataattcttgtaatagcaattatcgcttttggcgtttggtattattttaatgtttatgtcgataaacctaatattgataatcctcaagatgaaataaaaaataacgttaaagatggcactatatatttaggaaaaaaaggaactacttcaccagaattaaaagtaacattcttagatttatatggtaattcaaataatcaacaaattggcgattctatttttattgaatatggcgatattgatattttaatagatgcaggtgaaaaagccagtggttcgtgcactgttgttccttttttgttagaacatgttgaagataaaaaactagaaatgattataacaacccatgcagatagtgaccatttaggtggaatggttggcctttctggtaaagatatgtatggcgcattagaagcaccaggtattgaatatcaatatattgttgattttggttatgaggcagatagcaaggtttataaagattatgttgaactaagaaatgcaagagttcaagaaggtgctacctaccttagcataaaagaaatattcaatgaagaaaaccttgaagcagctgctcatttttatttaggcgaagatatgtttttagatttcttagattataaaacatatggcatggcagatatagatgatgataatgatcgctcagttagttgtcttttgacacatggcgaaaagaaaatattactatgtggcgattctgagaaaaaagaagaaagctatttaacgaaactaaacattggaaaggttgatgtatttaaggctaatcatcatggttcacctacttcaaatactaaaaacctattagatcaaattaggccagaatatgttgttatatgttcaagtgaagaaaataaatataacctccctaagaaaacaattatatctagacttattgaatatactcaaaacgtctatgcaacgtttatatctggaaatattgaagttatatcaaaaaataacaatattacaataacttcggttaaagcgttaatacctgttcaaaattcaacttggtatcttacagatgatccaaataacccgataaaataa

SEQ ID NO: 1397 - DNA, 1068 bp, Unknown
  Unknown gut bacteria
atgataattaaaagcctaaaaattgttaattttaggcgttttataggcaaacaggttgtatttaaaaaagggctaaatgtcatagtaggttcaaatgctattggaaaaacaaccgttctagaagccatttattatttaggtattacgaaaagctttaaaacttcagacgaatcagctttaattaacaataatagtgaggaatttgctatttttgccaatgttgaacgtgatggattagttaacgacataaagataaaaagaatgaaaaacgcaaaaatcgtgtttttaaacaataatccgtataaaaaagttagtgaatacttagggacagttttagtcgtttgctttagtaataatgattgcgttaaattgaatggttcttcaaaagatagaaggagtctatttgaacctttaatttgtcaaatatcaaacttttatgttaatgagtgtaataactatagaaaaattttaaacagtagaaatgctttgttaaaacgtcttaattttgaaaagaaagagtcaaatacaaagttgcttgaggtcatgaattctcaacttgtgaaaagtggcaataagattattaatgtaagacagaaaattgtcagaaaacttaatgacgaaataaatgaaatttacaatgaaatttcgggatgcaatgaaaagattgaattggaatattgttctaatacaactgaagaaaaatttttaaatcaactaagactgaattatgaagaagaattaaaaagaggccacactgaagtagggcctcatagagacgattataagtttaaaattaacggacttgatgctgctagtactggttcacaagggcaacaaaaaagcattatgatctcacttaaaatagctttttctaaaatgatacaaagtgttaaaaatgaaacgccaacattacttttagatgatgttttgggtgaacttgatgaaaatcgacaaaataatcttttagactatataaggaattatcagcaagtaatactctctacatcgacgttagctgatgtaaaaaaagaaaatttagaaaatgctaatataattgaattagagtaa

SEQ ID NO: 1398 - DNA, 1944 bp, Unknown
  Unknown gut bacteria
atggatgaaaaagatttggctacgatagaagctgaaaaaaactatgattctggtagtattcaagtactagaaggattagaagcagttagaaaaagacccggtatgtacattgggtctactggtccaagaggattacatcatcttgtttgggaaattgttgataactctgtcgatgaagcattagcggggtattgcaatcaaattgatgttgaaattaatctagatgagaatggcaataataccattaaggtaaccgataatggtcgtggtatgccaacagatattcacccaaaaactcatgttagcgctacagaaacaatatttacagttcttcatgctggtggtaaatttgataataatagttataaagtatctggcgggttgcatggtgttggtgcatcagtagtgaatgcattaagtgaatggctagaagttaacgtacatcgtaatggtcatatttatcgccaaagatttgaaagagggatagtaaaaagcccgctcgaaataattgggacaactgatcatactggtacggtagtaacttttacacctgataaagaaatttttaaagagacaacatatttcgattacgaaattttaagacatcgtattcaagaactagctttcttaaacaagggattaaaattaacaataaaagatttaagaaatccttataatattaagagtggcgaatatcattatgaaggtggattagttgaatatgttaaatttttaaataaaggaaagaaaccacttcatcaagatgttataaaagttgaggaagaaattgaaggaactatgatagaaatagcatttcaatatactgaagattatagttgtaatatcaaatcttttactaataacatcataaataccgaaggtggtacacatgaagaaggatttagaaacagtttaacaagaattctcaacacttatggtaaaaatgcgaatatctttaaaaaagatgaaagcctttctggtgatgatgtacgtgaaggtttaacagcaattgtttcttgtaaaataagtgatccacaattcgaaggacaaactaaaacaaaactaggaaatacagaagttcgaagaatagcatcacaagctatgagtgataaatttgaagcttatttgcttgaaaatccagctacagctaagttaattgttgaaaaatcgcttcttgcgttaagagctagaattgccgcaaagaaagcaagagaagcaacaagaagaaaaagtccacttgactcgttaggatttgcttcgaaattgtcagattgccgaacaaaagacccaacactagcagaaatgtacatagtcgaaggtgattctgccggtggttctgcaaaaatgggacgtgaaagctattatcaagccatacttcctttacgtggaaaagtgttgaatgttgaaaaagcagctatgggtagagcccttggtaataaagaaatattatcaatgatacaagcaattggtacaggaataggaaatgaattccaaattgaaaatgctcgttaccataaaatcgtaataatgaccgatgccgatgtcgatggtgcccatattagaacattgttgcttaccttcttctatcgttttatgccacaaataatagaaaaaggctatgtttatatagcacaaccaccactttataaaatacaacaaggtaaaaaaatagaatacgcgtatagcgatgaagaattaaatttgaaattaagtgaaataactggtaaaagagatattcaccgttataaaggtttgggtgaaatgaaccctgaacaactttgggaaactacaatggaccctaaacgtagaattttattgcaagttacaatgaatgatggcgagaaggcaaatgaagttttttctatgctaatgggagaagatgttgaaccaagacgtaagtttattgaagaaaatgccgtgtttgtacaaaatttggatatatag

SEQ ID NO: 1399 - DNA, 2712 bp, Unknown
  Unknown gut bacteria
gtgtctgaaaaagataatgaatttgaagaaaaagaattagattcagaagatgaaaatgatgaaatagaaaattctgacgaagacgaagaaaataatcctgatatagatccagagttaaccaaattagataacgattatttaggcgaacaaggcgaagactatgataaagttcaacctattaatctaagtaacgtaatgcaaacatcatttttggattatgcaatgagcgttattgtatcgcgtgcattaccagatgtaagagatggtttaaaaccagtacaccgtagaattttatttgctatgaacgaattgggagtttatagtgataaacctcataagaaatcagcacgtatcgtcggtgacgttattggtaaataccatccacatggtgacactgctgtgtatgaagcaatggtaagaatggctcaagactttagttatcgatatccactagtagatggtcacggtaattttggttctgtcgatggtgatggagcagccgcaatgcgttatactgaagctagaatgagtaaacttgctggagaaatgcttcgtgatttaaataaaaatacggttgattttgttgataactatgatggatctgaaaaagaaccagcaattttaccagcaagatttccaaatttgctagttaatggtgcatcaggtattgccgttggtatggcaacaagtattcctccacataatttaacagaagttatcaatggaacacttgctttaattgaaaatccagatattactgttgaaaaactaatggaatatattccagctccagactttccaactggcgcaacaattatgggactttcaagtgttaaacaagcatacttaacgggtgttggtactgtaactgttcgcgcaaaagttaatattgtcaacttgcaaaacggaaaaaaagaaattgtaataacagaaattccatatcaagttaataaaaagagactaatcgaaagaattgctgaccttgcaaaagataaaataatagatggcataactgatttacgtgatgaatcaaaccgaaaaggtatgagaataataattgaaattagacgcgatgccaatgttaatgttattttaaacaatttgtataagcatacacaaatgcaaactacatacagcgttaatatgattgcccttgatcatggacaacctagagtattaaatttaaaacaaattttggaatgctatgtaaaacatcaaatagaagttgttacaagaagaacaaaatatgatttagataaagcgaaagcaagattacacattgttgaaggtttattaattgcattagcaaatattgatgaagtagttgctacaattaaagcttcaaaaaatgctgaagaagcaatagctcaattaacaactaaattcttacttaccgaaattcaagcaaaagcaattctagatatgaaattgcaaagattaacaggacttgaattagaaaaacttcaagaagaaaagaaagaattacatgaaattgtagattatttagaagacattttaaatcatcatgaaaaattaatgcaagtaatcgtttctgaattaactgaagtacaaagaaaatacggtgatgatcgtcgtacaggacttgatttaagtgaagatttagaagttgaagatgcagatttaataccagaagaagatgttataattacaatcacaaatcgtagttatattaaacgtatgactgtagatacttatcgtgcacaaagacgtggtggaaaaggcataactggtagtaaaatgcaagaagatgatttcatcgaaaaagtaatttatacttctacacatgataatctattattcttcactaattttggtaaagtttatttattaaaagcataccaaatccctggcgcaagtagaatttctaaaggtttaccactaattaatttattaaaatttgaggccgaagaaaaactagcggcagtaattaatgttaaatcactagaagaaccaggttacgtaatatttggaactaaaaatggtatcatcaaaaagactgaattaattcaatataaaaatattcgtagtactggtataagagcaataatacttggtgaacaagatgaattgattgcagttgcaagaacaaatggtacacaagatataatttttggtgcatctaatggtaaagcagcttgcttcaatgaatcagaagttagagcaacaaatcgtgccgcaagtggtgtaaaaggaattagggttgctgaaggagaaagagcaattggtcttgttgccgtaaatggtgaagaagatgaaataacagttgttacagaatttggttatggaaaacgtacacctactagtgacttcaagataaagggccgaaacgggaaaggtgttaaatatatgaacataactgaaaagagtggtaggcctgtaagtcttgctccatcaactggtgaggatgacctaatgattatcactgataagggtatggtaattagaacttatcttgcagatatatcagtaataggtagagatactcaaggtgttcgcgtaattaaactaaatgagggccaaactgtatcttcaattgcaatagttccgcaccaagaagatgtcccagaagaagatgaagaagaaaacaatgtagatgctacaaacaatgctttgcatcatgttgatgaattgttacaatctactgaagaagatttagaaaatgatgatgaaggcactgaagaggatgcatag

SEQ ID NO: 1400 - DNA, 1233 bp, Unknown
  Unknown gut bacteria
atgacattatttgaagaattaaaatggcgtggattaatccacaatattactgatgaagcagtaatagataaaattaataaaggtggtttaactttctatgttggaactgacccaactggtgatagtcttcacgtagggcatcttttagtatttatttttgctaagagattagaacaagcaggacatcatccactaatattaattggtggggcaacaggatgcattggtgatcctaaacctaccgctgaaagaaaattattaacaaaagaacaaactgatcacaatgcaaaatgcttatatgaacaagctaaacgtttatttaattgtgaaatggttaataactatgattggactcacaatatcgatattttaactttcttaagaacatatggaaaattctttaatgtaaattacatgattaataaagaaacggtaaaatctcgtttagatagtggtatatcttacacagaattttcttaccaaatactacaagcacttgattttgaacatctatttaaaacaaaaaattgtcaattacaaataggtggacaagatcaatggggaaatatcacttctggccttgaattaataagaaaattgcatggtacagaagcagaggcttatggtcttacaattccactatttactaaaagtgatggaacaaaatttggtaaaaccgaaggcggtgctatttggctagatgcaactaaaactacaccatatgcattttaccaattttggataaatacaccagataatgatgtaattcgtgaattaaaacaatttaccttcttaacaaaggaagaaattgaagaaattgaagaatcatttaaaaatgaaccacatttaagaaaagctcaaaaagctttagcaaaagctatgactactatgattcacggagaaaaagcttatgaacaagctgtaaaactaagtgaagcattatttagtggtaagatttctgaattaactaaagaagaaattgaagttggttttgaaggtgttcctcaagttgaaattaatgaagatttaggcttaattgatgctttggtgttagtaaaagccgcttcttcaaaacgtgaagctcgtgactttatacaaggtggcggtgtattagtaaatggcgtacaagaaaaatcattggatgcagtggtatcaaaagaaaaagctattggttctacatacacagtaatccgtaggggaaaaaagaattattatgtaattaagcataactag

SEQ ID NO: 1401 - DNA, 2460 bp, Unknown
  Unknown gut bacteria
aacatgaaagaaggagattttcttatgaagtatggtcattttgatgatgtgcatcaagaatatgtcatcactactcccaagactccgcttccctggatcaactacctgggttgcaacgagtttttcagtctgatatccaacacctgcggcggatataccttctataaggatgccaaactgctgcgtctgacccgttatcgttacaataatgtaccggcagacatcaacggcaaatatctgtatattaaggatggagataccgtatggaatcccggctggcagcctacgaagaccgagctggattcttacgagtgccgtcacggtatcggttacagccgtttcacctcttccaagaacggtgttaaggcttccgtgctctccttcgttcctctgaatgataactgtgagatctctcagctgactctgaccaacggaagctccgaggacaagaagctgtccgtattctcttatgtagaatggtgtctgtggaatgccgatgatgatatgaagaacttccagcgtaacttaagcaccggcgaagtggaggtacaggattcgactatttaccacaagaccgagtaccgcgaacgccgtaatcattacgcaatctattctgtaaatacgaagattgatggtttcgataccagcagagatgcttttcttggtgcgtacagaggtgcggattctcccgaagcggttgagaacggcaagtgcacaaactccatggcaagcggctggtctcccattgcttctcatcagatcaatgtggatctggcagccggcgagaccaagactttcatcttcgtactgggctatatcgagaatcccgaagacgagaagtgggagtcctacggtgtgatcaacaagacccgcgcgaaggaaatgctggcaaaataccagaccgacgcccaggtagaagaagctttcgcagcgctgcaggcttactggaaacagttacttgcccgttacacggtagattctgctgacgaaaaagtaaaccgtatggtcaacacctggaaccagtatcagtgcatggtaaccttcaacatgtcccgttccgcttcttattatgagtccggaatcggtcgtggcatgggcttccgtgattcctgccaggatctgctcggcttcgtacatctgatcccggatcgtgcaagagagcgtatcatcgatatcgcttccacccagttccaggacggcagcgcttaccatcagtaccagcctctgaccaagaagggcaactccgatattggcagcggcttcaacgatgatcctctgtggctcattgcaggtaccagtgcttacgtaagagagaccggtgatacctccatcctgacccagatggttccttttgacaacgatatgagcgtagctgctcctctgatggatcacttaaaacgctccttagactatatcatcaaccacaaaggtcctcacaatctgcctctgatcggccgcgccgactggaatgactgtctgaacctgaactgcttctccgctcatcccggagaatccttccaaaccttcggtccgagtgaaggacccgtggcagaatccgtattcattgccggtatgttcgtaaaatacggcgaagaatatgcccagctgtgtgagctgatgggtgatgctgatgaagctgcccgcgcacgcaaggaagtacaggcaatgtacgatgcgatcctgaaggatggctgggacggcgactggttcgttcgtgcttacgatgcttacagccacaaggtaggttccaaggaatgtcgcgaaggtcagatctacatcgagcctcagggcttctgtgtactcgccggtgtcggtgtaaaggaagggcttgccgagaaggcactgaattccgtaaaagaaagactggataccaagtatggtgtcatgatcttacaacctgcatacacggagtatcacctcgaacttggtgaagtatcctcttatccccccggatacaaggagaatgccggtatcttctgccacaacaatccctgggtatccatcgcagaaactgttctgggcagaggtgacagagccttcgaaatctaccgtaagacctgtcccgcatacattgaggatatcagcgagatccatcgtaccgagccttatgtatactcccagatggtagccggtaaggatgcaaaattccacggcgaagcgaaaaacagctggctgaccggtaccgcggcatggactttcgtaaatatctcccagtacatcctgggtgtatatcctacccatcagggattatccgtagatccttgtattcctaagggcttcggcgatttctccatcacccgtaagttccgtgagggcacctatcacattcaggtgaagaatcctcagaacgtggagaagggtgtggtatccatgaccgtagatggcaaggctgttgacggacacatcatcccttacgaaaagggcaaggaagagtacaacgtagttattacgatgggctaa

SEQ ID NO: 1402 - DNA, 1929 bp, Unknown
  Unknown gut bacteria
aaatatatagcgggaggcgcagctatgacgaaggagaaggtatttatttccgaagcagatcagtatctttttgcccagggaacgcactatgatatttataaaaaactgggtgcgcatctgtcgacggaagatggtgtgcagggagtctatttcggggtatgggcaccaaatgcagcacaggtgaatgttatcggcacattcaatgaatggaacgaagagtctcatcccatgcagaagctgggagaaggtggtatctgggggttgttcgttcccggcgtggaagaaggaacaatgtataagttcctgatctatgcgagggatggcagaaagctgtataaagccgacccctttgcaaattatgcggaatacagacccggaacagcgtccattgttacggatatcacgggattcgcttggaaggattccaagtggatggaagcccgggataaaaaagatatgaacaaggagcccatggcgatctatgagtgtcatatcggttctttcatgaagcatccgaataacggtactgcggaaggattttataattatcgtgagttcgccgaccggatcgtggaatatctgaaagagatgaaatacacccatgtagagcttatgggaatcgcggagcatccgtatgatggctcatggggatatcaggtgaccggatactatgcgcctacttcccgttacggaacgcctaaggattttatgtatctggtcaatgaactgcataaggcaggtgtcggagtcattttggattgggtaccggcacattttgcaaccgatgcacacggactggcagaatttgacggacagtgcatctttgaacatcccgatccccgtttgggagagcatcctgaatggggaacgaagatatttaattatggcaaaaatgaagtgaagaacttcctggtagccaatgctctgttctggctgagagagttccatgtagacggtatccgtgtagatgcagtagcctccatgctgtatctggattacggtaaaaaagaaggacaatggctgccgaataaatttggcggcaataagaacctggaagccattgagttcttccatcatctgaattcagtgatccgcggaacttatccgggatttttgacgattgccgaggaatctaccgcatggcctaatgttaccagtggtatcggggaggaaggtttaggattttccttcaagtggaatatgggctggatgcatgatttctgcgagtatatgaagctggatccgctgtaccggaaaggcgatcattacgccatgacctttgctatgagctataacgacagcgagaattatattctgccattatctcatgatgaagtggtacatctgaagtgctccatggtgaataaaatgcccggatatccggcagataaatatgccaaccttcgtgtggggtatagctacatgttcgggcattccggcaagaaattattatttatgggacaggatttcggacaggagcgagagtggagcgaagagcgtgagcttgactggtatctgttaggtgagaagctgaatcagggcgtacatacttatgtaaaggagctgttaaagctgtatcgtaaataccctgctctgtacgagattgacaataactgggacggctttgaatggatgaacgcggatgatgcggaacacagcacttactcctttgtccggaaatgttccagtggcaagaataatctgctgtttgtacttaacatgaccccgatgaaatgggagaactatactgttcccgtgcctaagaagaaaaaatataagcttctgctgaatagtgatgaggaacggttcggcggctggggcaacgagattcccacagagattacggcggagaaaaagccttatcattataaggattactccatcagctttgatctgccaccctatggcgctgcggtatttctgttctag

SEQ ID NO: 1403 - DNA, 1179 bp, Unknown
  Unknown gut bacteria
atggaagaaaaagagacaatacagcccattgagatcacatgggaagaactacagtcccgggaccttgaacgatacattctggtggataccagaggggatgaagcagtaaactatggaatgattcccggagccattgcaatccctgaatgtgaactggtggacaagctggctgcggcagcaggggataaaaaagtgatcctgtattgcagccgcgggcagaacagtaaagcgtccgcagaatatttccgggaacagggaatggacgtctacagtttacagggcggctataccgggtggcttctgaacctgatgcagaaggaacagcccggagaaaaagaaaacgagcgggcacgggagattgaaaaaagcatccgcaaaaaattccataaagtcctgttttcccgatttgccaaagctatcaatgagtatgacatgatccaggagaacgacaagatcgccgtatgtatctccggtggtaaggattccatgctgatggcaaagctgttccaggagctgaagcgtcacaacaagttcccctttgaactggtatttttggtgatggatcccggttacagtgaggcgaaccgcaagatcatcgagaacaatgcgaagctgatggatattcccattacgatttttgaatcccagatatttgatgcggtgtatgatatcgaggattccccctgctatctgtgtgcccgaatgcgcagaggctatctgtatagccatgcaaaggagctggggtgcaataagatcgctctgggacaccattacgatgatgttatcgagacgatcctcatggggatgttgtacggcggacaggtgcagaccatgatgccgaagctgcacagcacgaatttcgagggcatggagctgatccgccccatgtatctgatccgcgaggacgacatcaagcactggagagattacaacgatctgcattttatccagtgtgcatgccgctttaccgatacctgtaccacctgccgtaccgatggcagcagtccctccaaacgtatggagatcaagaacctgatcgcttccctgaagcagaccaatccctttatcgaagggaacattttcaagagcgtggagaatgtcaacctacgcacgatcatcgcctataaagaggacggtgtgaaacatcattttctggagcattatgacgagtggaaatag

SEQ ID NO: 1404 - DNA, 897 bp, Unknown
  Unknown gut bacteria
atggcagcaagaggattgggaaaaggtctggattctctaatacctaatgcattaggggagacaaagacaaaaaaagaaacagcagcaaaatcaaagacagagacaacagagggagaagaaccgcagacccttgtgaagatcacaaaggtagagcctaacagagaacagcctcgtaaaaattttgatgaggatgctctgcaggagctggcagattctattaagcagttcggtctgttgcagccgattttggtacaggaccgcaaagattattatgaaatcattgccggtgagagaagatggcgtgcagcaaagctggcaggtctgaaggaagttccggttatcatccgtaattatacggaacaggagattgtggagatttccttgattgagaatatccagcgtgaagatctgaatccgattgaagaagcacaggcatacaagcgactcttaacagagtttcatctgaagcaggatgaagttgcagagagagtatccaagagccgtgcagcggttaccaactctatccgacttctgaaactgaacgaagaagtacagcgcatggtggtagatgagatgatcagtaccggacatgcgagagcattactggcagtggagaatccggaagaacagtataatctggcacagcgtatttttgatgaaaagctgagcgtacgtgatgtagaaaaactggtaaaaaatttacataaacctgcaaagcccaaaaaagtagatgataaaaccatgcaggtgatctaccaggatattgaagaaaaactgaaacaaaaacttggaagaaaagtaaccgttacatctaagggagagggatccggtaagatcgaaattgaattttacaatcatgaagatttggacagactcctggatgtactgaataaataa

SEQ ID NO: 1405 - DNA, 1470 bp, Unknown
  Unknown gut bacteria
atgacagcaataggggagctgaaaataccctttagtatatttatggaggattttaaaatgaaagcatttatggacaaggactttctgttagagactgagacagccaggaagctgttccacgactacgcagaaaaaacaccgattctggattaccattgtcatattaatcccagggagatcgctgaggatcgtcagttcgacaatatcacccaggtatggctgggcggtgaccactacaagtggcgtttcatgcgttcctgcggtgttgacgagaagtacatcaccggtgatgcatccgattacgagaagttctgcaaatgggcagagtgcctgggcaaggctatcggcaaccccttattccactggagccatctggagctgcagagatatttcggttacaatggcgttctgaacaaaaacagcgctgacgaagtatggaacctgtgcaatgaaaagctccatcagccttccatgagcgttcgtaacctgatcaagcagagtaacgttaccctgatctgcaccaccgatgatcctatcgattctctggagtggcacaagaagctggctgcagatgatactttcgatgtaaaggttctgcccgcatggagacccgacaaggctatgaatatcgagaagcccgattatctggattatctggagaagctggctgctgctgccggcatgaccgagatcaactcttttgcaagcttaaaggaagctctgaagaaccgtatggcatttttcgcatccatgggatgtaacgtatctgaccatgctttagagtatgtaatgtactatcccgcttccgatgatgagctggaagagattttcttaaagagactgaacaagatggttctgaccaaggaagaggaactgaaattcaagaccgccttcatgctgttcgtaggccgcgaatatcataagctcgactgggctatgcagctgcactacggttgtaagcgtgacaacaacaccctgatgttcgagaagctgggtcccgataccggttaccactgcatcaacaactacgctccttccgctcagatggctgacttcctgaacgctctgatcgtaagtgatgagcttcccagaactgtcatctacagcctgaatcctaacgacaatcaggcaatcggtaccatcctcggatgtttccaggattccaccgctgttgccaagatccagcagggttctgcatggtggttcaatgatcacaagaccggcatgcaggatcagatgatctccctggctaacctgggtaatctgtccggatttgtaggaatgctgaccgactccagaagcttcctgtcctacaccagacatgagtatttccgccgtatcctgtgcaacctgatcggtaactgggtagaaagcggcgagttccctgcagattacgatactctgtccgagatcgtaaccgatatttcttacaataacgcaaagagatacttcaagttccctctggcataa

SEQ ID NO: 1406 - DNA, 1509 bp, Unknown
  Unknown gut bacteria
atgaatttaagaccagaagaaataagttccgtcattaaggaacagatcgaaagatattcttcccagctggatgtctccgatgtcggaaccgtcatccaggtagcggatggtatcgctcgtgtacatggactggaaaatgccatgcagggtgagctgttacagttccccggcgatgtgtatggcatggtgctgaatctggaagaagataatgtcggtgtcgtattgcttggcagtgccagcaatatcgaagagggcgatattgtcaagaccaccggacgtgtggtagaggtgcccgtaggtgatgcattgcttggacgagtagtgaactccttaggacagcccatcgatggcaagggccccatacagaccgataaattccgcaagattgagcgtgtggcaagtggtgttatcactcgtaagagcgtagacacgccgctccagacaggtatcaaggcaatcgactccatggttcccatcggaagaggtcagcgtgagctgatcatcggtgaccgtcagaccggtaagaccgctattgcgatcgatacgatcatcaaccagaagggtcagaacgtaaaatgtatctatgtagccatcggtcagaaagcatctaccgtggcaaatatcgtaaagacactggaggagttcggtgccatggcatataccaccgttgtggtatccacggcaagtgacctggctcccttacagtacatcgctccttattccggctgtgcgatcggtgaggagtggatggagaacggagaagacgtactggtagtgtatgatgacttaagtaaacatgctaccgcataccgtacactctccctgctccttcgtcgtccacccggacgtgaggcatatcccggtgacgtattctatctgcattccagactgttagagcgtgcggtccgcatgagtgacgaatacggcggaggttccctgacggcgcttcccatcatcgagacccaggcaggagatgtatccgcatacattcctaccaacgtaatttccattaccgacggacagatctatctggagacagaaatgttcaattccggtttccgtcccgcggtaaatgcaggtctgtcagtatcccgtgtaggtggtgcggcacagatcaaggcaatgaagaagatcgcggcgccgatccgtaccgagcttgctcagtacagagagctggcttccttcgcacagttcggatctgaactggatgcagataccaaggagaagctggcgcagggcgaacgtatcaaggaagtgctgaagcagcctcagtaccagcctatgccggtacagtatcaggttatcatcatctatgcggtgactaagagattccggctggatgtgccggtagaggacatcaccagatttgagaaggaattcttcgattatctggatactaagcatcccgagatccccgcagccatcgctgaggaaaaggtgatctccgatgctacggaagaaaagcttgtgaaggcactgaatgatttcaaggcagagtttctgaaataa

SEQ ID NO: 1407 - DNA, 1347 bp, Unknown
  Unknown gut bacteria
atgtcatatgttgatgaagtatttgatatggtagtgaccaaaaatcccgcacagcccgagttccatcaggcagtcaaagaggttctggaatctcttcgtgttgtgatcgaggcaaatgaggaaaaatatcgtaaggacgctctgctggagagaatcgtaactcccgagagacagatcctgttccgcgtaccctgggtggatgacaagggtcaggtacaggtaaacaacggcttccgtgtacagttcaattccgcgatcggaccttacaagggcggtttacgtttacatccttctgtaaacttaggtatcatcaagttccttggttttgagcagaccttcaagaactccctgaccggactgccgatcggcggtggtaagggtggatccgatttcgatcccaagggcaaatccgacagagagatcatggctttctgccagagcttcatcacagaactttacaaatatatcggagcagacaccgatgttcctgccggtgatatcggtaccggcgcaagagagatcggttatatgtatggacagtacaagagactgaccggtctgtatgaaggcgttctgaccggtaagggcttaagctacggcggatccctggcaagaaccgaagcgaccggttacggtctgctgtatctgacagaggagatgttaaagtgcaatggcaaggatatcgcaggcaagacggttactgtatccggtgccggcaatgtagcgatctatgctatccagaaagcagagcagttaggtgcaaaggtagttacctgttccgattctaccggatggatctatgatcccgaaggaatcgatgtagctctgttacgcgaagtgaaggaagttaagcgtgcaagactgactgagtatgcagcagcaagacccagtgcacagtatcatgagaagaagaacggtgagcacggtgtatggactgttaagtgtgatgtagctcttccctgcgcaacccagaacgagctggatctggaggatgcaaagcagctggtagctaacggcgtattcgctgtagcagagggcgctaacatgcctaccaccatggaagctaccgagtacttccagaagaacggcgttctgttctgccctggcaaggcatccaacgcaggcggtgttgctacctccgctctggagatgagccagaacagtgagagactttcctggaccttcgaagaagtagatgccaagctgaagaacatcatggtgaacatcttccataatctggatgatgcagctaaaaagtacggtatggaaggcaactacgtagcaggtgcgaatatcgcaggcttcctgaaggttgcagatgctatgttggctcagggtgtttgctaa

SEQ ID NO: 1408 - DNA, 1749 bp, Unknown
  Unknown gut bacteria
atgaagaagacagagaacaagaaaacggaagtaaaagggaagaaaaagccattttttacaatctccaaaaagatactggcgctgagtcttctgccgatgattattgtgtgtgcattggtggcgaccgtaggctccagagctttggaagcaggcatcgaggaacagattgagaaagcattgcagatcgtaggtgtcagcgtggacgagacttacaccaatctgtatgaaggtgactacaccagagataagggcggcaaggtgcgaaaaggtggcgtaacaatctccggagatacgcagctgatcgacggattgcaggagaagacgggattccaggtgtctttcctgtacgggaatatgcgtctgatcacaacgctgacgaaaccggagggaggtcgtatcaatggtacaggtctggaaacggagatctacgagcagatccagacgggagaaccgctgttccttaaggattgcgacatctctgaagtggattactatgtatattatcaaccgctgatcaactccgatggttctgtgatcggcgccatcgaggtggcaacaccggtgcagggggtacaggacacgattcatacgcaggtgaaggatattatcctgatcgctgtggtatgcgttcttgtggcggcagcgctggtaagcgtattatcccgcagcatggtgaagaccatgaagaagacgaagcatttcctgggcaggatcgtgaacggagaactggatgcagaaccggatgaaaagcagtgtcgaagaaaggacgaattgggagatgtctaccggatctctgtgaaattgcagaagacgctgcgcaccattgtgacggatatcaaggattccgcggatgatctgacaacatcttccaacaaactgatcaagatggcgcaggatacccaggaatcggtccacgatgtataccaggcagtaggggagatctctgaaggtgccaggaaccaggcggacgaaacaacggatgccaatacgaacgtggtacgtatcggcgaacaaatcgagtatatctccgacaaagtgaattctctgacggattatgccggcaggatggcagaagcggagaaagcttccgaagagatcatgaaggaattgaacagctccaacgagagcaccaaggaatctgtcctgcgggtagcggaacagattaaggatatgaacggagcaattcagaatatcaccaaggcagtatccatgattcaggatattgcggacgagacagatctactgtcattgaatgccagcattgaagcagccagagccggggaagcgggaagaggcttcgcagtggtggcagagcagatcagtaagctggctgaccagtctaagcgctccgcaaccgagatcgagcagatcatcaaaaatatcatggagtcttccggcagaatggtggagatcatgggtgaagtggaagccaacatgaatcaccagcagagcaagttagaggagaccggtgtgaagactgcggcagtagcggatggtgtggagaattccctgcaacatatcggcggtatccgggagaagatggatgtcttaggacagtccggaagtgcgatccgtgatgtagtggaaggattgtcggcaatctccgaacagaatgcagcatccgcagacagtaccatgcaggcggctcatggcatgagtgataccatgacagaactgatgacttcttctgagaatctgctggcattagcggataagttggaaaaggtactggatgttttcaaggtataa

SEQ ID NO: 1409 - DNA, 2247 bp, Unknown
  Unknown gut bacteria
atgatttttaataaaaaagacacccttaatgatacaaattatacaagccacaacagtacattaatgctaaaaatggtaacctcttacagtattttcctgctgatcattctggttttgttcatctttttataccgttctacgataaataacgcacgtgattcttacgatcagcagaacgagacaaccctgatcagcaatgcagagctgtttgaaagcgatctgaacatcatggaggtatattgccggcagcttttgcaaaacgacaccttccgtaaggtcatgaattaccataatacctactatccttttacggagatggggaatgaattacagaattccctggcgacaaatgtatatgcagaggcgcttctaccgttaaaagagtcctttgtctattttccggagacagactatgtattgaatcctacttattttatatccgcaaagcggttctataactggatccagaagtactcttctaccgaaaaggaactgtggcactcctacatgacggaaccggaatacaagaaccgctttcttcccatggatcagttcatgccaaattacagcgaaaaatactatatgtatatcatcgatctgaacgatctctactatatggatgccaacgcaaaggtctgctttatcttcgaacaggataaaatggcggatctgttcgactgtgtacagatggatggtgataattttctggtggtaaccgcggaagatgattccactgtgcttacgataaataccccggacagcatttccgcagaaatgctggattccctggactttaataagggatatgcccaggtccgtctgaacggacagacttttactttagggaaatatacttctgataataccaattattcttattattttagttttcctccctataaagcgaccgggggtcttggaggcacacagttatttttcatcttactggcaatgtctgcactggtgatcggcggttctctggtatattatttttcccgtcggaatgtgcagcctattattgaactcggtcaggagttacagactgctgtggaagtacagaagaatctgcaggaggtcgtggacagccagcgtccgattatctgtacctcttatgtcagacagcttttgtccggtaccgccacatccgaagatgaggtggcttatatggaaaactatctaggaatcactgcttcttcttattataatgtgttatatattgtgtactataataactttggcgataatgtagaaaacgctctccccggcggcgtggaatctgtcgaggagctggagaagatcatcgagtccgcactggagaatttcttcggtacaccactcttctacttcagcccttcagaccggacctattccgttctgctgcactgttccgaagaagagggaaaggatctgatcctgaagatcaacaattgtattttacgacttcatgattatctgctggatacttacgacatctggctcttcgccggtatcggtcgcaatacggattccctgatgaatgtatgggaatgctaccagcaggcctccgaagccgtaagttacacgacgaagaactatattttcttcccgtatgaatttattaagaaggattccaatgtgttctattatccgccggagatctcaacgaagctgatccacttcatctccacgggcaatacgccgcaggtattggagatgttcaacctgatccaccaggaaaatatcgaggaacgtaccctgccggtcaacctgttaaaatacctgctgtcagatatccgcaacactttattaaaagcaagatttgatttgcctcaggatgcggatcccgaagctgtaaaggtactggatgaacgtttcaatgagcacctgaccttcaaattgtgcgaagatcttgcattatccctgtgtaatctcttcggtaataaagaggacgacaacaccttatcctctaccattgagaaatatattaaagacaattataaagatccttcgttgggattaaacaagatttcagatgaatttcagatctccgagagttatttttcccatatgttcaaggaaaagaccggggtcaacttctccacttatctggagaatatccgtatggcggaggctgccagactgatccaggagaccgatatcagcttaaatgagctgtatatcgctgtgggatataataattccaatactttccgacgtgcattcaagaaagtatacggagtaactcccagtgccatgcgggagaaatag

SEQ ID NO: 1410 - DNA, 2127 bp, Unknown
  Unknown gut bacteria
atgaagattcagaagagagacggcagagtagtgccttatgaagaggacaagatccgggaagcgatccataaggcgaacaacgaagtggaggagcggtatcgtgccagtgaggggttgattgaagagatcctggaggatgtgcagcaggagggcagacagacccagaccgtggagcatattcaggatatgatcgaagaacatctggtagagcacaacaaatataccctggcgaagaagtatatcgtataccgttaccagagaagtctgctccgcaaatccaacaccacggatgaatctattttaaaactgatccggaatgagaataaggagctggcagaggagaattccaataaaaatacccgactggcatccacacagagagactatattgcaggtgaagtgtcccgtgatgttaccagacgtctgcttctgccggagcatattgccatggcacatgacaacggtgtgctgcatttccatgatgcggattattttatccagccgatcttcaactgctgtctgatcaatatcaaggatatgctggacaacggtacttccatcaacggcaaaatgatcgaatctcccaagagtttccaggtggcatgtaccgtgaccacccagatcatcgcagccgtagccagcaatcagtatggcggtcagagtgtgaatatcaagcatctgggaaaatatctgcgtaagagcagggaaaaatttgcaaaacagctggaggacgagttcggagataccctggatcaggcagccaaggataagatcgtacagatgcgtctgcacgatgaattaaaatccggcgtacagaccatccagtaccagatcaatacactgatgaccaccaacggacagtctccgttcgtgacattgttcctgcatattgacgagaacgacgaatatgtggaagagaccgtacagatcattatggagatcctgcgccagcgcattgagggaaccaagaatgagaagggtgtctatgtgactcccgcattcccgaagttagtctatgtgttggacgaaaataactgcttaaagggcggaaaatacgactatgtgaccaagctggccgcacagtgctccgctaagagaatgtaccccgactatatctctgccaagaagatgcgtgagaactacgagggcaatgtattttcctgcatgggctgccgttccttcctgtctccatggaaggatgaaaacggagagtacaagtgggaaggccgttttaatcagggcgttgtcagcatcaacctgccccagatcggtatcctggcaaaaggaaatgaggagaagttctggaaactgttggatgagcgtctgaagctgtgctatgaagcactgatgtgccgtcataaggcactggagggcgtggtatccgatgtgagccccatccactggcagtacggcgccatcgcccgtctgaagaagggtgagaccatcgacaaatacctgcacaacggttattccaccatgtctctgggatatatcggattgtatgagatgacctatctgatgaagggctgcagccagactgtggagcccggcaaggaattcgccctgcgcgtcatggattacatgaaggatcgctgcgcaaaatggaaagaggagaccggcattgctttcagtctctacggaactcccgcagagacactttgctaccgttttgcaaggatcgaccgtgaaaaatacggtgatatttccaatgtcaccgataaaggatactatacaaattcttatcatgtggatgtacgggagaagatcgacgcatttacaaaatttaagatcgagagtgaattccagaataaatctttgggaggcgctatctcttatgtagaagtcccgaacctgaccaataatgtggaagccatcgaggaagtgatcctcttcatctatgacaatatccagtacggagagttcaataccaaatccgattactgtcaggtatgtggctatgatggtgagatcatgatcaatgataacatggagtgggaatgtccccagtgtcataacaaggatcatgcgaagatgaatgtcaccagaaggacctgcggctatctgggagagaacttctggaatgccggcaagaccaaggagatcaaggcaagagttcttcatctgtaa

SEQ ID NO: 1411 - DNA, 645 bp, Unknown
  Unknown gut bacteria
atgcaagagaatgtacaaacagataggagacgggataagatgatacgtaatataatatttgatattggaaatgtactgactgattatcgctgggaaggatttctggcagacaaaggattcgatgcggagatgattcaaaagattgccaaagcatccgtgatgcatccggcatgggcagagtatgatcgtggtacctggacggatgaacaggtactggctgcgtttgtaaaagatgcaccacagctggagcaggagctgtatcaggcatttacgagtattgccggaatagtaactccgagagcctatgcaatcccctggctgcaggaattaaaggcaaaaggataccatgtgtattatctgtctaatttttcccacaaggccgaggtagagtgcgcagacgcattgaatttcctgccggagatggagggcggtatcctgtcctataaggagcatctgatcaagccggaaccggagatctatcaattgcttttgaaacgttatggattgaaggcagaagagagcgtattcctggatgataccctgaagaacgtcgaagccgccgaagaacagggaatccatggcatccacttcctgaccaaagagcaggcggaagaggaactgcgcaagcttggcgtggactgctaa

SEQ ID NO: 1412 - DNA, 1221 bp, Unknown
  Unknown gut bacteria
atgtttaaagtaaacgacaactatttaaaacttcccggaagctatttattttccaccatcggtaaaaaggtaaatgcgtattctgcagcacacccggataagaagatcatccgtctgggaatcggagatgtgacgcagcctttggcacctgccatcattgatgcactgcacggtgcggtggatgagatgggaaaagcggagacttttcatggttacgctcccgaccttggctatgagttcctgcgcaatgcgatcgccgaaaatgattataaggcaagaggctgcgatattgcaccggacgagatttttgtatccgacggagcaaaatgtgactgtggcaatattcaggagatcttcagcctggacaataagatcgcggtatgtgatccggtatacccggtatacgtggattccaatgtcatggcaggcagaaccggcacttacgatccgaagtccgagacctggagtgatgtgatctatatgccctgtctggcagagaacggattcgcaccggagctgccgaaggagaccccggatctgatctatttatgcttccccaacaaccctaccggtgccaccattaccaaagcgcagctgcaggagtgggtggactatgcgaataaggtaggtgctgtcattctgtatgatgcggcttatgaagcatatatttccgagccggatgtgcctcacagtatctatgaatgtgaaggagccagaacctgtgccatcgagttccgttccttctccaaaaatgccggctttaccggagtgcgtctgggcttcaccgtgatccccaaggatttaaagagcggggatgtcagtctccatgcactgtgggcgagaagacacggcaccaaatacaacggagcaccctacatcgtacagcgtgccggtgaagccgtatattctgcggcaggtaaggcacagctgaaggagcaggttgcttattacatgaacaacgcacattatatcctgaacggcttaaaagaagcgggatttaccgtatccggcggtgtgaacgctccctatatctggctgaaggcgccgaacggcatgaccagctgggagttcttcgattatctgttagagaatgtcaacgtggtaggtacccccggttccggattcggaccaagcggtgagcattacttccgcctgacggctttcggaagctacgagaataccgtagaggcagtggaccgtctgaagaagatccgactgtag

SEQ ID NO: 1413 - DNA, 732 bp, Unknown
  Unknown gut bacteria
atggaacatggaattttgttatccggtgccgataatatcgattttatgatacatggcgtgtttaagtattcctttttcggtcatgaggtatggataacgaccacacatgtgtgtgtgttgatcgtcatgttgatcatcattggttttgctattgtcgccaaccgctgtatggccaaagccagagaagtgccggaaggctttcagaatgtggtggagctgatcgtggagaagctggacgccatggtggatactcccatgggcaaggcggcaccgaagttctataactacattggaacgatcttcatcttcattctggtgagtaatatttccggtctgctgggacttcgtccccccacagcggattatggtgtgacactgcccctcggcgtactgacttttctattgattcattataaccagttcaagtaccagaagccgaaggaaatctgggaaggcatgtgttccccgctgccgccctggctgccgatctggctgccaatcaacctgatcagtgagatcgctgtaccgatttcgttgtctttacgtctgttcgcaaacgtattgtccggaacggtaatgatggcattgatctacggattgttaggtgtgatcgctacggcgtggcccgcagcgttgcatgtgtattttgacctgttctccggagccatccagacatacgtattctgtatgctgacgatgacttatatcgcaaatgcaagaggagacgcgtaa

SEQ ID NO: 1414 - DNA, 1113 bp, Unknown
  Unknown gut bacteria
atgagaatcaattacaacgtatcggcaatgttatccaacaatgccttatccacaaatgacgatctgctgtccaaatcattggagagactttcttccggactgaagatcaatcacgccaaggacaaccctgccggattggcaatgtccaagcgtatgaatgctcagatcgagggactgtccgtggccaatcagaatgccagtgacggcgtatccattatagagattgcggacggagcaatgacagagatcagtgagatgctgcagcgtatcaatgagctttccgtcaaggctgccaacggcactatgacagaggatgaccgcgcaaccatacaggatgaagtagcgcagctgaaggaagagatcacccgtatctcggataccacggaattcaacgggcagaagctgttgaacggagaatttgatctcaagggatacaccgataagcaggagattaaagtaaattattgctctccggatgtaccggtaaaagaatataccatacagtctatgaaatttaagaaagatgcagagggaaattttgaagtagacggagatattaaattcggagacggatttaaagaggtagaacccttaaagacggatatgaaggataatcttctgacgatcaccggcacgaacggctttgaaatgcgtctggatgtatcggaagcaaaagagggagattcctatgatggcatgaagatcgatgctaccggtatcggagcaatgcgtctgcagatcggagccaacgaaggacaggtactggaggttaatattcccgcggttactctgcagaacatgggaattgaagatattgatgtgaatacgcaggaaggggcaaaggatgccatctcaagagtagacggagccatcaaatatgtatcctccgtccgcggcagactgggagcatttcagaaccgtctggagtcttccattaacagcctggatgttaccagtgagaacatgacagcggcatattcccgtattatggatgtggatatggcggaggaaatgacttcctataccacttatcagatcctggcacaggcaggaacctccatgctggcccaggcaaacgagagaccgtcccaggtgttacagctgttgcagtaa

SEQ ID NO: 1415 - DNA, 1359 bp, Unknown
  Unknown gut bacteria
atgaacataatcattgtgggctgcggcaaagtaggctacaccctggtagaacaattgggaggtgaaaatcacaatatcaccgtaattgatacaaatgaggaaaaagtgaattccatcacggatgatctggatgccatgggcatcgtaggaaatggtgtcagcttccagacactgtccgaggccggcattgaccatgctgatctgctgatcgccgtgaccggatccgatgaacagaaccttctgtgctgtgtcattgcgaaaaaggcgggacattgtaagaccatcgcccgtgtccgcaatccaatctacaataatgagattgcttttctgcgggaagaactggggcttgccatgatcatcaacccggagctgtccagtgcagctgagatcgcccggatcttccagttcccttccgcagttaagatcgatactttttccaagggaaggatcgagcttctgcatttccgcgtgacccatgactgtctcttaaataattatgaactgatccatatccgtaccaccttaaaatgtgatgtactggtatgtatggtcaccagaggtgatcaggtgctgatccccaggggtgattttgtattccgggaaggcgatgtggttgctattgtgtccactcctccaaaggccaatgatttcttcaaaaagatcggtatcggcgccggcagggcacgtactgccatgatcgtcggtggcggaaccattgcttattatctggcaagaagacttttagaagtcggcatccataccaagatcatcgatcaggatcccgcccgctgtgagcatctgagcgagctgcttcccaaggcttccatcatctgcggcgacggtacggatgaacgtcttctgatacaggaaggtctggagaacgtggatgcttttgctgcgctgaccgggctggatgaggaaaatatcctcctgtcactgtatgcgaaacggacttcccatgcaaaggtagtcaccaagatcaaccgtatcaacttcagtggggtcttaagtgatatcaagctggatacgatctcctatccacgcctggtgactgcagatatgatcattaaatacgcacggtccatgaacgaatctctcaacagtaatgtggagaatctgtataagctggaggacggtcatgcggaagcactggaattctacatcaaagaggattctgccgttaccaatgtacctctgaaccgtctgcacatccggaaaaatatcctggtctgttccatcgtccgcggaggacaggctattatccccagtggtcaggatgaactccatgtaggcgattatgtggtcgtagtactgacacatgcacggctgaatgatattaaagatattattgaagggtaa

SEQ ID NO: 1416 - DNA, 2094 bp, Unknown
  Unknown gut bacteria
atgaatatttacacaacagacaagatccgcaacgtagtattactgggccatggcggcagtggcaagaccagtcttgcagaagcctttggttatctgtccggtatcacctctcgtatgggcaaggtagatgacggcaataccctcagcgattacagtaaagaagaacagaaacgtcatttctctatcagtacctccgtgatccccattgagtgggaaggatacaagatcaatattattgatacacctggttattttgatttcgtgggagaagtggaagaggcagttagtgccgcaggagcagccatcatagtagttaacggcaagtctggcatcgaagttggcacccagaaggcatgggagctttgcgaaaaatacaagctgccccgtttcatctatgtttccaacatggatgtggataacgcttccttccgtcaggtagtggaagatatgaccaacctgtacggcaagaagatggcaccgtttcatctgccgatccgtgaaaacgagaaatttgtaggatacatcaatgttatcaccgagagcggtaaccgctgggagggtaaggaagttgttccctgtgacgtaccggattacagccgggcgaatctgcagatctgccgtgataccttaatggaagccgtagccgagaccagtgaagaattcatggagcggtattttggcggagagaccttctctgaagcagagatccgtgcagccctccgtaccaatgtctgtgacggcagcatcgttcccatgaccatgggctctaacattctgtgccagggtatgtacacactgttagatgatattatcaaatacatgcccagccctgagaacagagaagtagcgggtatcaatctgaagaccaacgagatctaccatgcggattatgacttcgcaaaggctaaatccgcttacatttggaagaccatcgtggatccgttcattggaaaatactccctgatcaaggtaaactccggtgtactgaaaacggatgatcttctgtataacgtggatcgtgatattgaagagaagattggcaaaatctatgtattgcagggcaataagcctatcgaagtcagtgaactgcatgcgggagatatcggagcactggcgaagctgacagcagcgagaaccggcaacagtctctcgactaaggcaacgactattaaatacggcaagttcgatatttctaccccttatacctacatgcggtataagccgaagaacaaggccgatgtggataagatatcccaggcattgcagaagatgactcatgaagatctgaccatccgtgtagtgaacgatgcggagaaccgccagacattactttacggcatgggtgaccagcatctggatatcgtggtcagccgtctgttaaacgaatacaaagtagagatcgagctttccaggccgaagatcgcatacaaagagaccatcaagaaacagtctgatgtggaatataagtacaagaaacagtccggcggacatgggcagtacggtcatgtaaaaatgcgtttctcaccttccggcgatctgacgaagccctatgaatttgcaacagaagtcgtaggtggtgcagtaccgaaaaacttcttccctgcagtagaaaaaggtattcaggagtccgtgggcagaggacctctggcggcatatccagtagttggtgtcaaggcagtattgtacgatggctcttaccatccggtagactcttcggagatggcattcaagaccgcagcgattcaggcattcaagaagggtgttatggaagcgggtccggttctgttagagcctatcatgtccctgaaagttacagtacccgatgcttacaccggtgacatcatgggtgatctgaacaaaagaagaggtcgcgtactgggcatgactcccatgagtggcggcagacaggtcatcgaagcggatattcctatgagtggattgttcggttattgtacggatctgcgttccatgaccggaggcagaggcgattattcctatgaatttgcccgctatgagcagacaccttccgatgtacaggagaaggaagtggcagccagggcagcgaaagtagcagagaataacgcagaagattaa

SEQ ID NO: 1417 - DNA, 1557 bp, Unknown
  Unknown gut bacteria
atggaaatcagacatattatgcatactgcccgtagtgtgactatagagatcgcagacggcggcaggtattttacaaaacagcccatagaattacgattaaacggtgagcccaccctcactacagagaagaccatcacttccttgtttgatttaaagccggatcagaaatatgtggtggaagcttacgtgaatggtgaaaagcagggtgaagtatctttcaagacagattatgagtatgtgaccctggatgtgaccagattcggtgccaaaggtgacggtgagcacgacgatacccactttatccaggctgccatcatggcatgcccggtgaacagcagagtgtatttccccgcaggaacctaccgtattaccagcctgttcttaaaaagccacatccgtatcgaactggcagagggtgcggagcttaaggcatttaccgacagagagaaattccccacattccccggcatgctacaaagctatgatgagaccgacgagtacaatctcggcacctgggaggggaatcccttacctatgttctccggcatcatctgcggtatcggtgcagaagacgtggtgatctacggacagggtaagatcaacggcaacgcttctaaggaaaactggtggaaggatcccaaggtcatgaacattgcgttccgccccagactgtttttcatcagcggatgtaaaaatgtgactttacagggagtgaccttctgcaattcaccttcctggacattgcatccctatttcagcaacgatctgaaattcatcggtgtgaccgtgcagaatcccagcgattctcccaacaccgacggactggatcccgagtcctgcaaaaatgtggagatcctgggcgtgcgtttctccctaggagatgactgtatcgcagtcaagagcggcaaaatctacatgggcaaaaagcacaagactccttccgagaacatccacatccgccagtgcctgatggagaacggtcacggtgctgtaactctgggcagcgagatggcaggcggcgtggtgaatctgacggtggaggactgcattttccgtcatacggacagaggcctgcgtatcaagacccgccgcggcagaggaaaagatgcgattctaagcaacattattttccggaatctgaccctggatcatgtgatgacaccgctcgtggtcaactgcttctatttctgcgatcccgacggcaagaccacctatgtccagtccagagatgtctaccctgtggatgacagaacaccgcaggtgaaaaagatggtatttgaaaatatggattgcaccaactgccatgtggcagcagcttattttgacggacttccggagcagaagatcgaggagatctacatgaaggacatctccatcagctatgccgaggatgcaaaatgtgatgtacctgccatgtcggatggtgtagaaaaaagcagtaagagaggactttttgcaagaaatgttgcaaaattgaccctggataacgtgagaatcgaaggacaggttggagaggcttacgagctggaaggcgtggatgagctgatccggcgttga

SEQ ID NO: 1418 - DNA, 840 bp, Unknown
  Unknown gut bacteria
atgactaagaaaaaaacttccaatgtaatcattttttgtatcctgtgtgtgctggtagttgcatttttgacccctattttcttcgtgctgatcaactcctttaagggaaaactgttcatcagtaacaatcctttcgcactgcctaccgcagagacttttgcagggcttaccaactatgtgaacggtattgaaaaaacaggtttcttcacagccttcggatggtctgcttttatcacggtattttctgtggcagcgatcattctgtttacttccatgaccgcttattacctgaccagagtaaaaaccggtgtgaccaacgtattgtattatatgtttgtattttccatgatcgtacctttccagatggttatgttcacgatgtctaagctggcgaatatgactcacttaaataaccctcccggaatggtgcttctgtatctgggcttcggatctggtctgtccgtatttatgttctgcggatttatcaaatctattccgttagacatcgaagaggcagccatgatcgacggctgtaatccgctgcagactttcttcggcgtcgtaatgccgatcctgaagccgactgctatcacagtagcgattctgaacgctatgtggatctggaacgactatttgctgccctatctggtaatcggtctgagtactaattacaaaaccatcccggttgtagtacaatacctggtaggctcttacggtgcaaaggatctgggtgccatgatggcactgttggtattgtctgttatccctatcatcgtcttctatctgacctgtcagaagtacatcatcgaaggcgtggtagccggagcagttaagggttaa

SEQ ID NO: 1419 - DNA, 675 bp, Unknown
  Unknown gut bacteria
atgaaaggaatcgtctgcggaatggagattagtatggcaacaacagaagaattacttcagacgattttacagagcctggagaaagtggaatatatcaaatcagaagacattccgaatattgatctgtatatggatcaggtactgacttttatggatcgaaagctgcgttcggcagtacgcccgcagaccgaggaccgcgtcctgaccaagaccatgatcaacaattatgcaaaaaacgatctgcttcctcctccggtgaagaagaaatattccaaggaacatgttctgatgctcattttcatctattactataagggcgtgattccaatgaatgagattcagacgctgttgcagccgatcaccgatcattattttcaaaatggacaggcatttgacctggaaagcgtatataaagaagtcgtatctttggaaaaggaacagctggaggacttaaaaaaagacgtagtggacaaatttcgcagagcagagaattcctttacggagacctccggagaagaacgagaattcttacagaaatttgccttgatctgtctcttaagttttgatgtctacatgaagaaaatgatcgtggaacagcttgtagcggaactggcaaacgacgcgaaagccagggagcccgaaaaggaaacccacaagaaaaataaagagaaataa

SEQ ID NO: 1420 - DNA, 453 bp, Unknown
  Unknown gut bacteria
ttctgcagccatgaaaataccagagtgatcgattcgagaccggcggaagataacaattccattcgccgtcgccgtgtgtgtgatgaatgcggcaagcgattcaccacttacgagaagatcgaaacgattccgctgatcattattaaaaaggataataacagagaggcgtatgaccgtgccaagatcgaggccggagtactcagagcctgccataaacgtccggtcagcgcacaacagatcacgacgttggtagacgaggtggagaacgagatcttcaaccgggaagaacgtgagatccccagcggaaccatcggtgaacttgtgatgaataagctgaaagatctggatgcggtagcttatgtaagatttgcttccgtatatcgggagttcaaggacgtgaacacctttatggatgaattaaagagtgtcctgaatgacaagaatcacaattaa

SEQ ID NO: 1421 - DNA, 2283 bp, Unknown
  Unknown gut bacteria
atggggttaaagatgaatttagagcagacattaaacgagatcaccggtaaaatgtatggaaaaaatatcggtgcctgcaccgatgcacagctgtacaccggagtactgcagttgaccaaagagaagatggcagagactcctgcaatcaccggagacaagaaagtatattacatttccatggagttcctgatcggtaagctgttatccaacaacctgatcaacttaggcatctatgaggagctgagtgatatcctgaagaaaaacggcaagaatctggcagacatcgaagaggcagagccggaaccctctcttggtaacggtggacttggaagactggcagcatgtttcctggattccatcgctactctgggacttcccggagacggtatcggtctgaactaccacttcggtctgttcaagcaggtattcaaggatcatctgcagaatgctgagaagaacgattggatccagaaggattcctggctgaacaacaccggcactaagtttgaagtagctttcggtgaccgcaaggtgacttccgtattgtatgatattgacgtggtaggttatgagaacggactgaacaagctgcacttatttgatattgagactgtggatgagagcctggtaaagaaaggcatcactttcgataaggaagccattgagaagaacctgactctgttcctgtatccggatgattccgatgaggccggtaacctgttacgtatctaccaggagtacttcatggtatgcaacggtgcccagctgatcctgaaggaagtaaaggaaaaaggctatgatctgcatactctgcctgaacatgtggcaatccagatcaacgatacccatcctaccatggttatccctgagctgatccgtatcctcaccactgaggaaggcttcaccatggatgaagccattgacgtcgtaagtcgcacctgcgcgtataccaaccacaccatcctggcagaagctttggaaaagtggcctctggcttatattgaaaaggtggttcctcagctggttcccatcatcaaggagctgagtgaccgtgtggcaaagaaatataaggacgaaaaagttcagatcatcgataaggataagagagtgcacatggcacacatcgacatccattacggttacagcgtcaacggtgtggcagcaattcataccgagattctgaagcagagcgaactgaatcatttttacaagatttaccctgaaaagttcaacaacaagaccaacggtatcactttccgcagatggctgctgtcctgtaaccatgagctggctgcgttcctgacccagaccatcggcgacggttacaagaaggatgccgaagaattacagaagctgttagagcataaggacgatcaggcggtactggatgctatctatgatatcaagaagaccaagaagaccgagctggtatcctatatcaaggataaggaaggcgtggagctgaatcccgattccatcttcgatattcaggtaaagcgtctgcatgagtataagcgtcagcagatgaacgcactgtatatcattcacaaatatctggagattaagggcggtaagaagccttctacaccgctgaccttcatctttggtgcaaaggctgcacctgcgtatgtgattgctcaggatatcattcatctcctgctggtaatgtccgacattatcaataacgatccggaagtcagcccttacatgaagcttgttatggtagagaactacaacgtaagctatgccgagaagctgatccctgcctgcgatatctccgagcagatctctctggcatccaaggaggcatccggaaccggtaacatgaagttcatgttaaacggtgcagtaacactgggtacaagtgacggtgcaaacgtagagatccatgagctggtaggcgatgacaatatctacatcttcggtaaggatagtgacactgttatcaagcattacgagaaggcagattatgtctctaaggactactacaagaagagccctgtgatcaaggaagcagtggacttcatcgtcagcaaagaagtactcaaagtgggcaaaaaggagaacctggagcgcctgtacaacgagctgctgaacaaagactggttcatgaccctgcttgacttagaagattacatcaaggtaaaggatcaggcattcgctgattacgaggatcagcagaagtggaagaagatgatgttggtgaacatcgccaaggcaggcttcttctcctccgacagaaccatcgcagagtacaacagagacatctggaaattgaaataa

SEQ ID NO: 1422 - DNA, 1101 bp, Unknown
  Unknown gut bacteria
atggcaattacagcatctatggtaaaagagctccgtgaaatgaccggcgctggtatgatggattgtaagaaggctctgaacgagacaaatggagatatggacgcagctgttgaattcctgagaaagaacggacaggctaaagctgagaagaaggcaagtcgtatcgcagcagaaggtgttgcacgtgcagcaatctccgcagacggcaagaccgcttgcgttattgaagtgaactccgagaccgacttcgttgcaaagaacgagacctttacctcttttgtagaggctgttaatggagttgctctggcttccgatttacagggtggcaaggacggtgaagatatcgaagcactgttggctactcctttcgaaggcgcaactgttaaggaagctctggtagagaagaccgctaccatcggtgaaaagctgtctatccgtcgtttcgagaaggtatccggagatgtagcagtatcctacattcacggtggtggacgcatcggtgttatcgttgcagctaacggtgcatccgatgacgcagctagagaagcactgaccaacatcgctatgcaggtagcagctatgaatcctacctacatcagcagaaatgatatttccgcagaagagctggctaagttacaggagattactgttgacgcagctctgaacgatcctgcatctctgcctaagcccatcctgaataagctgatcgataaggctatgaacagttccgcatggagcgatgaggataaggcaatctacgaagagaagaagagcaacatgaactacctgttcaacttcctgtccaaggaagcagcagctgctctggctgagttggctatggctgacaaggacgctatcgtatctgataagatcttcaagtgtctggcagacggtcgtgtatccaagcagctgaaggagatctgcctgttagatcagacctatgttaaggctgaggatggcaagcagaccgtagctaagtatttagagagcgttaacaaggctctgaccatcgctaaggttgttcgtttcgaagttggcgaaggcatggagaagaagaacgaagacttcgcagcagaagttgccgctcagatgaacgcttaa

SEQ ID NO: 1423 - DNA, 4548 bp, Unknown
  Unknown gut bacteria
atgtttgatgtaaaacaggagctgcccaaggcaccgttatatcgggaagaatttgagcatgataactgcggtatcggagcctgtgtcaatattcacggagagaaaagccgcgctactgttgagaatgcgctgaagatcgtagagaatctggagcacagagccggtaaggatgcggaaggtaagaccggtgacggtgtcggtattctgacccagatcccccacaaattttttgcaagagtcacaaaggctctgggcatggatatcggcggagagagagaatacggtgtcggcatgttcttcttccctcaggaagagctgcgccgcaaccaggcgaagaagatgttcgagatcattgtggaaaaggaaggaatggaattcctcggctggcgtgaagtgcccactttccccaatgtgctgggacataaggcagtagagtgcatgccttatatcatgcagggctttgtgaaaaagcccgtcgatgtggaaaaaggtctgcccttcgaccgcagactttacattgcaaggcgtgtatttgagcagtcttccgatgatacctatgtggtctctctttccagcagaaccatcgtatataaaggaatgttcctggtgggacagcttcgtaccttctttgcagacttacagagtgaggattacgaatctgccattgccatggtacattcccgtttctccacgaacaccaaccccagctgggagcgtgcgcatccgaaccgcctgatggtacacaacggtgagatcaacaccatccgcggcaatgccgataagatgttggcccgtgaggagaacatggaatccgagcatctgaaaggacagctgcacaaagtactgcctgccatcagcaagaccggttccgattccgcgatgttagacaacacattagagttcctggtaatgagtggcatggagctgcctctggcagtcatgatcgctatccccgagccctgggcgaacaacaaagcaatgtcccagaccaagagagatttctatcagtattacgctaccatgatggagccctgggacggtcccgcatccatcctgttctccgacggagatatcatgggtgctgtgctggacagaaacggtctgcgtccttcccgttacatgatcacggatgacgataccctgatcctgtcctccgaggtaggtgtgcttcccattgatcccacgaagatcaaagtaaaagaaagacttcgccccggtaagatgcttttggtcgataccgtacagggcagagtcatcgatgacgaggagatcaaagaaaaatatgcttccagacagccttatggagaatggctggacaacaatctgaccgaactgaagagcatccatatcccgaactatcgtgtaccggaatacacctacgaagagcgccagcggatgcagaaggcttttggctacacctacgatgaaatgaagcagagcattctgccgatggcaaagaacggcagcgaagccattgcagccatgggtgtggataccccactgcccgtgctgagcaagacgaatcacccgctgttccattatttcaagcagctgtttgcacaggtgacgaacccgcctattgatgctatccgagaggagatcgtaacctccaccaccgtatacatcggtaccgaaggcaacatcctggaggagactccgaagaactgtaacgttctgaaggtcaacaacccgatcctgaccaacactgatctcttgaagatcaagaacatgaaagtagacggcttcaaggtagaagtcgtacctatcgtatattacaagaacaccagtttagagcgtgccattgaccgactgttcgtggaagtggacagagcttacagagaaggcgtgaacattctgatcctgtccgacagaggcgtggatgagaaccatgtgcccattccttccctgcttgctgtatctgccctgaaccagtatctggtacgaaccaagaagagaaccagagtcgcattgatcctggagtccggcgaacccagagaagtacaccattttgctacgttgctcggttacggtgcctgcgccatcaacccatatctggcacaggataccatcaaggagctgatcgagagcaatatgctggataaggattactatgcagcagtggatgattacaacaatgctgtcctccacggcatcgtcaagatcgcatccaagatgggtatcagcaccatccagtcctatcagggttcccagatcttcgaggctatcggtatcgcgccggaagttatcagtaagtatttctccaacaccgtatgtcgtgtgggaggtattaccttaaaagatattgagcagcaggtagacgacctgcactctcaggcatttgatccgctgggactgaaaaacgatctgaccttaaacagccccggacatcacaagatgcgtagcggcggtgacgagcatctgtataatcccgctaccatccatatgttacaggaatccaccagacgcggtgattaccagatgttcaagcagtacaccgccatggtcaatgacgaagattccatcaagaacctcagaggactgatggactttaactatccgaaaaagggcgtgcccatcgaggaagtagagccggtagaatccatcgtgaccagattcaagaccggtgccatgtcctatggctccatttccaaggaagcccatgagaccatggccatcgccatgaaccatctgcacggcaaaagcaattccggtgagggcggtgaggatctggaccgtctgaccgtaggcccggacggcttaaaccgttgttccgccatcaagcaggtagccagcggacgttttggcgtcaccagccgctatctggtgagtgcacaggagatccagatcaagatggcacagggagcaaaacccggcgagggcggacatctgcccggaggaaaggtatatccctggatcgccaagaccagacactccacacccggtgtgtccctgatctctccgccccctcatcacgacatttattccattgaggatctggcgcagctgatctacgatctgaaaaatgccaacacccaggcaagaatctccgtaaagctggtttcggaagccggtgtgggaaccgtagcagccggtgtggccaaggcgggagctcaggtcatcctggtatccggttatgacggcggtaccggtgcggcaccgagaaactccatccacaatgccggacttccctgggaactgggactggcagagacccatcagaccctgatcatgaatggactgcgtaataaagtccgcattgagaccgacggtaagcttatgagcggcagagacgtagccatcgcagcgattttaggtgccgaggagttcggtttcgctactgctccattggtaacgatgggttgtgtcatgatgagagtatgtaatctggatacctgtccggtaggtgtggctacccagaacccggagctgcggaaaaacttccgcggtaagccggaatatgtggaaaactttatgaaatttatcgcacaggagctgcgggaatacatggcagccctgggtgtgcgtaccgtagatgaactggtgggcagaaccgatctgctgaagagaaaagagcatctgaccgagcgccaggaagaagtggatcttacccagatcttaagcaacccttacgagggcagcaagcagaaggtaaccttcgatcccaggcaggtatatgacttccagttagagaagacactggatgagaaggtgctgttaaagcagctgggcaaagccatcgatgcgggacagaagcgcagtatcgaagtggatgtcagcaacacagaccgtgccttcggtacgatcctcggaagtgagatcaccagaaaactgggcgatgacgtggaagaagatacctatcatgtactgtgtaaaggtgccggcggacagtccttcggagcctttatccccaagggcctgaccctggagctggtgggcgacagcaatgactacttcggcaagggcttatccggcggtaagctggtggtatatcccccacagggcagcaagttcaaggcggaagaaaatatcatcatcggtaatgtggcactgtacggtgcaacctccggtaaagcattcatcaacggtgtggcaggcgaacgtttctgcgtacgtaactccggtgccattgcggtagtcgaaggtgtgggtgatcacggttgtgaatacatgaccggcggacgtgtggtagtcttgggtcccaccggtaaaaactttgcagccggtatgagcggaggcatcgcgtatgtactggatgaaggcaacgatctgtataagcgtctgaataaggaaatggtatcttccagcgagatcacatccaaatatgatgtgctggagctgaaatccatgatccaggagcatgtggcactgaccaactctgcaaagggtaaggaagtgctggataactttggagagtatctgcctaagttcaagaagatcatccctcatgactatgagagagtcctgaagaccatcgtacagatggaggaaaagggactgagcgcagagcaggcacagatcgaagcattctatgccaacactagaaagtag

SEQ ID NO: 1424 - DNA, 2112 bp, Unknown
  Unknown gut bacteria
atagatactatggatctggagcgattacgtcgaacagaatataatcagcagtatattgctgccatgagacccgtatttaacagaagagctctttttacggatacaagtgcggagtatgtgatcccggaagagccggaaccatactccgaggtgacgatccgtttccgtaccgcaaggaacaacgtggacaggatattcctcgtaagcggtggacagaagcatctcatggtacgagtggagagcaataatgattttgattactatgcttatgtgatgcgtctggatgatcagaaggtatcctattactttgaggtacagaccggcaggatcacaggtatcttcgatatgagaggattggtgcaggaggtcaacgagtattatgactttatcatcattcccggcttccatactcccgattgggcaaaaggtgcggtaatgtaccagatctataccgatcgtttctgcaatggcgatccttccaatgatgtgctgaccaatgaatactgctatatcggggagccggtgcaccgtgtagaggactggggacggtatcctgcacagatggatgtccgtgagttctacggaggagacctgcagggcgtattggacaagatggactacctgcaggagctgagcgttgaggtaatttattttaaccctctgttcgtatccccgtccaaccataaatacgatattcaggactatgattatattgatccccatctgggtaagatcgtcagtgatgagggagagctgcttccggatggacagcgggagaaccggtttgcctctcgatatatcgatcgcgtgaccaataaggcgaacttagaggcgagcaacgagatgtttgcccaggtagtggcagaggcgcatcgcagaggcatgagagtcatattggacggtgtgttcaaccactgcggatcctttaataaatggatggacagagaacgtatttacgagaatgcggaaggctatgacaagggtgcttatgtcagcgcagacagcccttaccggaattattttgatttccataatcaggcagcatggccctataacaattcctatgacggatggtgggggcatgataccctgccgaagctgaattacgaaggttctcaggaactgatggattacgttcttcacgttgcaaaaaaatgggtatctccgccctataatgtggacggctggagactggatgtggcggcagacttaggtcacagccaggagttcaatcatcatttctggcaggaattccggaaagcggtaaaagaggccaatccggaggcaatcattctggcagagcattacggcaataccagagactggctgcagggcaacgaatgggatactgtcatgaactacgatgcgttcatggagcccgtgacctggttcctcaccggtatggagaagcacagcgatgactacagagaggatctgctcggtaatgcagagagcttctggggagccatgcggcatcatacctccagtttttctatgcccagctggcaggtggctatgaatgaactgtccaaccatgatcattcccgtttcctgacgagaacgaaccataaggtgggacgtaccaatactttaggcccccaggctgcggagcagggcatcaataaggcagtgttcagggagggcgttgtgatccagatgacctggacgggcgcaccgacgatctactacggagatgaagccggtgtctgcggattcacggatcctgataaccggagaacctatccctggggacatgaggatcaggtgctgttgtcgtttcacaaggatattatccgcctgcgccgtgaaaacgaggaactgcgtaccggttccctgaaaatgctggagaatgattataacttcatctcctacgggcgttttaaccgcaagggacagtgtgcgatcctgatcaacaataacaatcatcccatcaccaaggagatccatgtatgggagatcggggttcctaagacaggtaagatgaaagtgatcctgcaatccagagatgacggatattgcatggaaggcgcggagtatgagatcaaggcagggaagatcctgatcgagatgccccagacttccgcaacgatcctgaagtatgtgcaggaataa

SEQ ID NO: 1425 - DNA, 1227 bp, Unknown
  Unknown gut bacteria
atgaaggaaaaagtagttttagcttattccggcggtctggatactaccgctatcattccctggctgaaggagaattttgactatgaagttatctgtgtctgtgtcaactgcggacaggcagaggagctcgacggtctggaagagagagccaaggcctgcggcgcttccaagctgtatattgaagacgttatcgatgaattctgtgatgattatattgttccctgtgtccaggctcatgccgtatacgagaacaagtacctgttaggtacttccatggcaagacctctgatcgccaagaagctggtagagattgccagaaaagaaggcgctgtagctatctgccacggtgctaccggtaagggtaacgaccagatccgtttcgagttaggtatcaaggctctggctcccgatatcaagatcatcgctccctggagaagcgacaagtggaacatggactcccgtgaatccgagatcgagtactgcaaagcgcatggtatccatcttcctttctccaccgattcttcctacagccgtgaccgtaacatctggcacatcagccatgaaggtctggagctggaggatcccggcaacgagcccaactacgagcatctgcttgtcttaggcgtaactcctgagaaggctcccgatgagggtgagtatgtgaccatgacatttgaaaagggtgttcccacttccgttaacggcgagaagatgaaggtatccgatatcatccgtaccctgaacaaactgggcggtaagcacggtatcggtatcgtagatatcgtagagaaccgtgttgtaggtatgaagtcccgtggtgtctatgagactcccggcggtaccatcctcatggaggctcaccagcagctggaagagctgatcttagaccgtgatacttatgcattcgagaaggaaatgggtgcaaagttcgcaagcctggtatacgaaggcaaatggttcactcctctccgtgaggctgagcaggctttcatcgagaagacccaggaatatgtaaccggtgaagtaaaattcaagctctacaagggcaacatcatcaaggcaggaaccacttctccttactctctgtacaatgagaacctggcttccttcaccaccggtgatctgtatgatcatcacgatgcagaaggcttcatcaatctgttcggtctgtcactgaaggttcgtgccatgaagctgcaggagaacaagaagaagcttggcaactaa

SEQ ID NO: 1426 - DNA, 1422 bp, Unknown
  Unknown gut bacteria
atgagaaaaaccaaaattatctgtaccatcggtcccgccagtgagagtgaggagaaattaagagagttaatgcttgccggaatgaatgtagcacgattcaacttttcccacggaagccataaggagcagctggtaaaatacaacagagtattgaaagtacgtaaggaactgggattgccggtagcaactctgttagataccaagggacctgagatccgtctgcgtgattttgaaggcggtaaggtagagctggtatccggacagcagttcatcctgaccacggaagaaattatgggaaccgtccagaaagcaacgatttcctataagaatctgaaaaacgatatcaaagtcggtacaacgatcctcattgatgacggtctgatcgagatgacggtagaagagatcagaggtgaagagatcgtctgcagagtgatcaacggtggttttgtatccaaccataagggcgtgaatgtgcccggagcaattctgtccatgccgtatatcagtgaagtggatctggcagatattgtgtttggtgtagagcacggatttgactttatcgcagcttcctttgtcagaaccaaggaagatattcaggaagtgcgcaagatcgtagaggacagaggcagcaagatcaagatcattgccaagatcgagaacatgcagggtattcagaatctggaagagatcattaacgtggcagacggtatcatggtagcacgtggtgacatgggtgtcgaaatccctctggaagaagtacctattctgcagaagaagatgatcaagatggcagtggcacagggcaagcatgtaatcactgcgacccagatgctggaatccatgatcaaaaatccccgtcctaccagagctgaggcaacggatattgcaaatgccatctatgatggaacgacagccatcatgctgtccggcgagagtgcagccggtctgtaccccgtagaggcagtgaagaccatgagccgtatcgcagagagagcggagcaggatattgactaccgcggaagaatgcagaaagtcaaggaagacagacaggaaactcccgatattactacggcaatctcctatgcgacctgcagtgtggcttccgatctggatgcagccgccatcatcaccgtaaccatgtccggatttaccgcgaatatgatcgcacgttataagcccggatgccagatcatcggctgtacattggatgagaaggtataccgccagttaaatctgctgtggggtgtaaaacctgtcatgatccagaaggagcggaccacggatgctttgttcgaggaagcggtattcaaggcaaagcaggcaggtctggtgaagaccggtgacacagttgtcattaccgcaggtgtacccctgggtgtggtaggtaagaccgatatgatccatgtggtagaagtggaataa

SEQ ID NO: 1427 - DNA, 1455 bp, Unknown
  Unknown gut bacteria
atcaacggagggctgaaacatatgagcactacttcaaaagcgagtcaaagaataacagctttactcgatgacaacagtttcgttgaaatcggcggacttgtaaccgcaagagctacggatttcaatctgaaacccaatgaaactccttctgacggttgtattaccggctatggagtgatcaatggtaatcttgtatatgtatatagccaggatgcttccgtactgaacggaaccatcggtgagatgcatgccaagaaaattacaaacctctacgatcttgctatgaagaccggagcacctgtgatcggactgatcgagtctgcaggtttaagactgcaggaggcaaccgatgcactggctgcattcggtgaaatttacttaaagcagaccatggcttccggcgtgatccctcagatcaccgctgtattcggaacctgtggcggcggcttaggtctgttccctaccatgacggatttcactttcatggaagagaagaacgccaagctgttcgtgaatgctcccaatgctttggacggcaatgtgatcaccaagtgtgattcttcttccgctaagttccaggcagaagagagcggtatcgttgatgtggtagctgacgaagcaaccattctggagaaggtaagagagctggtaagcttcctgcctgccaacaacgaagatgatgcaagcttcttagaggactgcaccgatgatctgaatcgtgtgaaccctgagatcgcaggctgtgtcggcgacacttccgttgctctgtccattctggcagatgacaacaatttcttcgaagtaaagtccggatatgctaaaaatatggtaaccggtttcttacgtctcgatggtgttaccgtaggtgcggtagctaaccgttccgagatctgcgacgaggaaggcaaagtagcagagaagttagacgctgtactgaccgcagaaggctgcgagaaggctgcagagttcgtgaacttctgtgatgccttcggtatccctgtactgactctgaccaatgtcaagggttatgaggcaactttagcttccgagaagaccatcgccaaggctgctgcaaagctgacctacgcattcgctaacgctaccgttcccaaggtaaacgttgtgatcggcaaagctttaggaaccgcttatgtggtaatgaactccaaggcaatcggtgctgacatcaccatggcatggccggatgcacagatcggtgctatggacggcaagcttgctgccaagatcatgtatgatggtcagggcgctgatgtgatcaatgagaaggctgcagagtacgaggctctgactctgaatgtaaccagtgcagccaagagaggatatgtggaccagatcgtaaatgcagctgataccagaaaatatgtgatcggcgcatttgagatgttattcactaaaagtgaagaccgtcctgccaagaaacacggaactgtataa

SEQ ID NO: 1428 - DNA, 1416 bp, Unknown
  Unknown gut bacteria
atgagcattcaaatctacaacaccttaagcaagagaaaagaagaattcaaacccttagagcccggcaaggtaaaaatgtatgtctgcggacctaccgtatacaacctgatccatatcggaaatgcccgtcctatgatcgtattcgataccgtgcgccgttacatggaatacaagggatatgaagtgaactatgtatccaacttcacggatgtggacgataagatcatcaaaaaagctaacgaagagggcgttgagcccggcgtgatctccgagcgttacattgcagagtgtaaaaaggacatggagggcatgaacatcaagcccgctaccaagaatcccaaggctaccgaggagatcggaggtatgctggacatgatccagaccctgatcgataagggacatgcttatgttgctgcagacggtaccgtatatttccgtaccagaagcttcaaggactacggtaagctttctcataagaatctggacgacttacagggcggtaaccgttctctgttagtctccggtgaggaccagaaggaagatcccttagatttcgtactgtggaagccgaaaaaagaaggcgagccttactgggattcctgttggtgtcagggacgtcccggctggcacatcgagtgctccgttatgagtaagcgttatctcggcgaagagatcgatattcatgccggcggagaggatctgatcttccctcatcatgaaaatgagatcgcacagtccgaggcagccaatgacaagccttttgcaaaatactggatgcacaatgctttcctgaacatcgacaaccgcaagatgtccaaatccctgggcaatttcttcactgtccgggagatctccgaaaaatacgatctgcaggtactgcgtttcttcatgctgtccgcgcattacagaagtccgctgaatttcagcgctgacttaatggaagctgcgaagaacggctatgagagaatcgtcaccagcgtggataatctgaagtttttactggacaaggcagcagataccgaaatgaccggagaagagaagaacttactcaccgaggcacagggtttcgagaccaagttcgacgaagctatggatgatgattttaacaccgcagatgcactggcagctattttcgagctggtaaaattcgtgaattcaaatgccaaggctgagagcagcaaggcattcctggaagcattaaagcaggagatcgtgaccctgtccgatatctgtggactgatcgtggacaaaaaagcagagatgttagacagcgacattgaggcactgatcgaggagcgtcaggcagccagaaaggcgaagaacttcgcaagagccgacgagatccgtgatgaactgttagctaagggcattgtactggaagataccagagagggtgtaaaatggaagagagcataa

SEQ ID NO: 1429 - DNA, 819 bp, Unknown
  Unknown gut bacteria
atgtccggtccctttttggatatactattcgtaacactcacccctcagctgcctgcatggcagagaatggagattattacaatgatcaaaggcagaattcactcattagaatccttcggcgcagtagacggacccggaatccgctatcttatcttcctcaagggctgcaatatgcgttgtcaatattgccacaatgtagatacctggaatcccgacactgacaatctgatgacagcagacgagcttctggataaggcagagcgtttccgcagctactggggcaaagaaggcggcatcaccgtcagcggcggcgaagctttattacagattgattttctcatcgatctcttccgtaaggctcacgagagaggcatcaacaccgaccttgatacttccggacagccttttaccagagaagagcccttcttctccaaattcaacgaattactgaaatataccgatcttgtcatgttggacatcaagcatattgatgatgaggagcacaaaaaactcaccggccataccaacaaaaacattctggactgcgcaagatacctctccgaacagggtatccccatgtggatccgtcatgtgctggtacccggaatcactgacaatgacgaatatctgaagaaaacaagagaattcattgacactctggataccgttatgaaggtagaagttcttccctatcacacattaggggcatacaaatggaaagagctgggaatcccctataagctggaaggtgtggagccccccaccgaagagagaattcagaatgcgaagaagatcctggagttcaataaatataaataa

SEQ ID NO: 1430 - DNA, 1320 bp, Unknown
  Unknown gut bacteria
atgtcaaaagtagtgaaattcggtggaagctctctggcaagtgcagagcagttcaaaaaggtaggaaatatcatccgtgcggataaggagaggaaatatgtggtaccttccgcaccgggaaaaagattttccaatgataccaaggtgacggatatgctgtatgcctgctatgatctggcagatcagggcaagaacttcaaagcagatctggatgccattaaggcgcgtgaccaggagattatagatggtttacagctggatctggatcttagtgaagagttcaagaccatagagaagaatttcaaggcaaaatccggaaacaattatgcagcttcccgtggcgaatatctgaacggtatcatcatggcaaattacttaggctatgatttcattgatgcggcaactgtaattttcttcgatgaaaacggtgagtttgatgcagcgaagaccaacgaagtacttcgtgccagactggcagagagcaaggaagcggtagttcccggattctacggttcgatgcctgacggaacggtaaagaccttctccagaggcggatccgatattactggttctattgttgctaaggctgccaaagcggatgtctatgagaattggacggatgtgtccggtttcctgatcgcagatcccagaatcatcgatcatcccgaggctattgagaccatcacttaccgcgaacttcgcgagctggcatatatgggagctaccgtactgcatgaggatgccatcttcccggtacgccaggagggtattcccatcaatatccgcaataccaatgcgccggaagacaacggtacctggatcgtgggaagcacctgccagaagtccaaatatgtcatcaccggtatcgccggtaaaaaaggcttctgctctgtgaatattgaaaaagatatgatgaactccgagatcggtttcggcagaaaggtactgcaggcgtttgaggagaacggaatctcctttgagcatgttccctccggtattgataccatgaccgtattcgtacatcaggatgagtttatgcataaggaacagaaagtcgtagcgggaattcacagacttgcaaatcccgatatgatagacattgaatcggatctggcgctgatcgctgtggtaggccgtggcatgaagtccacccgcggtacagcaggcagaatcttctccgcactggcacacaaaaatatcaatgtcaagatgatcgaccagggatcctctgagctgaacatcatcatcggtgtggcaaatgatgatttcgaaaccgcgatcaaggcaatttatgatatctttgtaattacaagactataa

SEQ ID NO: 1431 - DNA, 954 bp, Unknown
  Unknown gut bacteria
atgttacagaaactacgacaatggataagaaaattatcctttcccatcagtctgctgcttatgggagtcctgttttttacatggacggacaactggcaggtgtatacggatccccttcgggaattgtataacaggggtgtgcagctggcaggcggtgcccggatgggtcatacatcggaacccggacaacaggacggaaccgtatcgggggatacggtcccggaaggcacagaagatcccacaggggaaagtcggacaccggcagtcggagagacatcggcagatacgcagacagagacaatgacaacggaggaaccacaaccgacagagccttcggaagaactgccgaaagaagtggtctaccatacggtggatgacagctattttgatgatgctgtatttatcggggattcccggacagtgggaatgtatgaatacggtggactggaagagacctccacattttatgcctctaccggacttacgatttataagatgttcgattcgaaaatagtagcggtgccggggcagaagaaaaagatcacggtggaagaggcactatccgagaagcagtttgccaagatctatcttatgatcggcattaatgagatggggaccggtacggtggaatctttcatgaaggcttacggggaggcagtacagcatttgcaacagctgcagcccgatgcggtgatctacctgcaggcgatcatgaaagtgaccacggagcgctccgggcagggagattatattaccaacgagggcatcgaagccaggaatgaagaaatcgcgaagcttgcggatgatgagaagatattttacctggatgtgaatccgctgatctgtgatgagaccgggggaatggtggcctcctatacttatgacggagtgcacctgaaagcccagtatattcccatctggctggactttttgaaacagcatgcagtggaataa

SEQ ID NO: 1432 - DNA, 552 bp, Unknown
  Unknown gut bacteria
catgaggaggacattatggcaaatacagagaattgccctaaggttggcattgtaatgggtagtgattccgatatgcctgtgatggcgaaggcagcagacattttggaagaattgggcatcccttatgagatgaccgtgatcagcgctcacagagagccggatgtattttttgagtatgcaaaaagtgcggaggaaaaaggcttcaaggtgatcattgccggtgccggtatggcagcacatctgcccggtatgtgcgccgctattttcccgatgcctgtcatcggtattcctatgcataccacttccctgggaggcagagattctctgtattccatcgtacagatgccctcaggcattcctgttgccacagtagccattaacggcggcgccaatgcaggacttctggctgccaagattctggcaacctccgacgcagaacttctcggaaaactgaaagcatacagcacaaaattaaaagaacaggtagaagccaaagatgcaaaactgcaggagatcggctataaagcatacctggaaggcatgaaaaaataa

SEQ ID NO: 1433 - DNA, 1734 bp, Unknown
  Unknown gut bacteria
atgacagcattattaatcgttgtagccgctattgtactgttgtttatcggctatgtgttctatggctcctggctggcaaaacagtggggcatcgatcctaccaagaagactcctgcaattgagaaggaagatggtgtggattacgtcgcagctaagcctgccgtacttatgggtcatcatttttcatctatcgccggagcaggcccgatcaacggaccgattcaggcttccatcttcggatgggttcccgtattcctgtggtgtatcatcggtggtattttcttcggcggtctgcaggacttcggatctttattcgcatctatcagacatgacggtaaatctgtaggtgagatcattgaggattccatgggatccagagctaagaagcttttcatcatcttcgcacttctggtgctgatcctggtaatcgcttccttcgttaacattgtggcaggtactttcctgaccctggcgggtgatgccggcaagaccgctttcggttttgtgaccaatcctaccggtaatcagtctaccgcaatgatctctctgctgttcatcgttctggctgttatttatggttatgtgaccaacagaatgggcgttaagactctgcccgctaccatcggtggtatcatctgtatcgtagctattactgttttaggtctgaacgttggatttgcaatgaaccgtatcgcatggatcgtatttgtaggtgtttacatcgcagtggcttccctggttcccgtatggatcctgttacagccccgtgactacctgtccagtttcctgctgtatgctatgatcggtctggcattcatcggtgtcgttgccggtgctttcaccggtactgtcgcattcgatatccccgcgtttaatggctgggagcccaaggcaggacagacattgttccctatgctgttcatcactgtagcatgtggtgcatgttccggtttccacagcctgatcgctaccggtacttcttccaagcagttagcaaacgagaaggatgccaaggctatcggttacggctccatgctgatcgagtctgctctgggtattatcgcgctggtagcagtcggtgcagtatatcagaagtatttaaacggtgagttcggatctcccgcagctgcattcgctgcaggtattgcatccatgttcggtaccgagacctccaaggcatacggtacgatctacgcactgctcacactgtctgtatccgtattcgcactgaccagtctggataccggtacccgtctgagccgtttcatgttctccgagctgttcctgaaggaaggcgaagctacttacaaggatgccaagggcgcacgtaaggtgctggcacatcccctgttcggtactgtatccatggtactgatcggctgtatcctcggcggtctgtccttaagccagatctggggtctgtttggtgcagcgaaccagctgcttgcaggtatcgctctgatggcagtagctgcatggctgggtgaagttggtaagaacaacaagatgttcttcttccctatggtattcatgcttgctgcaaccctgaccagcctggtgatcaccgtgatcaacaagtgcaaggcgatcggtgccggcactgctgcatggggtgactggttccagctgttcttcgcagctgcaatggcagttctggcaatcttcctggtagtggaaggtgcacggaccttcgttaagcagatgaaagaaaagaaagcgaaaaaggctgcttga

SEQ ID NO: 1434 - DNA, 606 bp, Unknown
  Unknown gut bacteria
atggatatgaatattgtatgcctggatctggaaggagtactggtaccggagatctggatcgcatttgcggaggccagtgggatcccggagctgaagagaaccaccagagacgagcctgattacgataaattaatgaaatggagaattgggatactgaaggagcatggtctgggactgaaggaaattcaggatacgatcgcgaagatcgacccaatcccgggcgcgaaggaattcttagacgagctgcgctctattacccaggtcatcattatcagcgataccttttcacagtttgccggtcctctgatgaaaaaattaggttatccgaccattttctgtaattctctggaagtagctgagaacggagagatcaccggatttaagatgcgtgtggagaattccaaatatactacggtcaaggcactgcagtccatcggcttccagaccatcgccagcggcgaccgccataacgatctgggtatgatccaggccagcaaggcaggcttcctgttcaagagtactgagcagatcaaaaaggatcatccggagctgccggcatatgagacttatgatgaattgatggcagcgatcaagagcgcactataa

SEQ ID NO: 1435 - DNA, 1026 bp, Unknown
  Unknown gut bacteria
atggattacaagaaagctggagtagacatcgaagcaggctacaagtctgtagaactgatgaagaagtacgtgaaggagaccatgcgtcccgaagtaatgggcggcatcggtggtttctccggagcattttccttaagtgccatcaaagatatggaggatcccgtgctcctgtccggcaccgatggtgtaggtaccaagctgaagctggcatttttaatggacaagcatgataccatcggtatcgactgtgtggccatgtgtgtaaacgatgtggcatgtgcaggcggcgaacctttatttttcctggattatatcgcatgcggacgcaatattcccgagaagatcgctactatcgtaaagggcgtggcagagggctgtaagcagtctgacgcagcactggtaggcggtgagaccgcagaacatcccggactgatgcccgaggatgagtatgatctggcaggatttgccgtaggcgtggtagaacgtaaagatctgatcaccggtgagaatatcaagcccggtgatgtactggtgggcatcgcttcctccggtgtacattccaatggtttttctctggtgagaaaagtattcgatatgacaaaagagagcctggatacctattatgacgagctgggcaagactcttggtgagacactgcttgctcctaccagaatctacgtgaaggctatgaagtctgtgaagaacgcaggtgttaaggtaaagggctgcagccatatcaccggtggtggtttctatgagaacatccccagaatgcttcccgacggcatccgtgcagtcgtgaagaaagacagctacgaagtgcctgctattttccgcctgatgcagaagaaaggcaatatcacagacgagatgatgtataatacttacaacatgggtctgggcatggtactggcactggatcccgcagatgtggataagactatggaagctctgaaggcagcaggcgagactgcttatgtggtaggtacctgtgaggccggtgaaaagggtgtgaccatatgttaa

SEQ ID NO: 1436 - DNA, 2091 bp, Unknown
  Unknown gut bacteria
atgtatcaaagttacaagatggatcttgcaggcagacctctggtggttgatatcaaccgtgtaggtaagcaggcaaacggatgtgcattcatgcactatggtgataccactgttctctgtaccgcaaccgcttccgagaagcccagagacggtatcgatttcttccctctgagtgtagagtacgaagagaaaatgtacgctgtgggtaagatccccggcggcttcaataagagagagggcaaggcaagcgagaacgctattctgaccagccgtgtcatcgacagacctatgcgtcccctgttccccaaggattaccgtaacgacgtaaccctgaacaacatggtaatgagcgtagatcccgagtgtcgtccagagctggtagcaatgatcggtgctgctatcgctacctgcatttctgatattccttttgatggtccctgcgctatgacccaggtaggcatgatcgatggcgagttcatcatcaatcccagccaggagcagtggaagaagggcgatctgaacctgaccgttgcttctaccagagagaaagtgatcatgatcgaagcaggtgctaatgagattcctgaggctaccatgatcgaagctatctacaaggctcacgaagtgaaccagaccatcatcgctttcattgacaagattgtagcagaagtcggcaagaagaagcacgagtacaccagctgtgctgttcccgctgaaatgttcgaggctatgaaggagatcgtatctcctgcggagatggaagaggcagtatttaccgatgacaagcagacccgtgaggagaacatccgcgtgatcaccgacaagctgaccgaggctttcgctgagaacgaagagtggctggctatcttaggtgaggctgtatatcagtatgagaagaagaccgttcgtaagatgatcctgaaggatcacaagcgtcccgatggccgtgcaatcacccagatccgtcctctggcagcagaggtagatatcatcccccgtgtacatggttccgctatgttcacccgtggacagacacagatctgtaatgtatgtactctggcacctctgtccgagcagcagaagatcgatggtctggatgagaacgaagtaagcaagagatatatgcatcattataacttcccttcctattccgtaggtgagaccaagccttcccgcggacccggaagacgtgagatcggtcacggtgctctggctgagagagccctgatccctgtactgcccagtgaggacgagttcccttatgcaattcgtaccgtatctgagacttttgaatccaacggatccacctccatggcttccacctgtgcttcctgcatgtccctgatggcagcaggtgtacccatcaagaagatggtagcaggtatctcctgtggtctggtaaccggcgagaccgatgacgatttcgtactgttgaccgatatccagggactggaagacttcttcggagatatggactttaaggtaaccggtactaccgaaggtattactgctatccagatggatattaagatccacggtctgaccagacctatcgtagaaggcgctatcgcaagatgccgtgatgcaagactgttcatcatggatacctgcatgaagcctgcaatctctgctcccagaacagaggttggcaagtacgctcccaagatcatctccattcagatcgatcccgacagaatcggtgatgtagtaggtcagcgtggtaagaccatcaatgagatcattgcacgtaccggtgtgaagatagatatcaccgatgacggtaaggtatctatctgcggtaccgataaggaaatgatggataaggctctggagatggtgaagatcatcacaactgacttcgaggaaggtcagatcttcaagggcaaggtagtaagcatcaaggagttcggtgcattcatcgaattcgcacccggtaaggaaggcatggtacacatctccaagatcgctaaggagagaatcaaccgtgtagaagatgtcctgaccctgggagacgtagtaacagtagtatgcctgggcaaggataagatgggaagaatcagcttctccatgaaggatgtggctcagcaataa

SEQ ID NO: 1437 - DNA, 1650 bp, Unknown
  Unknown gut bacteria
atggaaaaattgaaaccgaagcttttctcagtgatgaaaagctacacgaaagaacagtttgtaaaagatgtgatcgcaggtatcattgtggcgatcattgctctgcccttatccattgcactggcactggcttccggagtaacaccggaaaagggtatctatacagcaatcaccgcaggctttgtgatctctttcttagggggcagccgcgtacagatcgcaggtcctactgcggcatttgccaccattgttgcaggaattgtagcgaagaacggcatggacggtctgatcatcgcgacattgttagcgggtgtgatcctgatcctgatgggatttttacgacttggtaatctgatcaagtttatcccctatacgatcaccaccggttttacttccggtattgctgtgacgatctttatcggacagatcaaggacttcctgggactgaccattgtcagcgaagagccgctgatcgagaccatggataaactgaaagcagtatttcagttcatctccaccacaaatgtgcaggcactgcttgtaggtgtgatcagtctcctgatcctgatcctgtggcagtatctgccgggcttttgcaagaagattcccccttctctgatcgcagtactggtgggaagtgccatggttgcactacttaacatgaatgtaaatacgatcggagatctgtatgagatttccaataagcttccgtcaatttctctgcccgccttcagcctgaagacggtacagaacgtcctgccggatgcttttaccatcgcgattctggctgccattgagtcattgctttcctgcgtggtagcggacagtatggtgaacagcagacatcgttccaatatggaactgatcgcccagggcgccggcaacattacttccgcattgttcggtgggatccccgccaccggagccattgcgagaactgctgccaatgtgaaaaacggcggacgtacccccattgccggtatggtgcattccgtgacacttttgttgatcctggtagtactgatgccttatgcggcactgatccccatgcccaccattgcagccattctgttcatggtggcttacaatatgtgcgactggcgtaaattcataggtctgtgcaagaccgcacccaagagtgacattatcgttctggtgaccacatttgtactgactgtcgtatttgatctggtagtagcgatagaggtaggtattttactggcagccattctgttcatgaagcgtatgagcgatgtgacggaagtggaaggctggaaatatgtggatgatgaggatgatgcggacagcctgtccttaagagtcgtacctcacaataccatggtctatgaagtgagtggccccttattcttcggcgcagcggacaagatcctgaagatcacattagatgagaaaatgaactgcctggtactgcgtatgcgcagcgtaagcgctatcgacgccacagccatgcacaatctggagcagttatatgcagactgtaaaaagaaaaacatccagatcattctgtcccatgtaggggaacagcccatgcatgtcatggagaagagcggcttcttagataaggtgggcagagaaaatgtctgtgcccatattgatgatgcactggaacgcgcagcaaagctgcagtaa

SEQ ID NO: 1438 - DNA, 801 bp, Unknown
  Unknown gut bacteria
gagaaaggagagtgtttcatgagtatgagtatagtagccggtcttctgattccttttctggggacgactgcaggggcagcctgcgtctttttcctgaaaaaacagattggcggcaacattcagagaatatttaccggatttgctgccggtgtcatggtggcagcttcggtgtggtctttactgatacctgccatggatatgtgtgaagagatgggaaagcttgcatttcttcccgcaatggttggcttcctgatcggtattgtttttttgttgttcatcgatagtctggtgccccatctgcatgtgggcagtgaggctccggagggacataagagcagcctgaaccgtacggctatgctgatgttagccgtgaccattcataatttccccgagggtgcggcttgtggtgctatttttgccggcgtgctgagtggtgacggaacggttaccatggcaggcgccctgacgctggctatcggtattgccattcagaatttcccggagggagctattatctccctgccccttcgcagtgagggtaacaagcggagcagatccttcgcactgggcgtgttgtccggagcggtggaaccggtgggcgcaatacttgccattgcactggcaagcattgtgacaccgatccttccgtatatgctggcatttgccgcaggtgccatgatctatgtggtcgtggaggagctcattccggaagccagtgagggagagcattccaacctgggaaccattgcctttgcaattggttttgcgttgatgatgatgttggatgtggcactgggatag

SEQ ID NO: 1439 - DNA, 1764 bp, Unknown
  Unknown gut bacteria
atgattcagtccagaacacataactgtaatgaacttcggatcggcaatgtcggtgagagagtcacactggtcggctggttcgagaacatgagaaaagtcagcaaaaatctcggctttgtcattctgcgtgatttctacggaatcacccagctggtagtagagaccgaggaaatgatgaatgtcatggatggcatcaacaaggagtccacgatctccgtggaaggtgtggtcagagagcgttccagcaaaaatactaatctgcccaccggtgagattgaagtagtgccagacaagatcgagattctgggaaaatgtatttacaatgcacttccctttgaaattaatcagtccaaggatgcagacgagaatgcccgtctgaaataccgttacctggatctgagaaatccgaacatgaagaaaaatatcgtgatgagaagccagatcgtggcagaactgcgtcagagaatgtatgctttgaatttcatggagatcacgactcctatcctgacctgttcttctccggaaggagcgagagattatttggttcccgccagaaatcatcccggcaagttctacgctctgccccaggcaccccagcagttcaagcagatcctgatggcatctggtttcgaccgttatttccagatcgctccctgcttccttgatgaggattcgagagcagaccgttctcccggagaattctatcagctggatatggagatggcattcgcttcccaggaagatgtattctccatcgtagagcaggtacttcctcccgtatttgaaaagtacggcatttataaagaagcttccaaggctcctttcgtacgcatcccttatctggaggctatggataagtacggctccgataagccggatctgcgtattgatctggtgctgacagatgctacggaagtaatgcagggctgcggctttgctccttttgaaggtcagactgtaaaggctatcgttgtagatgatttcactgctacccgtaagcagatcgacgcgatctgtgcagaggtagaggtacagactgcacgtaagggcttctggttccgtgtagatgagaacggagagttcgtaggcggtatctccaagttcttacaggaccgcaaggaagaagtcatcaaggcgttaggccttaagaacggtgactttgtcggtcttgctgcaggcaagaagctggaagcacagaagacagcaggcgtatacagaaagctgttgggtgcagccagcgagaaacatatgaagaaggattgctatgagttctgctggatcgtggatttcccgatgtatgagatcggcgaggagtccggagaactggaattctgccataacccgttctccatgccccagggtggtatggacgcgctgaacaatcaggatcccttagagatcctggcataccagtacgatctggtctgcaacggtgtagagctgtcctccggtgcggtgagaaaccatgatccggagatcatgatcaaggcattcgaactggtgggcttaggtgaagccgatgtgaaggctaagttccctgccatgtacaatgcattctgctacggagcaccccctcatgcaggaatcgctcccggcgtagaccgtatgatcatgctgatctgtggtgaggaaagtatccgtgagatcatccctttcccgatgaacaagaacgcaatggatattatgatgggagcaccgggtacggtagaacagaagcagttagacgaactgcatctggcgatcaccgcaaaaccggaagaataa

SEQ ID NO: 1440 - DNA, 1020 bp, Unknown
  Unknown gut bacteria
atgtcagaaacaaaaaatgaaacaacctatcagcctatgacatttgatgccatcaagatcggattagcttccccggagaaaatccgggagtggtcccatggcgaggtattaaagccggagacaattaactatagaacactgaaacccgagagagacggtctgttctgtgagagaatcttcggacccagcaaagactgggaatgtcattgtggtaaatataagaagatcagatataagggcgttgtctgcgtcagatgtggtgtagaagttcccaaagccagcgtacgtagagagcgtatgggacatatcgagcttgccgctccggtatcccatatctggtacttcaaaggtatcgccagccgcatgggcctgatcctggatctgtctcccagaatcctggaaaaggttctgtacttcgcttcctatattgttctggatccgggaaccaccaaccttgagtacaaggcagtgttgtctgagaaggaatatcaggatgcaagagagacctggggcaacaagttccgtgtaggcatgggtgcggaagctatcaaagagctgctgcaggccattgacctggagaaggatgcagcagaactgaagaccggcctgaaggaatcctccggtcagaagcgtgcccgcatcattaagagactggaagttgtcgaagctttccgtgagtccggaaataagcccgaatggatgatcatggatgtcattcctgttatccctcccgatcttcgtcctatggtacagttggatggcggacgttttgcaacctccgacccgaatgatctgtacagaaggatcatcaaccgtaataaccgtctgaagagactgttagagcttggtgctcccgatattatcgtacgtaacgagaagagaatgctgcaggaagcagtagatgctctgatcgataacggcagacgcggacgtcccgttaccggccccggtaacagagcactgaagtctctgtccgatatgttaaagggtaagaccggtcgtttccgtcagaacctgtta

SEQ ID NO: 1441 - DNA, 1233 bp, Unknown
  Unknown gut bacteria
ttgtatgaactgaacagtatacagaatcagaaagtgaggattaccccaatggcgaatcgtgaagaaaaaagaaatctggagaccatccccgtcggctctctgggcattatttccctgcccggctgtaagcccttaggagaaaaggtagaccagtatcttgtaaaatggagagctgagagagaaagcgagcataaagaatctttggcatttgcaggttatcagagagattcctatctgctggatgcaaaggtgccccgtttcggttccggcgaagcaaaaggtcagatcttagaatccgtccgcggtaccgatctctacctgttagtagatgtactgaactactccatgacttattccctgtgcggtaatgagaatcatatgtctcccgatgatcactatcaggatctgaagcgtatcatcgcagcagtcggtggtaaggcccgtcgtatcacggtcatcatgcctttcctgtacgagagccgtcagcacaagagatcttcccgtgagtctctggactgtgcgctggcactgcaggagctggtaagcatgggtgtagacaacatcatcactttcgatgctcacgatcctcgtgtacagaatgcaattcctctgcacggtttcgagactgtacagcctgcataccaatttatcaaaggtctgctccgcaatgtgaaggatcttcagttagattccaaccacatgatggtcatcagcccggatgaaggcggtatgggacgtgctatttatgtggccaacgttttaggtctggatatgggtatgttctataagagaagagattacacccgcatcgtcaacggtcgtaatcccattgtagctcatgagttcctgggcaccagcgtagagggcaaggatatgatcatcattgatgatatgatctcctccggcgaaagcatgctggaagtagccgctgctctgaaggagcgcaaggcaaataagatcttcgtcttctccacctttggtctcttcaccaacggtctggacaagttcgacaaagcttatgagaacggcatcatcgataaggtactgaccaccaacctgatctaccagactccggaattacttcagagagaatggtacattaactgcgatatgagtaagtacatcgcttacatcattgatactttgaaccacgattcttccatcagtgatctgctgaatccgaatgaaagaattcagaatatcgttgcaaaatataagaagggtgagctgtaa

SEQ ID NO: 1442 - DNA, 978 bp, Unknown
  Unknown gut bacteria
gtattaaccgcagttatggcaatgggtgccctcaccggatgtggcagcacaggaagcaaggataactacaccatcggtattatgcagtacgccgtacacggatctttggataactgtcgtgaaggatttttacagggacttgccgaagaaggtatcgtagagggtgagaacctgacgatcgaatatgtcaatgcacaggcagacaacggaacctccgccatgacagccagcaatttcgtaagtaagaaagtagatatgatctgtgccattgcaactccttgcgccatggcagcatataatgctacaatgaatacagatattcccgtgatctacaccgcagtatccgatcctgtggaagcaggtcttgccaatgaagacggtactcccgtaggcaacatcacaggtacttccgatgcgttagcagtagatgcacagttaaaaatgatccgtgaggtacttcccgaagcgaagaccatcggtatcatctataccaccagcgaagcaaactccatcagcaccatcgcagagtacaaggctctggcaggtaactacggattcgagatcgtggacagcggtgttaccgcaatgtctgaggtggctctggcagcagcggatgtcgcatccaaggtagactgcattaccaacctgaccgacaataccgtagtaagtgcattgcagaccgtactggatgaggctaataaagcaggcatcccggtattcggttccgaggtagagcaggttaaggcaggctgcggggcacccatgggtctggaatatatcgggcctggcaagcagaccggtaagatggcagcgaaagtcctgaagggagaggcaaaggcttctgaactgaacttcgaagtgatctccgagcccagcctgtatgtgaacttcgcagcagcagagaagatcggtctggaattacctgagaactacaagactgatgcttaccagtcctttgatgagatcgtggtacaatag

SEQ ID NO: 1443 - DNA, 1494 bp, Unknown
  Unknown gut bacteria
atgcaagatttcttaaagattaatgacaatgataatgtagtcgtagcattaaatacgattcctgccggtgagaagatcacagtctctgtcggtgacggttctaagaccgttaccgccagagaggagatccccgcaggacataagatggcaatctgtgacattcccgagggcggtgaggtcatcaaatatggttaccgtatcggtaatgccaaggagaacatcgcagagggcagctggatccatactcataatgttaagaccgctttgggagatctgttggagtacacctacaatcccagtcccgtagaggagaagaagacggaagatgtgaccttcatgggcttcaaccgtcccgacggtaaagtaggcgttcgtaacgagatctgggtcatccccaccgttggctgtgtcaacaacgtggcaacagccatcgcaaagcaggccaatgcattcgttaaaggcagtgtggaagaggttatcgcattccctcatccttacggttgttctcagatgggcgacgatcaggagcatacccgtaagattctggcagacctgatcaatcatcccaatgcaggcggtgttctggtactgggactgggctgtgagaacagcaacattgatgtattgaagccttatatcggcgattatgatgagaaccgtgtgaaattcctggtgtgccaggagcacgaggatgagatcgcagactccgtagagatcatcaagggtctgatcgattacgcatccaaattcgagagagagcccatcagcgtcagcaagctggtcatcggcatgaaatgcggcggcagcgacggactgtccggcattaccgcgaaccccttagtaggacgtttctccgatctgctgatttccaagggtggcaccaccatcctgaccgaggttcccgagatgttcggagcagagaccattctgatgaaccgttgtgccaacgaggaactgttccaccagaccgtagatctgatcaacgacttcaagaactacttcaagagccacaatcagaccatctacgagaatccttccccgggtaacaaaaagggtggcatctccactctggaggataagtctttaggctgtacgcagaagtccggtagtgctctggtcaagggcgtactgcagtatggcgataccgtgaagactccgggactgaaccttctgtccgcaccgggcaatgatctggtagcagctaccgcactggcagccgcaggagcacatatcgtactgtttaccacaggacgcggaactcctttcgcatctccggttcctaccatgaagatcgctaccaactcccgcctggcaggcaaaaagtccaattggatcgatttcaatgccggcgtactggtagaggataagaccatggaagaggagactaaggctttgtttgatctggtagtggagaccgcttccggcaggcaggtatgcagcgaggcagcaggcttccatgatatggctattttcaagcagggtgtaactctgtaa

SEQ ID NO: 1444 - DNA, 1299 bp, Unknown
  Unknown gut bacteria
atggaggaagtcatgatagacattaaatttttaagagaaaatcccgaggtggtcaaggagaacatccgcaaaaaattccaggatgaaaagctctccctggtagatgaggtgattgcactggatgccgagagcagaaaggcaaagcaggaagcagatgatctgcgtgcttccagaaaccgtatttcaaaagaaatcggtgcactgatgggtcagggcaaaaaggaagaggcagaagccaagaaagcagaagtagctgctggtgcaaagcgtctggctgaactggaagcttccgagaccgaactgcaggagaagatcaccaagatcatgatggtcattcccaatatcattgatgaatctgtgcctatcggtaaggacgacagccagaacgtagagatcgagaaattcggcgagcccgtagttcctgattttgaggttccttatcatgcagatatcctggatcgtctgaacggtctggacaaggagagcgcaggacgtaccagcggtaatggtttctattatctgatgggtgatgcagcaagaatccattctgcaatgatcagctatgcaagagacttcatgatcgataagggattcacctattgcattcctcctttcatgatccgcagcagcgtagtaaacggcgttatgagtttcgcagaaatggaagccatgatgtataagattgaaggagaggatctgtacctgatcggtacttccgagcattccatgatcggtaagttcaagggtcagatcgtagaagaaaagagcctgcccattaccatgacttcttattctccttgcttccgtaaggaagtaggttcccacggcattgaggagagaggtgtataccgtgtacaccagttcgagaagcaggagatggtagttctgtgtaagcctgaggattccatggactggtataacaagatgtggtcctacaccgtagaattcttccgtagtctggatgtacccgttcgtaccctggagtgttgtagtggtgatctggcagatctgaaagtgaaatcctgcgatgtagaagcatggagtcccagacagaagaagtatttcgaggttggttcctgttctaccctgggtgatgcgcaggcaagacgactgggtatccgaaccaagggtgaaaatggaacttacctggtacacacactgaacaataccgtactggcttctcccagaggactgatcgcattcctggagaataatgtaaatgaggatggcagcgtgaacattcccgtagctctgcgtccttacatgggtggtaaggagaaagtcctgcctaagaaatga

SEQ ID NO: 1445 - DNA, 948 bp, Unknown
  Unknown gut bacteria
atggaacaactattattcagtttgaatgcaacaatccccgtattcctggtcatggtgatcggttatgttttacagcagctgcatgttaccaacgactcttttgtcaaaaccctgaattcattcaattataagatcaccctgcccgtacttttgttcaaggacatgtccactgcagatttttacagtgtatgggataccggttacgtgctgttctgcttcttcgtgaccctgttctgcatcatcatcacctgggtcgtgacaggcattttttataagaacagatcccgcctgggagagcttgtccaggcaagctaccgcagcagtgccgctgtcctgggtatcgcctttatacagaacatctacggaaactccggcatggctcccctgatgatcgtgggtacggttcccctgtacaatatcgctgccgtactgatcctgtccttcaccggaccggatgcgaagggcttcgataaagaatccctgctgaaatccttaaaagggatcatcacgaatccgatcattatcagtatcgccctgggcatgctgtccagcgcctgccggatccattatcccgtgatcatttccaagaccatcagcaatgttgccgtactggctacccctctggccctgatcggcctcggtgccggattcgagggaaaaaaagccttaaggcttttagcccccaccggagtagcaaccgtattaaagctggtagtatggcccgcactgttcctgccgcttgccgtccattttggctttaccggagaaaaactggtggcaatcctcattatgttaggctcccccaccaccgtaagctgttatattatggcgaaaaacatgaaccacgaaggaactttgacttccagcgtggtcgttgccaccacatttttaagttccgttaccctcacggtattcctgtttattttgcggagtctgcaattgatttag

SEQ ID NO: 1446 - DNA, 1287 bp, Unknown
  Unknown gut bacteria
atgagagaaaaagaactgatcgtatatcgtgattttgaggatggggaactgctgtatgacatggcatttctcatgtcccattacgatgatgaatattacaatacagaggacatggcggcactgttttacgagtgtatccatgacctgatcgacctggcgggtaattacggatttcatgggaatctgtggcactgttacctggcaaatcttttggtgaacaacgagaacagctacagctgcggctgcgagatccgcggagagattgccggctccatcaacgatgcggcgctgcatgatatctgcattttcaaggaattctatgattttgattttgctcccatgatggagatacttaaggtgccggaattttccttaatagaaaattatgccagcagcatgcaggagagcaaggtctataataaacggatctgcgccagaatctgtgagctggcggagaagttctgcgcagacggaaccgcagaagatatgaaatccacactgacccagttctataaagaatacggtgtcggtaaatttggcctgcacaagtctttccgcatcacccatgatgaggaaggagtacatatcgttccgattttaaatattgcccacgtgaagctggatgatctggtaggatacgagcttcccaagaaaaagctggtggacaacacagaggcatttgtgaatgggaaaaaggccaacaactgtctgctgtttggcgatgcgggcaccggtaaatcctcaagcatcaaagcgattgccaatgaatattatgacaggggactgcggatcatcgaagtctacaagcatcagttccaggatctgaatgcggtcatcagtcagatcaagaaccgcaattataaattcattatttacatggatgacctaagctttgaggaatttgagatcgagtacaaatacctcaaggcagtcatcgagggcggactggagaaaaagccggagaatgttctgatctatgcgacatccaaccgccgtcatctcatccgtgaaaattacagcgacaaagaggagacccgtgaggatatgcacaccagtgataccgtacaggagaagctgtcgctggtatatcgtttcggcgtgacgatttacttcggcgctcccaataaaaaggaattccagaatatcgtaaagacactggcggagcgatatcatgtggagatgccggaagaggagcttttacaggaggctaataaatgggaactatcccacggcggattgtccggaagaagtgcccagcagttcattgattacctgttaggaaagtga

SEQ ID NO: 1447 - DNA, 1680 bp, Unknown
  Unknown gut bacteria
atgcagttaacgggatcggaaattctggtagaatgtctgaaggagcagggggtagataccgtattcggttaccccggcggagcaatccttaatatttatgacgcactttataagcacagtggggagatcaaacatattctgacttcccatgaacagggggcggcacatgcggcggacggctatgcgagagctacgggaaaagtaggtgtctgcatggctaccagcggtcccggcgccacgaatctggtcaccggtatcgctacggcttacatggattctgtaccgatggtagcaatcaccgccaacgttaccttgcctttactcggtaaggacagcttccaggaggtggatatcgccggcgtgaccatgcccattacgaagcatggctatattgtgaaaaatgtggagatcctggctgataccatccgcaaggcattccatatcgccagaagcggaagacccggccctgtcctgatcgatattacgaaggatgtgacggcagctgcctgtgaatatactcccatgacgattcagccggaggagagagtgacccgttacaccagggaagaactgatgctggtagcggagatgatccacaaggcgaaaaaaccatacatctatctgggcggcggagccatcatttccgaggcaagtgctgaggtggcagaattcgcagagctgatcgatgtaccggtatgtgatactttgatgggtaagggagcctttgatgggaaaagtgagcgctataccggcatgatcggcatgcatggtaccaagacttcgaaccttggagtcagcgaatgtgatctgttggtggcactgggagccagattctccgaccgtgtgaccggtaacccgaagaaattcgcggagaatgcaaggatcatccagctggatgtggatgctgcggagatcaataagaatattcgcgtggacgcttctctggtaggagatctgaagaagactctgacagaattaaatgcctgtctgtccaaacaggaacatccggagtggatggcacatataacggaactgaaggaaaaatatcccctgaaatacgatgacgaaaatctgtcctgcccttatatcatgcaggagattgaccgtgtaacgaacggagaagccatcatcaccacagacgtgggacagcatcagatgtgggcggcacagtattatcattatacgaagccccgtaccttcctgtcttccggaggattaggtaccatgggttacggtctgggagcctgcatcggtgcgcagatcggacagccggataaaatctgcatcaacattgcaggcgacggatgtttccgcatgaacatgaacgaactggctactgccagccgttacaacattcccatcatccaggtggtcatcaacaaccaggtgctgggcatggtaagacagtggcagacactgttctatgggaaacgctattcccagacagtactgaaggataaggtggatttctgcaaggtggcagaaggactgggctgtaccgccatccgcgtgaccaaaaaggaagaagtggcacccgctatcgagaaagccattgccctgaaggcaccggtaatgatcgagtgcatgatcccggaggatgataaggtattccccatggttccggcaggagcccccatcagcgaagtatttgacggagatgatttgaaaaggcagtcctga

SEQ ID NO: 1448 - DNA, 537 bp, Unknown
  Unknown gut bacteria
agaggaaataaacgaaaggcgggacatatgctgcagcagttttacccggatcatgaggcggattccgcctatggcatagattacaagacattatataggaagggttatcgcgggatcatttttgatattgataataccctggtaccccatggggcaccggcgacaccgcaggcgatcgaatttttcggcagactgcgggagctgggatttcagacgcttctattatcgaacaataaggaaccccgggtgaaaagctttgcggacgcggtaggggcttcttatatttataaagcaggcaagccgggaagagacggctatctgcgcgccatggagcagatgcatactacgaaagatactacactttttgtgggagaccagctgttcacggatgtgtggggagccaaaaaatgtggcatcgtgacctatctgacgcgccccatccatcctaaggaagagatccagatcgtactgaagagatatttagaaaaaattgtgctgtttttctaccatagagaatgccgccggaaaggaaagtaa

SEQ ID NO: 1449 - DNA, 1368 bp, Unknown
  Unknown gut bacteria
atgagcgagaagactacactcggcgaaaatggcatttacgatgccagatccttgggcgtgcccaagatgcttctgctgggacttcagcacatgttcgcaatgttcggtgccacgattctggtacccatgctgacaggtctggatgtttccacaacactgttatttgcaggtctgggaactttactgttccatctgctgaccaagagaaaagtacccgcattcctgggttcttcctttgcattcttaggcggttatgccgcgatcgcacctatggcagacggagcggacaattccgcattgcttccttatgcctgcttcggcgtggcctgctcaggtctgctgtatctggtattatccctgttgatcaagatcttcggtaccggcaaggtaatgcgtttcttcccgcccatcgtaaccggccccatcatcattgccatcggtctgaccctgaaccagtccgctatcaacaactgttccgcagactggctgatcgcagtggtcgctattgcactggtagtgatctgcaatatctggggtaagggaatggtgaagatcgttccgatcatcatcggcgttgttggttcttatgtgttggcagctatcttaggccgcgtggatttcacacccgttgcggaagctgcatggatcggacttcccatccactggaatgagactgctttctgggcactgtccgacggcaacacttctttgttaattacttccgtgatcactattatgccgatcgcactggctaccatggtagagcatatcggagatatctccgctatttcttccaccgttggtatcaactatatcaaggagcccggattgcatcgtacgttgttaggtgatggtctggctaccattattgcatccctgttcggtgctcctgcgaataccacttacggtgagaacaccggtgtactgtctctgaccaaggtattcgaccccagagttatccgtattgcagcaggcttcgctgtactgttctccttctctccgaaggtagcagcattgatcggctgtatgcctaccgctacctgcggtggtgtatccctggtactgtacggtatgatctctgcagtcggtgtccgtaacatcgtagagactcaggtagactttaccaagagccgtaacgttatcatcgccgctctgatcctggtattgtccatcggtatcaactacagtgcagcaggcgctatcgcattccatatcggcgagatcaccatcagcctgtccggactggcagtaggtgcgctgaccggtattatcctgaatgcagtactgcccggcaaggactacaagttcgatgaggacaagcccgatgacaccggcgtatgcttcgcggtaaaaggtcaggagaactaa

SEQ ID NO: 1450 - DNA, 654 bp, Unknown
  Unknown gut bacteria
acctcttcacccactaaaataacaagtgttatagaaggacacattgtttgctgtaaatacagcggaatgagagggattatggctcgtaaagagatgatcacgattgacaggatcctggatacggcattcgccatgaccagagaggaaggctttgccaatgtgactgcgagaaaagttgcggcgaaggcgggatgttccacgcagcctattttcagagtatataagaatatggaagaactgtgggatgcggtctatgagagagcaacggcgtattttctggattattacagcctgtatccccgcaccgggaagacacctttttccaacttaggaatggcatacatagcttttgcacgggaagaaagacacctgtttgaacttctgtttgtatccggtgaccagggcagtaagcataagacgaaaagcatgtatgagatcttgaacggtgatgccggaaatgtagtctatgagatcaatctggcgagagtggccggatgcccggaccccggagatctgtttatgaaaatgtggatttttatccatggagccgcctgcatgtctctgaccggagattatgatctgacagatcagcagacgatgcagcttttggaacattcctattatgctttttacaatgagacaatgcgaggttaa

SEQ ID NO: 1451 - DNA, 942 bp, Unknown
  Unknown gut bacteria
cgttgcagatattataaagatgatagaggaacagctttgatagacgggattttaaatgtttataaagaacaggattatacatcatttgatgtcgtggcaaagcttcgcggcatcttaaaacagaaaaagatcggacataccgggacacttgatccaatggcagaaggtgtcctgttggtttgtcttggtaaggcgacaaagctggtagatcttctgaccgaaggagataaatgctaccgtgcgacgatgaagcttggctatgagacggataccgaggatgtgaccggtgagacgactgcggaaggtgatgcagcagtgctcgcgcagctgacacaggcagacgtggaacgtgcaattttgtccttcgttggcaagtatgaccagataccaccgatgtattctgccatcaaaaaggatggaaaaaaattatacgaatatgccagagccggaatcgaggtcaaacgagaaccaagaccggttgagatttatgcaatccaggacattacgaaggaagcggacgatacttacagctttgatgtgtattgttcgaaaggcacgtatatccggtcgttgtgccgggatatcggaagaaaactttcttgtctggctgtgttgtccggtttacaccggaaagaagtgcatggattttctgtgacagatgcattgacgctgcaggagatcgaggtacggcaggcagatggaaccctgcaggacgcaatcctgccagtggatgcacttttgaaacagtatccggcatatgagattaccgaacaggcagagaattatctgagaaatggaaacaagctttctcctcggtttttcaaagatatgggagaaagacgggatacgagaatccgggtgtatcatgcaggcaagtttgcagccttatatgattacaaagaggaagaacagatatacaaaccatttaaaatgtttttatga

SEQ ID NO: 1452 - DNA, 723 bp, Unknown
  Unknown gut bacteria
atggaattgaaaaatgagatagaagaggcacggaattatattttttacgtgtctgattatattgatgtgtctgcaggacatgcatggaagatggactgccggcaggcaatgactgaacagatggtacagaatcttccaaactgcaaggtgatgaaatatacagaatatcatggagaatgtctggatgcagacagtgtgggaattttgttcccatcgaaaatgtgggggatttcccttgcggtatatgcatttttacagaatctgcgggtgtctgcgtcaacctatgtgtatgcagtcgcgatgggagaggtcttatctgcagaagtaaatggaaccgcaaatgtacggatggagacacttggacagtttcaggatatctttgagcgccggagactgggggatatctcagatatttacatccgctgtatcgattacaagcgcgagtttacaacgacggaggagaagctgatgcgctcggtaacaacggcagaacggattgccgatgtgatggagggactgcttttttacagcatgaaggcagtaaaagaacagaagctgcagtttgtcacagacaagcgcacgacagttcggacaaagcatgtggcagagcggaaggaagtgacagctttggtggaaacgaagattttgccgatgccaaatatcaagaatgtatttctggacgatgatttgttgtcggaggttcggatatgccaagctatgtaa

SEQ ID NO: 1453 - DNA, 1197 bp, Unknown
  Unknown gut bacteria
atgaagtttttacatttggcagatttacatctgggaaaaacattgggggattttgatctgaaggatgaccagcggtacatcctgcagcagattttggaaattgcagagacaaagcaggtcgatgcggttctgattgccggagatgtgtttgacaagacggtaccaagtgaaggggcggtgcagatcttggacgaatttatctgtgagttggttgaacggcatttgcaggtctatatgatcagcggaaaccatgattcggacgagcggctgaattttggaagcagcttgtttgaggcaaatgatgtgcatatcgctgccaaatatcaggggaaattatttcatcatgtgatagaggatgcttatggagccgtacatatctatcagctcccgttcgtgaaagcatcgcaggtgaagcgtgcgttcccggaggcaaagatcgagacgtatgaggatgcggtgcgggaggtactggcacacgcagagatcaatcagaagcagagaaatattttagtggcgcatcagtttgtatcaggaaagggcaaagatccaacactgggcggttctgagggtgcattgacgcagcatgttggaacggtagagaaaatcgggtatgactgtttcgatgcatttcgttatgtggcacttggacatatccattcctcgcagagtgtcggcagagaggaagtgcggtatgctggttccccgctcaaatattctctgtcagaggctggcccggtgaagcagattccgggcggcgtgcgcgagcgggatggagcaaagcaggtgccaatcgtgacagtggatggagaaggacaggtgacgatcgagctggagaagctcgttccgctgcgggatctcattcatatccggggaacatttacagagattgtaaaggaagaaaatcaaatcgaacatacagaagattttgtttatgtaacgctgacggatgaggacattgtcccggatgcaatgcggatcatgcgacaatattatccgaacacgataaagctggattatgataattcccgtacgcgagaactttcccatgtggatgtggtacaggcaacacagagccggtcatatgaggaactgatcggtgatttttataagcagatgtatggcgcccagatcagcgaagaggaaatggatatgatgaaggacgttgcgaaggaggtgggaatctatgaagccgactaa

SEQ ID NO: 1454 - DNA, 726 bp, Unknown
  Unknown gut bacteria
atgaagacattgggagttggaatcgtattgatggtggcactgttcttctgtctgccataccatctctacatgaaacaattatggaagaaaaatcctgagaaatcatgggaaaaagcacgcaagtttgtatccggcttcttccggtttgaactgaaactgtccggatgcaaggtgaacgtcatcggaaaagaaaatataccgcaggacggaccggtgttattcgtcggcaaccaccgcagttatttcgacattctgatctatcatgaagcaatcggcaagccgcttggcttccttgcgaaaaaagaaatggaaaagattccgcttctcccactgtatatgcgggatatcggatgtctgttcttagacagagaagatatcaagcagggcttatccgtgatcaagcagggaacggaatacatgaagcagggacattcgatggtcgtattcccagagggaaccagaaaccagaccgacacacttctgccatttcgcgagggcggatataagatggcagagaaatcgaaatccccgatcgttccggtatcgatctgccgttccgatctgatgcttgaatctgcaccaaagaaacggattcacagccatagcgtaacgattgaattcggaaagccgatctatccttgtgaacttcctccaaaggaacgcaaggagcgatatgcagagtttccacagcttatacaggatatgtatgataaaaataacatttag

SEQ ID NO: 1455 - DNA, 1002 bp, Unknown
  Unknown gut bacteria
atgagttattccgcagagattattgattataaagggaaagaggcagttgcactgacagcaggaaagtacaaagcaatcgtggcaccttttttaggcagtaatgtcatccgtatgcaggatgttgaaaatgacattgagattttccgttatgacgaatccctttctgttgaggatctgaagaagagcccggaggtgtatggacttccgaccctgtatcttccaaaccgccttgcaaatggcgtgctgaaggtaagcgatgcaacctatcattttccattgaatgatccgcttggcaaccatattcatggtttcctgcataagcgtgagcatacacttgtgagtgcagccgtggacggcaagaaggcaatcgcaaagacagagtacatatatgacaagaacgatgaatttttcgagacatacccagtcagcttcaaggcagagttcacatttactttgtccgatgacggtctggagtatgcatttacaatgacaaatacatctgacaagcagatgccatatggtatgtgcaaccatacaacgattaacggacctttcacaaaggatggaaatggtctggatatgcgtctgtatatcccggttggcgagaagtgggagctttcaaagtcctgcattccgacaggtgacatgctcgtacagacaaatcacgacagacagtatctgactggttcacaggttccagtgctgcatgatattgacaatgacgtattctttgcagaggaaggaagtctggatggcaagccattctatggcgcagtggcaacggatgctgcaacaggcaagcgtatctgctatgaagtatgtaaggacttcaaattctgggttgtatggaacgatcatggagacaaaggatacttctgtccagagccttgcacatggatcatcgatgcaccaaaccagccaatcccagcagaggaatctggttacaaggagcttgcaccgggtgaatctcatacggtgacggagaagatctataccgcgtaa

SEQ ID NO: 1456 - DNA, 885 bp, Unknown
  Unknown gut bacteria
atgaggaaaactatgacgtggcaggcattgatgaaagaagagttagaacgcctgagacaggcagatattccggaggcggacagtgatatccggcttctggcaatggatgtggcgggctgtacatattcaacactgattctgcgtatggcagaggaagtcacggagaaacaggcacagaggctgcatgcatatgtcacggaacgtatgacacataagccgtgccagtatattcttggaacacaagaatttatgggatacgagtttgccacagcagaggaggttctgattccaagaccggagacggaattgcttgtagaagaagcctgcaggatcgcggaaaattggaaggataccccggatggcagaaaacgccgggtgttagatctgtgttgcggaagtggttgtatcggaatcagtttctcgaagctccggcatggtagagatctggttgagcttgcagatatttcggacgctgcaatcgccctgacgaagaagaaccgggaacggttacaggcagattgtgcagtgatacaaacagatttatttatgcagatcgaaggaaaatatgatatgatagtatcaaatccgccgtacatccggacggatgagattccaaagcttatggcggaggtgcgtgattttgagccgcatctggcgcttgacggaaaagcggatggattgtatttttatgataagattattcgggaagcgagggagtatctctatgaagatggatatattttgtttgaaatcggacaggatcagctggacgctgttcggggactccttgtagagaacggatatacggatataaaaggaatcaaagattatgcagggcttgaccggatcgtgacggcacggtatctgaagtcttgcgttcaataa

SEQ ID NO: 1457 - DNA, 861 bp, Unknown
  Unknown gut bacteria
atgaagccgatcaaagaaggaaaagttcgcgagatctacgacaacggagacagcctgatcatggttgcaacagaccgtatcagctgctttgatgtaatcctgaacaatcaggtaacaaagaagggtactgtactgacacagatgtcaaaattctggtttgatatgacagaggacatccttccaaaccatatgatttccgtagatgtaaaggatatgccggagttcttccagcagccacagtttgatggaaacagcatgctctgccggaaattgaatatgcttccaatcgagtgtatcgtaagaggttatatcacaggtagtggctgggcaagctacaaggaaaacggtactgtctgtggcatcaagcttccagaaggcttaaaggagagcgacaagctgcctgagccaatttacacaccatctaccaaggctgagattggtgatcatgacgagaacatctcttatgagcagagcgtagcgcatcttgagaagtatttcccaggcaagggagaagaatatgcggcaaagcttcgcgattatacaattgccctgtacaagaaatgtgcagagtacgcactttcacgcggtatcatcattgcagatacaaagtttgagttcggtctggacgaggaaggcaatatcgtacttggtgatgagatgctgacaccggacagttccagattctggccggcagaaggctatgagccgggacatggccagccatcctttgacaagcagtttgcacgtgactggttaaaggcaaacgaaggtcataactggacattgccacaggatatcgtagataagaccatcgacaaatatctgcaggcatataagctgttgacaggaaaagatttataa

SEQ ID NO: 1458 - DNA, 1329 bp, Unknown
  Unknown gut bacteria
atgaagaaagttgtaaaattcggtggtagttcattggcaagtgcggaacagttcaagaaggttggggcgatcatttcagctgatgagagtcgcgtctatgttgttccatctgcaccggggaagagatttccggaagatacgaaggtaacagatatgcttctccatgtgtatgagacagcaaaagcaggggaagatattacggaagagatgaaggcaatcaaggcaagatatgatgagattatcacagggcttgcgctgaaagatttctcgctggataaggattttgaagagatcacaaagaagctggtcgagaatccacaggttgattatgcagcgtccagaggagaatttttgaatggtaagattatggctgcatatcttggtgttgaatttattgatgccgcagaggtgattttcttcaatgcagaaggaaatctcaacagctataagacagagaaggttcttagtgagagactgtcgaaggcaccacgtgcagttgttcccggattttacggacttggcaaagatgggaatgtcaagacattttcccgtggcggttcggatgtgacaggatctatcgttgcacaggcaagtcaggcagatgtgtacgagaactggacagatgtgtccggtttccttgtagcagacccacgtatcgttccgaatccaaagccgattaaatatattacttacagagagcttcgtgagctttcttatatgggagcatcggttctgcacgaagatgcgattttccctgtccgtaactgtggtataccgatcaatatccgaaatacaaatgtaccggaagatccgggtacatggattgttgagagcacatgccagaagcaggattatgttgtgacaggtatcgcaggtaagaaggatttctgtacgatatttatctccaaggcaatgatgaattccgagataggctttggaagaaaagtacttcaggcttttgaagaaaatgagatttcgtttgagcatatgccatccggtatcgatactatgacgattgttgttcatgaggatgaattcatgcacaaggagcagcgggtggtatctgcaatccatcgtctggcaaagccggattcagttgagattgagtcaggacttgcgctgattgcagtcgttggacgtggtatgaagtccgcaagtggtactgctggtaagttattcagtgcacttgccaaggatggaatcaacatcaagatgatcgatcagggttcttctgagctgaatattattatcggtgtcagaaacaaagactttgagccggcaatcagggcaatttatgatacatttattgtagataaaaagaagaactaa

SEQ ID NO: 1459 - DNA, 1584 bp, Unknown
  Unknown gut bacteria
atgcgaaaggtattaattgcagatgatgaggtaaaagtgggacagcttgtgaaacgattgatacagtgggatcggcttggactgacctgtattggacttgtgacagacgggcagacggcgtatgaaaagatcttgtccgaatcgccggatattgtgatcacggatatccggatgccggtattgacgggactggaaatgatccagaaggcatccgagcagggcgtgaaatgccattttatagttgtcagtggatataaatactttgactatgcgcaaaaagcgttgaaatatggcgtggaagattatctgctcaagccaatcgatgaggatgagctgaacaggcagctgcaaaagattgtcgcggaagaagaacaacgtgaggataagcagcaacaggtagatcagatagagaaaaaactggaggatagtaaatatctgcgccacaaagaattcctcagacagatactaagccagaaacaggaaaatattgatgccgcgaatacggagtttggacttcagcttgagaacaagtgcttccggggattaaccttcaagcttgaccgggatattgatgccgcagagaatacacagcagatgcagtttgttctccgcaagatcatgcagaaggcagaggatgcattttcggcatgcaccatcgacctgattgcggctgtgcagtcgaatcattccgtgcaggtgctgttaaattatttccagacggagcaggagaatatcgacaaccggattacggattttttcaatgagctgagcgattatctggagaacttccagcattacaggattactgtcggggtgagcagtgaagtcgagagcttcgagcagatcagtactgcgattgagatgagcaaagaggcggctgccagccggctcttcaagggaaacggcagacggatcgaatattgccaggagccgcacactctattttcgccaaaggactttcagaatgaatatgaggaattcgcaaaagcggttgagacaatgcaaccggatgcctgtcagtaccagattcacaaatgcttccggctggcaagcgataaggcactttttgcaagcgaattttatgcaatgggaatgtggctgctccgcagtacttatgacattctggaaatagcagatacatttgatgtggatgtgcagcaggaggtgttggagaatctgtcgacagttgcggatttgagagactatgtgatccgtcaggtgcagcaattgatcaaagagagccgtagtgaacgggaaaaccgcgaacgcaagccggtattggaggcaatcgcctatatgaaagagcattttacagagaagatcacgctggaggatgtagccgcaaccatcggcttcaatacgaattatttctcagaattgtttaagaaagaaaccggtgagaacttctcgaactacctgcttggaatccggatggagaaagcaaagcagatgctccgggacacgaagattccggtgtatgaaatcggcgaaagtgtcgggtataaggatgccaaatatttcagtcagcagtttatgaaggttgtcggtgtgaagccggcagaataccggaagctgtactattga

SEQ ID NO: 1460 - DNA, 912 bp, Unknown
  Unknown gut bacteria
gtggatcaagtacaggaaagttatgacgaatttaatttgaatttcagaatagaagataccgtgatcgtaaatcagacagagatggaaggatttaatgcatttttccttggaaaccagtccacctgtcagcagagtgttgtggagggcgtgcgtgttctgtcttacaagattccggcaacgttgccgctcggtcagttcttgaagaagcagttgtacaagggcgagtttctttcgatcttgtcgaatatattgaatcagttgttgtattttgaagaccgcaatatgccaatcaagaaagtacttctgaacacgaagtatatgtatattgaactgtccaatctgcatgtacagttgatctacatgccgattgagaaggaatttacagactgcaatgtctgtgagtttgtacagaatttcatcagcaagatccggtttgcagatatgcagtgtgtcaattgtgttgaccagatcctgcattatttggatagccggttaatgttctctttgcgtgagttctatacattcattattgaattgcagaaagaagatattttgaaggatgatattgatcttggcgagggcgagacaactgtcttacagcagatgagttacaacaatatcactccatatctcgttcgttccagaacgaacgcgctgattccgattgagaagacagagttcttagtaggaaagtcttcggaatgtgattatcagattccagataaccggaaggtaagccggaagcattgcagtttccgtatcagcaatggagaatgttatatccgtgatgagaactcaacaaaccatacttatgtgaatggaaagatgatccagccgggatttgatgtcatgctgaaaaatgatgactatatccgtatgggtgatgaagagtttaagtattgggtacgataa

SEQ ID NO: 1461 - DNA, 1674 bp, Unknown
  Unknown gut bacteria
atgcacataaaaaatatagcgctgatcgaggagattgacattgattttcacgagcagctgaatattctgaccggagagacgggtgctggtaaatctattatcattggatctctgggaatctgtctgggcggtaaattcccgaaagaactgttgcgggatgacacaaaggatggactggtcgagcttgtattttcggttgaccagccagcaattgtggaagcgcttgagaagctggaggtgacaccggatgaggacggtactttgctgatatcccggcggttatcgccgaatggcagaaccgtcaaccgggtaaatgatacgacgatgacgatcacgcggttaaaagaaatctcatcgcttctgatcgatctgcatgcacagcatgagcagcagacactgttaaagccagcaaagcatctggagatactcgatcgttttggcggggaggatatccagaagttgaaaaaacaggtgcaggaagattatcatatctaccgggaacttgaagaagaaaagaaaaaaggcagcatggacgaggcagagaaaaacaaacgcatggatttcctgcagtatcagattaaggaaatcaaagatgcgaagctggtcgatggcgaggatgtccagttggaacggcagtacaagaaggcggtcaatgcaaaggaaatcctgcaatatgcaaacgacatctatgcactgaccggatatggagctacttctgcgggagaacagctaggacgtgcgatcaaggacatgcgcagactcacggaactggacgaggagcttgccgatgcggctggtatcttagaggatgccgatggtctgctgtcagactttaatcgtgagatcagtgagtatatgaaggatatggagtttgatgaaggacaatttcgtgagatggaaagtcgtctggatcagatcaattccttaaaggcaaaatacggaaattccatttcccggattttggaaagccttgcagctttcgagaaagaatatgatgctctttctggctatgaggagcatatgcaggagattgaggcacaatggaagaaacagacggcgaagcttgaagagagctgccgggtattatccgagcacagacgggcactttcggaaaagctttgtaagaagatccgggagtccttggaggatatgaactttaatatggtccggtttgagatgcggtttgagacatccccgaattattctgcaaatggctacgatgatgcgtgcttctatatctcgacgaatgtaggtgaagcgatgcgtccgctgcatgaggttgcatccggtggtgaactgtcgcgaatcatgctggcaatgaaatcctgtcttgcaaatcaggacgacacaccgacacttgtctttgatgagatcgatgtcggtatcagtggcagaaccgcacagaaggtggcagagaagatgtcgatcctgtcacggcagcatcaggttatctgtatcacgcatctttcccagatcgcagcgatggcagatgcacattatctgattgaaaaaaatgtggaaaatgagaaaacaatttccagcatccggttactttcaaaggaagaggaaattgaagaactggcaagactcatcggtggtgcaaagatcacggagacgacgattcacactgtgaccgagatgaaaggattggcagaacaggcaaaaataaactga

SEQ ID NO: 1462 - DNA, 1179 bp, Unknown
  Unknown gut bacteria
atgaagcagtttgtatttacagaatggaataagaagaagcttggaatcctgttcgaggatggaaaagcgatggagatccggtgttatgaggcggacagtatccttggaaatgtctaccgggcgcgagtctcgaatctatcgccgaacatcaatgcggcgttcgtggatatcaaaaagggcgagagttgttatctgtcgatggatgattaccacggggagaaattaaaggtcggtgatctcgtgacggtgcaggtcgtgcgtgataagatcaagacaaaacgttatgcggtgacgacagatatttccctgcagggagattacgcggtaacgacgctttttgcacctgtcggagtttcttccaagattacagatagtgcaagaaaaaaggaattaaagactttgatgcagaacctgcttatagcagagcaggatgcgcagttctatttggcagaaggaaatgtggcagagatcgagcggataaaaaagcttacacttggtggaattatccggacgcaggcagagcatgcggaggatgctgcgattacgcgggaaatcgaaggacaggcacgactgctttattcgattatgaagaagtccgagtatgcaacacaatatacctgcctgtaccacacggaggtcgaatatatcaaagatatccggcggatgcatgcattgcaggatgtggagatcgtgaccgatattccagaggtgacggaagcaatctcggagatcccactctatacggacgaatatacacttacgcttcggtattcgcttgcaagtctgcttgagaagacgctttcgaagcgcgcatacttaaagtccggggcatatctggtaatcgagccgacggaagccatgacggtgatcgatgtcaatagcggcaagtcaatcaaagggaaaaatgcggaggagcagttcctgaagattaacatcgaagcggcaaaggagattgcaaggcagctccggctgcgtaatatttccggaattgtgatgattgatttcatcaacatgaaggaagaaagtcataatcatgagcttatgaagaatctggcagaatatgtacgcactgatccggtccggacaactgtggtggatatgacgaagcttggacttgtcgagctgacaagacaaaaaggaaaacgtgcattgcacgaggtattttcagaaatcaaatag

SEQ ID NO: 1463 - DNA, 933 bp, Unknown
  Unknown gut bacteria
atggcagtgaaaatcgtaatcgacgccggacatggcggatatgacgccggtgctacgtataatggaagaagagagaaggacgatacgctggcactggcacttgcggtcggtgagatattggaggcacagggatacgatgttgtctacacacggacggacgatgtctacgattcgccagtgcagaaagcgcggattggaaatgaaagcggtgcagatttctttgtatcgattcaccggaattcctccccgacaccaaaccagtacaatggcgtgcagacactgatctataacaacgccggactcaaggcaacaatggcggaaaatgtgaacaaagaattggaacaggtcggctaccggaatatcaacgtggtggagcgaccggatcttgcggtactccggcggacgagaatgcctgcaatcctggtagaagcaggatttatcaacagcgatgtggacaacaatcttttcgatacgaaattctctgagacagcagaggcaattgcgcgcggcatcgatgagacaatccgagatgccggatatacggttgcgcagggagatatgcgaagcgatgttgcacaggtaagtgctcctgtatcagaggaaatgtatatcgctaagtcagagaacgatgcatccggtacgcagatggtaaatgaatattatggaatttcacggacgattccagtatttgcagaagaaacgtcgcaggaaccaaccggctatcagatactgattggcatctaccgggcgtttggaaccgcttcgtatcaggtaaatcggtttatcaatgcaggatacgatgcaatggtatatgaggatgacggactgtatcaggtgcgtgtcggaaattatgatacgatcgaagatgcaattattgcacagcgggaattgcgcgatcgtggatatgatacgctgattgtgcggaaaatgtaa

SEQ ID NO: 1464 - DNA, 969 bp, Unknown
  Unknown gut bacteria
atgaagaaaaaattattaattctgatttccatgttagctatgatgttttccttgactgcctgcagcaatgaggttgaaaagccgtttgactatgatgacagccagatcgtcatcgacacgatgtatctgttcaaccagtatcagaacgtgagcgatgaatatgctgattattatattcaggatggaaccgaattcgagcagtccgcagtaaagggtatcaagcaggcacaggagaccgataaggttggagaattccaggatttctctccttatatcaacggtgttggcatggatttaaatgatgtcaattacaagattgagaatgccgcagactctgtatcggtaactgttacaaacaaggcagcaaacagagatgtggaagtaactgtaaagtttgttgagaatccagattactacatcaagctggatcaggcaaagcagacatacaatgcagatgcagtccgtcaggaaattgcgatgtactatggctcagaagaggagttcttctcccagtatggcagttactattcaagtgtagacgatgttgtacagcagggcatcgacaatgagatgcagggcgtatatcagtatcttccagaggaaatggttgtttcagccgtatactctaaggcagagctgatgaagcaggcaggtatgaatacattgctcggtatgggtactgtatttgtagttttgattttcatctcatttattatttcactgttcaaattccttccagcacttttcgcaaagaagccgaagatcgaagatctcaagaaggaagagagcaagccggcagcaccagcaaaggctgctacaccggcaccagccgcaggcaatctgatgaacgatgcagagcttgtagccgttatcacagccgctatttatgctgctgagggacaggcaggcaatggtgcagtaagtaaggataaactcgttgtacgttcgattcgtcgtgcaagaaaataa

SEQ ID NO: 1465 - DNA, 759 bp, Unknown
  Unknown gut bacteria
atggtttcagtgatcattccatgttacaacgcaagacagtatatatgcgaggcacttgcctccgcggtggcacaggaatatgtgcacgaggtgatactggtggatgactgctcaacggatgattccgtggcatgtgtgcaggcgtggctcgatgtgcacgcggcacagacggcagatatttccatccgggtgctgcagaatgcagaaaatagtggagtcgcggtgtcaagaaaccggggcgtgcaggaggcagacggaaaatatattgcatttttagatgcggatgaccggtttgcaccgggaaaactgaaaaagcaggtggagcttctggaacagacgggagcctgtctttgcaataccgcccgtgtgctgatgacgccggacggaagcctgacacagacgatcatgcataccccggagaaaatcacacttgcagagctggagaaaacgaatgtgatcaactgttcttccgtggttgcaccaagggagattctgctgaaatatccgatgcagcacagcgaggtgcatgaggattatctgacttggcttcagatgctgcgggcatatccatatgcggttggcatcgatgaaccgttgctggagtatcgtttatccgcgcatggaaagtcaaggaacaagctgaaatcggcacggatgacatatcgtacctaccggctggcagggtatccggtatggaaatcctgcaggatgtttctgagctatatgataaatggtttgaaaaagtatgctacgcattaa

SEQ ID NO: 1466 - DNA, 495 bp, Unknown
  Unknown gut bacteria
gagaggtggagtatgattagtcccgttatgatgaaaggtaacaaagcggggattcgactgattatatcgccggatgctaccataagtcaggtggttacctgtctttctgataagcttcaaacaaccggaagatattatgcgaacatcaaaccgattaccgttacctttgaaggtaaggatctgacagaggacgaaaaacagcaaatcatcgatacactaaacgacaaaggcattcgcatcggacgcagaccgcgttccatcgaaaagcctaagaagaaatcaatttactccgataaaaacggtctattttatataggcaacttaaagaacggacaatccatacaggcagccgccagcatcgtgattgtcggagatgtggaatcaggtgccagcgttgaatccgagggcaatatcattatcatcggagcactccacggtgctgcaacctccgggtgcaaagggaaacctgatacgttcgtatatagcctgaaatag

SEQ ID NO: 1467 - DNA, 420 bp, Unknown
  Unknown gut bacteria
atgctggaactaattattggagcaaaaggaaacggtaaaacacgcaaaatggtggaaagagcgaacaacgaaagcaagcgtactagcggttctatcatttacattgataagagcaacaagcatatgtatgaactttctaatgtcatccggctcgtcaatctgcacgagtacgatattcaatccccagatgcctttatgggctttattcagggactgatttcttccaaccataatgtaactcacatctttttggataacttcatgatgatgtgtaacatcgaggcagatgcacttggcgctgcattgaaagagattgataagatttccgaaaaatacaatgttacatttgtcatcagtactgccgtggaagaatccatgttgccagcagaatatgcagccaatgttgtctgtaaactgtaa

SEQ ID NO: 1468 - DNA, 441 bp, Unknown
  Unknown gut bacteria
atgggtgtattttcagcgatgaatgtatctgcaaccggcatgacggcgcagcagatgcgaatggatgtaattgcacagaacattgcgaatgcgaacaccacacgtacagagaatggtggtgcataccgcagaaagacagtggtgtttgaagaacaggatacaacatcctttgaccatatgttaaacggctatatgtcaaactatgaaccaaatggtgttaaagtgacaaagatcgtggaagatccatcagatctgcgtcttgtatatgagccggacaatccggatgcaaatgcagatggatatgtggaatatccaaatgtggacacagtaaccgaaatgacgaatctgattgattcaagccgttcttatgaagcaagcgcaacggcatttaatgctgcgaaaaatatcgcggcaaaaggattggaattatttaatagctaa

SEQ ID NO: 1469 - DNA, 891 bp, Unknown
  Unknown gut bacteria
atgtcaatttttacaggttcagcagttgcgattgtaacaccatttaagaaggatggttcggtggattatgataagttccgtgacgtgatcgagtatcagatcgctggtggaaccgactgtatcgttgtatgcggaacgacaggtgagtcttcaaccttatcccatgaagagcatcttgactgtattcgtttctgcgcagaggttgtcaacaagcgtattccggttgttgcaggaacaggttcaaattgtacagagacagctatttatctgtctcaggaagcagaaaagtatggcgtggatggtctgcttgttgtaacaccgtattacaacaaggcaacacagaaaggtctgatcgcacattacacagccgttgcaaacagcgtgacacttccaattataatgtacaacgtaccaagcagaaccggtacgaacatccagccggagacagccgtatatctggctaagaatgtaaaaaatatcgtagcgatcaaggaggcaactggcaatctgtcacaggttgcacgtctggtaagcctggcagatggatgcctcgatgtatattctggaaatgatgatcaggttatgccgatcctgtcccttggtggaaagggcgtgatttctgtacttgcaaacgtagctccgaaggagacacatgatatggtacagaagtacttagatggtgatgtggttggagccagagagattcagatcaaggcaattcctctgtgtgaggcactgttctgtgaggtaaacccaatccctgtcaagaaggcagtggaactgatgggactttgcgaaggcaaccttcgtatgccactgacagagcttgagccagagcatacagagcagttaaagaaagcaatgacaggatttggtgtaaaaatccagtaa

SEQ ID NO: 1470 - DNA, 876 bp, Unknown
  Unknown gut bacteria
atgagatttgtaattgtaacaggaatgagcggagcaggaaaatcaacggtgttgaagatgttagaagatatggggttcttctgcgttgataaccttccggtcatgttaattgaaaaattcgcagagattgcgcatgatgataagcttgaggtcgacaatgtcgctatcggtgtggatatccgaagcgggcaggcactcggtgagatgtccgtgtgtctggagactttgaaaaagcgtaactttacttacgagattcttttccttgatgccaatgaaccggtgcttgtaaagcgatataaggagacacgaagagcgcatccgctgtccaagcatggcaggatcaacgaaggcatcgtcaaggaacgcgagaagatcgagtttttgcgccagcgtgcggattatattatcgatacgagcaatctgcttacaagagagttaaagcatgagattgagaagatatttgtggagggcaaacagtataataacattattgtgactgtgatgtcctttggattcaagtatggaatcccgagagattccgaccttgtatttgacgtacgttttttgccgaatccatattatgttccggagcttcgcccgcagacaggaaatgataaaccagtctctgatatggtgaaggattgcaaagaatatccggcatttatggagaagctcacagatatgctggagtttctgattcccaattatctgaaagagggtaaaaatcagttagtgatttccgtgggatgtaccggaggaaaacaccgctctgtgacagtggcaaatgcactgtacgagacattggagaagcttccgtatacggtacgtctgtatcatagagatattggcaaagaccgtattgtgaaaggggagtag

SEQ ID NO: 1471 - DNA, 666 bp, Unknown
  Unknown gut bacteria
atggagaaaatcattttagcatcacagtctccacgcagacaggagattctgtcgctgggtggatatgaatatgaagtgtgcgtatcttcggcagaggaacagattccaccggaagaattggagaatctgacaccgcaggagctggttgaaaaactggcgcatgtgaaagcggaagatgtgtaccgcagaaactgcagtaagaatatggaaaaatcaacgacagataatcaggcagcagattccgtggaagaaatcacggtgatcggtgcggatactgtcgttgctgtcgatggatgtgtgcttggaaaaccaaagacagaggatgaggcgaagcagatgctcgcacgattgtccgggcggacgcatgatgtattcaccggtgtgtgtattctgtggacagattccgatacgcaggaagagatacatggaaataccttccactgtcatacgaaggtgacattttatccgatgacggaggaagaaattgacaactatgtcgctacgggtgactgtatggacaaggcaggtgcctatggtatccagagcggagccgcgaagtatatccagggcatcgaaggcgattacctgaacgtggttggattgccgttgtcaaaaatttatcacgttttgcgtgagaaattaataaatctcacaataaaaatgtga

SEQ ID NO: 1472 - DNA, 1275 bp, Unknown
  Unknown gut bacteria
atgaaacagtttttcacgatattaaagtttgagctggacaactattttaagagcaagtcatacgtgatatctacaatcctgattgctgttttggcagcgggcatcatgtttgttccgcgtgtcaaggatgcaattacgggagataagaaggattctaccgttcaggacagcgcttcaaaggaggattcttccgcagaggcggatgcagagcatacatacggggtctacgatccggaaggaatattgatcattgacgtggatggctcggtatggggttctatggaaacaggaataaatctggtcagctttgacagtgaggatgctttgaaaaaagcggttgaagaggaagaagcagccgccggatttgcggttcattcgctgtcagactacgattattatgtatataacaagagcatggataattccgatgcggccgtctttgacagctatctggggatgcttgtcaaactggattactgtgagaagcatgatctggatctgaatgaattcatggaggcatcctataaggagattacccatgacgagtatgtgcttggcaaggatagcacacagaatttctggtactgctatgtgctggtaatcctgatatttatgctcatcatcatgtatggcatgagtattgcgtcctctgttacaaatgagaagagcaaccgttccatcgagattctggttaccagtaccgattcaacggcgctgttgttcggcaaagtatttgcaggtgccgtggcaacggtatttcaggtcggaatcattgctgtctgtctgcttggttcgtaccagtacaataaagatttctggggcattgaccttggcatgttcctggatatcccagccaatgtattggttgtatttgcagtattcggtattggcggattcctattttatgcgttcctatacggtgcgctcggggcattggtgtcaaagattgaggatctgaataagtccgccggatcggcacagatgattatcatgattgtatattttgttgtgctgcttcagcttgacaaggtggacggcgtaccgatgaaagtctgttccttcctgccgtttagctcttacagcgccatgtttgcacgtgtggcgatgggacatgtacagacatgggagatcatcgtatctgcggtaattctgtatatttccgttgcacttatgggtgtgatcggcggtaagatcttccggagttcgacattgcgttacggaaatccgatcaagcttacaacagcaatcaaaaacctgcgtaagaaggattcataa

SEQ ID NO: 1473 - DNA, 771 bp, Unknown
  Unknown gut bacteria
atggtatatattgtaatacttgcaatcctgacaggtatgtttataggatttcggagaggatttctgcggtcagtctttaaattgctgatcacgatcctctctgttgtgctgtcatacgttcttgcaccgttgattgcaaattgggtaatttcatacacgacactggatgataaactgcaggcatccattgcatcacagatggaggaaacagcaagacagcaggtgaaaaatcagttagaggcatccgtggggcaatatggcatcacagttacagatgacatggttaatgcagcacttgacacacaactaagtgaaaatcaacaggcagatatgctatatcagatctccatgccggaagatgcaagagaaacgatcctgcaaaatgcctctgcgaatgtagcagattatgcagcgcgctccttttatcaatatgtagcgggatgcttggcaaaaatgattgtgcgggcaggcgtctatgtgctgacgttcctcgtcatcagtctgttgttatttctattatatatgttattgtcccttgcgcttcgcatggcatctcttggcggcttgaaccgggtgatgggagctgtgtttggtggggcacaggtgttagtgtatatatggatggcatttatcatcctgcattatgtcgtgggaacctctgcaggcaatgtattgatgcagcagatacaagataatgtggtgttatcctttatagattcgcacaatttgttgcagccacttgcggatcgtatgattgcgaaaatattctaa

SEQ ID NO: 1474 - DNA, 1224 bp, Unknown
  Unknown gut bacteria
atgattgaagttatctatgataaggacaaggaaaaagacaagcaggaatcaaacgaaaaaaatgagcacgaggtaagcgtgaacctgcgcctgccgaaaaacataagacagatcggatcgccggatggacataagcgcatctatatggaagattatgttgttacatatctgaactatattgcaagaccaggcagcacgcaggcgagaggtgctattttacttggcgaaagcaagaaatcagatgcaggagatgtgatttttatcagtggtgcggtcgaagcacagaatatcgaatttgatatggatgagagtgaatttacacaggagatctggaccgaaatctatgatcaggtcaaacagtttttcccgggactatccgtgatgggatggtttctgtcgcgtatgggattctcaacggcgatcaatgataaaatcgagaagatgcatgtggagaatttcccaggaaaggacaaggtgttatttatcaccgattcacttgaatcagaagatgcattttatatgtatgaacatggacagcttgtaaaacagaagggctattacatttactatgagaaaaatgaggcaatgcaaaactatatcatgaaacaaaagggggatgcccccttggagcagtccgagattcagagaaaagatgaagaaatcgtgcgacaattccgccgcaaaaacaaagatctgccggaaaacaaagataccggagtcggatttgtgtatattgcaagttcttttgtcgtactcgcactcctggcgatgggaatcacaattgtgagcaattatgacaagatgaagcagatggaagtatcaatcaaccggctggaggtcacggcggatacgacagtggatacggattatgtagaagcgatggcgacgacagagctgccagtggcaactggaaatgatgcagctgcgagcacagacacaacggaaggaactgcggttgatccagcgcaatcggataacacagttaccacggagacttctgcagaacctgctgagacggaatctgtgacaacggaaacgatattgccagtagcggcagagcaggatcagtattatattattcaggagggggattcactaagctccattgcatttacacggtatggggacgccgatttggcggcgaaaatcgctgaggcaaatgacattggaatcgatgacaacatctttgttggacagaaaatactcctaccaaacctccagtaa

SEQ ID NO: 1475 - DNA, 1626 bp, Unknown
  Unknown gut bacteria
atgaaatttgcacatattgcagatgttcatctagggacgagaagagaaacaccgtatctgtatgacggatttttaaattttattgactacatggaactgcatccggtggatatgatttttattactggagatctgtttgatcatgtaccgacgaaggaggatattgtattcgttgatacacagctggcgcgactgacaaagacagacattctctgtgtgacgggagaatgcgattatctgggaaaggacagcatcctttggaattatgagtttgtatcgcggatgtatctgctgaattgtgaagatttccataatcatgtgccagaaggggaacgtgcggaacggaattcctatgcggaagggattttggatagtctgcattttacaaaatataatgttgatgtctacggaatctgtcagtacagcccacagaatgagagaaatgatttcgatggtgtgtatgccagaaacctccgggcaatcaacattttccttggacatggaggtagtacaaatgtctgtccatttgaggttgaagatttcggagggaagcattttggttatatcggtctcggacacagacatcagtatctggcatttgagaagcagcatgtatattatccgggaagtttggagccgatcaatgaggacgaaaccggagaacatgggtttatctatggatatatcgacaagcagttgacgagtgtgaaatttgttccaatcgcgatgcgcagatttgaggagaagaaggaagaaaaaccggagtttgattatgagctgttgcaggaattaaacagggagaacgcatttggtaaatgtctgcagacgtttgaccagaagcagacggagcaggcacagatggcaaagaagaaatatgcggacggcatgttggcaagcttgcaggaactgacgggaaaacaggcattatccatatacacaccgacacaggttgcagaggcgtgggcggagcagcagtcgcagttaaaggcgggactgcaatccttgcagcaggaaattgctgcaaatgagcaggaacaggcggaactcgaggaaaagcttctggcgtgcccggatcagacggggacgacgaatgtgctgcatgaggatattggaaaattgcagtttgatctgtcaaaattagagtttgaggatcagcaggtggacaagaaatacagccggagacggcttgggtttgtcctgtggattgatacgccgcttgcaatcgtattgtctctgcttgtcacggtaggcatgatcgatgtattttttatgcaggcatgggaagcgtggttccggttggtaacaagtctgatcggatttgaaattgcatttacgattataggtttttgcgtgtataatatgacaaagatgctgcggaagaagttgtttggcacggagattcctgtggagacacatgcgcggctgcaaagtcagattcgtttgttggagagtaagattcacgatctgcaattggaagaaagttcaagatttttagatcagaaaaactacgacgagaacagccggaggatgaaagaggtacagaagcagtaccagcaactgttggaaaaatcagaggagatcttgtctgtgctggatgtgaatgctgacaagatggtgaaagaataa

SEQ ID NO: 1476 - DNA, 882 bp, Unknown
  Unknown gut bacteria
atgggattgattattcggactatatttagacagaaattcgcatcaccggagaaaaaactgattttatggggaggattttctatgaaaaaacaaagtgagcatctatttaaaatcggtgagattgccaagatcttgggagtgacacggaaagccatccttgtctatgaagagatgggactgctgacacctgcagtcaaggatgaagcaagcggctaccgctattatactgcggataatatgacgcagattcgtgccatccgctcgttgcagacactgggactttcgctggcggaaatcagagaatattactatgatacagaaacccttgaccgctatcttgaccgcctcatggatcttcgggcaaccttggaccgcaacatccatctgcttcaattgcgcgcggcaaaaccgggagacttaagcgtgcaccgcgtccgcctgcctcggcaggtgtgtttctgccgcagataccagtgtaccgatgcgaaggacgccgccatcaaattgcgggatacctatattgccgcagccagaacaggaaaaatgtccatggggagccgcatgtttactgtacgtgcaggttcctcctgcaaggaactcgatctgctatgctgcatccctgtttcagaagattttgtgggtgaagagcggatggagtttgcggaaatgtctgccttgtgcatctactatcgtggtgcttacgaaggaatcaataccgcgattgacgccctacaggcatatgtacaggaaaataaaattcaggcaaccggcggattccactgtatctatctcgaagggcctcctaaccgcggagaccatacagaagactacatcacgcaggttgccctgcccttctcagagaatagtgagggatgtttgtaa

SEQ ID NO: 1477 - DNA, 1068 bp, Unknown
  Unknown gut bacteria
atgaagcgtattatattaaccggtggcggaaccgctggtcatgtaacacccaatatggctctcgttccaaccttaaaggagcgcggatatgatattcaatatatcggctcttatgatggaatggagaaaaaactgattgaagatatgggcattccatatcacggaattgcaaccggaaagctgcgccgctatttcgatctgcgcaacttctctgatccatttcgcgtgatcaaaggcttcaacgaagcgaaaaaactgatgaaggagttaaagccggatgttgtattttccaaaggcggctttgtctctgtccctgttgttctcgccgcaagtgcgaagaagattccatgtattatccatgaatctgatatgacgccgggacttgcaaacaagatcagtattccaaaggcatccaaggtgtgctgcaacttcgcagagacaatggagaatcttcctgcaggaaaagcagttgtaactggtacaccgatccgtcaggaattatttgccggtgacgctgtaaaagcgatgaccttctgtggctttacagaggttcgtccaactcttctggtaatcggcggaagctctggcagcgtacgtgtcaatgaagcgatccgttcatgtctcccggaactgacgaagaaatataacgtcattcacctctgcggaaaaggaaatatcgacgaaagctataacggaactgcgcattatgtccagttcgactacatcaagcaggagcttgctgacttgctcgcattagcagatatcgttgtctcccgtgccggtgccaatgcaatatgcgaacttctggcactccgcaaaccaagcgttctgattccattatcgcttgcagcgagccggggcgaccagatcttaaatgcacagtccttcgacaagcgcggctacgccaagctgttgttagaggaagacctgacaaacgagtcactgcttgccgcagtcaatgaagtgtacgaaaatcacgatcattacatcaaggcaatggaactttccacgaagtccgacgccatcacgatgatctgtgatatgattgatgagttagcaaacaaataa

SEQ ID NO: 1478 - DNA, 489 bp, Unknown
  Unknown gut bacteria
atggatgtgtggctttcggtactggcgtttgtgcttttccttggctttggtacgggcgcgcttgtctgcgtctctgccgtgaaaaaacagtctgggatcgtcataaagagccggctgcatcacaaattaaatatctctgaggtcgtctatgcgaaccttggacttgtgggacttgttgtgttggtatattttaagatctacatatttgtgcctgcggtattgatgtttgtgttgttcatcgtgctgtccacccggatacagagtggcatcacagaagatggagtgctggtcggaaccacatttatcgaatgggaattcatgcggtcttttctcctggagaaccagggggaggacagcaatgtaatcgtactgaagattcgtgcgaatcgaaaaacatatatcctcgtttgcaaccgggaagaccggtttgcaatcgatgagatattccgaaaaaacaacgtgcgttcaatgggaggaaaccagaaatga

SEQ ID NO: 1479 - DNA, 936 bp, Unknown
  Unknown gut bacteria
atgaagaatatgttgaacttcaagaatttctctgcggaagagctgcagaagattcttgatcttgcactggatatgaagaagaacccggagaagtacagccacgcattggagggcaagaagctctatacgttgtttgagaagacaagtacccgtacattcctttctttcacgacaggaatgacagagcttggcggaacctactacaaccagctctggaaggacagcaactttgttcttggcgagccggtttctgagatcaaatatgtatgccgcaatgtggacatcatcatggcacgtctcgtgaaaaatgagaccgttgagctgttcggtgacaatgtaacggtaccatttatcaatggctgcgataactcgtaccatccttgccagattctggcagatgcactgacgatcatcgagaagtttggtagtctgaatgtcaagttcttatatatcggtgcaaagaacaacgtattcaattcactggtagaattcttctccaagatgaagcagggaactttgtacggacttaccccgcttgtaaatgatactgcctgcggtccagacttctatgaggaagcaaagaagactggttactatgtagagcttgatccgaacatgccgatggacgaagtgaagaaatatgtcaaggatatggatatctgctacaccgatacatggcttgacatggagttctttaacgatcctgcatatcaggataagaagaaagaactcatggataagatgatgccatatcagttgaacgatgagttcttagagggcagtcatgcacttgtcttccacgacatgccaatgcatgtaggcttcgagatttcgaaggacgtggagatgaagaaccttgatcatattctcgatcaggcagaaaacagaagacacgcagaaaaagctgtcatgtatacattgataaaaggaatttaa

SEQ ID NO: 1480 - DNA, 831 bp, Unknown
  Unknown gut bacteria
atgaagctagaacgattaagcgagaatcagatacgttgcacactttataagtcagacttggcagataaggaacttcatttaacggaattagcatatggaacagacaaagccaaagaactgttccgggaactgatgcagcaggcatccagtgaattaggatttgaagtggataatgttccgcttatgatagaagcaatacctgtatcgccagagtgtttgattctggttattacaaaagtagatgatccggaggaactggatacaagattctccagatttacacgtccatcggatgtggatgattcctatgaggacgatgaggaggatgaagattcggatggtggtcttggattggcagatgaagccgatggcgaatccattgtcgaggacaatccggtgaatggactgctgaaggcaatcggcggattggcggaagacttaagtggtctgatgagtggtaagggcgtaaagccggcacagacgaatccatctgcatcggatcgcagaacagagattccgcaggcggtggaacagccggaaatcttccgtatctatgcatttaagaatctggatcaggttatcttgtctgcaaaacttgtaaagggtatctatgacagcgagaattctttgtataagaatccgcgagacagtcgtttttatctgtatatgacgaaggataaaaacacagacaatgagtttgtgaagacctgtaacctgttgggcgaatatagtaaccgggtacgtgcaacgtatgctacaccaagtcacatgcgtgagcattataaactgattattgatgcgaatgcattgcagacacttgcgaagctgtaa

SEQ ID NO: 1481 - DNA, 741 bp, Unknown
  Unknown gut bacteria
atgatattaaagatagcagtatgcgatgacaatgataaggatatagagatcataaaccgggaactcctgctgctggaagaaaaagcaagggaaaagggatgtacctatcagatacaggcatttaaaagcggaaatgatatcctgaagagctttgcgcttgtgcaggacatgcatattttgtttctggatattgatatgccaggaatcgatggaatggagattgcgaaaaggctggagcagacagaacgccgtgtgaaagtaatctttgtgacaaaccatgcagatatggtatttaccgcgattcattacagaccgttccggtttatccggaaggagcgccttcacatagagttggaggaggcgctgctttgcgcgattgaagagattcgggaagaatctttgtatggagagatattcatagaaaaagacgaggcggaaatccggatcagcgatattacatatctggaaagtcagcggcattatgtgatcgtacatttccgaaggaaagatgaccaggtgattcgtgcaaaaatctcggatttttcagaacggctggaacgttatggctttgttcgcacacatgtcgggtatatcgtgaatatccgggacatctattcaatcaatacaaaacgggtgttgctggatgaccggacaccaatcccagtcagtcggaaatatacagagcatgtaagagaaatgcatgcaaagtatgtcaggaggatgtaccatgcaatttcttaa

SEQ ID NO: 1482 - DNA, 513 bp, Unknown
  Unknown gut bacteria
atgtttcagagattttttccaaacgaatattacgacagtacctatcatattgattttcaggcattctatgacaaaggataccgcgcggtactgttcgatgttgacaatacactggtggaacatgatgcacctgccaatgcgcgtgcaaaggcattgatacagaaattaaaggatatgggatatggtgtctgcttcgtgtcaaataacgatgaggaacgtgtaaaatccttcaatgaacaggttggagcaacttatgtatataaggcaggaaaaccgtcagccagaggatatgtgcaggcaatgcagaagcttggtactgaccggacgaatacgttgtttgtcggagaccagatctttactgatatctggggtgcaaacaatgcgcaactttacagcatcttagtacagccgattgcaaagcacgaggagattcagattgtgttaaaacgaatcccggaaaaatgggtgttgcacagctatctgaagaaacatacattgcagacaggaaagtaa

SEQ ID NO: 1483 - DNA, 762 bp, Unknown
  Unknown gut bacteria
atgatgaagaagaaaaagaatgcggatgtcgtagagacggaagctgcagaagcggtgacagaggaaacaaaaacatccaaggacaaaaagccggagacagaaacggcagaggatatcgagaaaaaggcggaagaggaagctgcggagattgaagcatatgacgcagaaggaaatccgatcttaaaaaagaaaaagaagagaaaaagcaagaagaaaaagacacagaaaccggaagaagttaatatcgtgaaggagcttctgagtctgatcatttatatcggaatcgttgttctgatctgttattttatcctgaattttgtaggttgtcgttccaaggtcgatggttcttcgatgaatccgacactggaggataaagataatctgtgggtagataaactgtcgtatacatttggggatccgaagcggtttgatgtcgtgatctttaactatgatgagaacacgacttatgtcaagcgtatcatcggtctgccgggtgagacagtccgtatcgatcagaacggaaatatctatattaacggcaagctgctcaaggagaattacggcaaagagacaatgttgaacaatggacgagctggttcggatgtttatcttggttcggacgagtactttgtgcttggagataaccggaacaacagtatcgatagccgatggtcggatgtcggaaatgtcagccgggaggatatcgtcgggaaggttgtcctgcgaatctatccatttaagagctttggactgattaaataa

SEQ ID NO: 1484 - DNA, 1188 bp, Unknown
  Unknown gut bacteria
atggaaatacaaattgatatgtatcagacattggcactttcggtcgtggtgctgatgcttggacaattcttgaaacagaaaataaatttcctggaaaagttctgtattccatctccagtggtcggtggtttgatcttctcggtactgacttgtattttatatagcacaggggtggtggaatttacatttgatgatacgcttcgggaagtctgtatggtattcttctttacatcggtgggattccaggcgaatctgaaggtgctaaagagtggaggaaaggcacttgcaatcttccttggattagtcattgccctgatttttatgcagaatttactggcagtcggcgtgtcgcatctgatcgggcttgactcgctggtcggactttgtaccggctccattcctatggtcggcggacacggaacagcaggtgcatttggcccggtgcttgaggattttaatgtacagggggcaacgacaatctgtacggcagcggcaaccttcggcctggtggcaggaagcctgatcggtggaccgatcgggaaacgtctgattgagaagaagcatttgctcgatacaatcgtgacagaggatgacagcctgctgatcgaggaagaaaagaagcatgagagacattcgaatatgtatgccgcagctgtgtttcagctgattctggcagtcggactcggtacgattatttctgagcttctgacgaagacgggacttacatttccgatctatatcggagccatgatcgtcgcggcgattgttcgaaatgtcggcgagtattccggaaaatttgacatctatatgggtgagatcaacaaccttggtggtatctgtctgtcgcttttccttggaattgcgatgatcacattgaagctgtggcagctcgcggagcttgcattaccgcttatgatcttgctcggggcgcagcttctgcttatattcctgtacacatattttgtagtattccgtgtgatgggaaaggattatgacgcggcagtgcttgcggccggaacatgcggattcggtatgggtgcgacaccgaatgctatggcgaatatgcaggtgctttgtgaccgctatgcgccatcggttaaggcgtatctgcttgtaccgttgatcggaagtttgtttgcggacttcattaacagtctggtgattacgttgttcatcaatattatatag

SEQ ID NO: 1485 - DNA, 1398 bp, Unknown
  Unknown gut bacteria
atgggtgacacaaatgatggagcagtcagagatgcgaaaaagcttggattaccgaaggttttgattttgggattacagcatatgtttgcaatgttcggtgcaactatcttagtcccaattttagtgtccgggtattttgcagatgcatgtggggagccattgacgagaggtctgactgtatcagtcacacttttctgtgcaggctttggtacattgcttttccatgtatgttcgaagtttaaagtaccggcgttccttggatcttcgtttgcattcttaggtggattttcaaccgttgccaacctggataccggtaaattcgccgatatggcagcaaatgacaaggtagcttatgcctgcggtggcgtggtagcagccggtgcattgtatctggttatggctttgattatcaagctggttggcgtaaaccgcgtgatgcgtttccttccaccggttgtaaccggaccgatcattatctgtatcggactttcgcttgcaccatccgcaatctcaaatgccagcacaaactggtggcttgcggtaatcgcgttagcggttatcatcatcttcaatatctgggggaaaggcatgttcaagatcatcccgattttgatgggtgttttgatttcttacgtggcagcagtgatcatgaatgcggcaggacttacgaatccggatggcagtgcgatcatcgcattcgagtcggtgaaatccgcaagcttcttcggtgtaccacagttccagtttgcaaaattcgatctcacatcgattctggttatggcaccaatcgcaatcgctgcgatgatggagcatgtgggtgatatgtcagctatttctgcaaccgttggcaagaactttattcaggacccgggtctgcaccgtacattagttggtgatggtcttgcaactgcattcgcaggagcaatcggaggaccggcaaacacaacatacggtgagaacacaggtgtattagagctttccaaagtatacgatccgatggttgtccgtctggcagccgtatttgcaatcgtgctgtccttcattccgaagttcgcagctgtcatttccacgatgccatcagcgattatcggcggtgtatccttcatgctatatggtatgatttcagccatcggtgtgcggaatgtcgttgagaataaggtagatctgacacgttctagaaacctgattattgctggtgtgatcttcgtctgtggacttggtttctcaaaaggtatcacatttacaatcggggagacatctatcacactgacagcacttgctatcgcagccattgcaggcatcctgttaaatgcgattctgcctggaaatgattaccagtttggtgtaaatccggatggtgaccagagccgtggtgtctttgtgaagtctaaggaataa

SEQ ID NO: 1486 - DNA, 942 bp, Unknown
  Unknown gut bacteria
atgatagagacagttgtatccgtagatctgatggtggaagaagaactgaaggtgaagaaaaatcatctggcaccggattttcctacgggagaagaaaagagaatctgtatcgtatccggattgtacggggatgagctgcagggacagtatatctgctatgaggtaattcgccggatcaagctggagtatgaaaatctgaccggaattgtggatgtgtatccggcattaaatccgatgggactggattcgaaaacaagagagattccgggttccggtattgacatgaattccatatttccaggatcaaagctaggtgcattgggggaatatacggcgtcctgcattttcgatgatatcaagggtgcggatgtgtgtattgatctgcatgcaagtaacctgtatgtacatgaggtaccgcaggtgcgtatgaatgatgaccgggtggatgaactgatgccaatcgctaaatgtctgaatgttgacatgatctggattcatccaagtaattctgtattaaatggcagtcttgcgtattccttaaatgaagttggcgtgcgctcggttgtgatcgagtccggcgtagcctatcggatcaatcagcagtattgcaatgcaatcgtggacggtttgtttgcactgatgaaggagatgggaatctggaagggaaacacggtgactccaaagaaggttccgatcacaaacgataaggatatccggtatatcaatgcagagagcagtggtatctttattccgggagtacagttatttgcacaggtaaaaaagggggacgagcttggaacggttgtcaacgtgatcactggagccgtggaagaggtcgtgtatgccacaggagatggcatgatctgttcattacgtgattatccggtcattgaggaaggttccctgcttgcaagaatcgtgggaggaaacgcctatgaataa

SEQ ID NO: 1487 - DNA, 777 bp, Unknown
  Unknown gut bacteria
atgggaacaaaaatcaaagagtttcgtcaatataacaatttatttacggagcttgtcagaaaaggaatcaaattaaaatacagacgatcctatcttggaatcgtctggtcgatgatcgagccattgcttacgatgatcgtattgacattggtattcggtacgctgcttggacacaaggagaaatcatttccggtctatatcctgaccggacggctgatgtatacgctgttttcacagtcaacgacgtctgccttaaagtccatccgtcagaatgaggcgatgatcaagaaggtgtatgttccgaaatatctgtatccgcttgcgaatatctgtttcaattacattttgtttctgatctcgcttgttgtgcttgcggttgttgcactagtgctgggcgtgtttccgacatggcgtacactgcttgccatcgtaccgctgctcaatctgttcctgttgtccattggtgcgggtatgatacttgcgacgatcggcgtgtatttccgggatatggaatatctgtggaacgttgcgttgatgctgattatgtatacctgtgcgattttctattacccaaagaagattttgaatagtaatgtaagctggattttgaaattcaatccgctgttttgcattatcaacaatttccgtaactgtgtgttcggcagggcgatgagtgcgcatatgctgatttattccttcacctttgcatttgtctgcattgtgatcggaatcgcagtattcaataagaagcaggatcagtttatcctgcatctgtaa

SEQ ID NO: 1488 - DNA, 639 bp, Unknown
  Unknown gut bacteria
atggcagacacatttcacgacagaagggagcgtatatttatgaacaaacaggtcattatttcaatcggacgagagtatggaagcggcggacatgtaatcgcagaaataatcgccaagcattacaatattccactttatgacagaaatattctcgacgagctttccaaggaaactggaaattcttacgatgtctataagaaatacgacgaaaagccagcaaatccttttatcaccagaacggtactcggacagtcaaactccgtagaaaagattattgcagaaatgcagtttaatttcctgaaggaaaaggcagaaagcggagaatcctatgtagtactcggtcgttgtgccgaggacatcttacaggataatgatggactgatctccatcttccttgtcggcgacaccgatgtgaagcagaagcgaatcatggaagtcaagcatgtatccgcagacgaggcgctcacaaaaatgaaacgccacgataaaagccggaagcagtatcacaattccttctcctctggcaaatggggcgattcccggtactatgatgtctgcatcaataccagccgccttggtctgaaagcttcagcagaagaactgattcgctatatcgacgccagagtggctgccatgtaa

SEQ ID NO: 1489 - DNA, 1563 bp, Unknown
  Unknown gut bacteria
ttgtcagacgaagcaatcaagtatgtgattttcgctgtaatactcgtggttgcaattctcgttacctggtttttagctattgcgtatcgtaagaatgtggcagaggcaaagcttggtaaggcagaggataaggctagagagattatagatgaagcactgaaagctgcggaggcaaagaaacgtgagacacttcttgaggcgaaggaagaagccatgaagacgaagaatgagattgacaaagaagtcaaggatcgtcggaatgagcttcagcgcatggaaaagcgtgttctttctagagaggaaaatctcgaccggaagaccgaagccgtagagaagaaagaagcttcattatcacgtaaagaggcagaactcacgaagctgaagcaggaagtttcagatttggaagcaaaaagaactcaggaactggaaagaatttccggattaacctctgaacaagcaaaggaatacttattaaagactgttgaagacgaagtaaagcatgaaacagcagtcatgatcaaagaattagaaacacgagcaaaagaagaagcagataagaaggcaaaggattacgttgtgacagctattcagaagtgtgctgttgatcatgtatcagagacaacgatttccttagtacagttgcctaacgatgagatgaagggaagaatcattggtcgtgaaggacgaaacattcgtactttagagactatgacaggtgttgatttaattattgatgatacaccggaagcagttttgctttcaagttttgatccggttcgtagagaagtagccagaatcgcacttgaaaagctgattgtggatggaagaatccatccggcacgtattgaagagatggtcgagaaggctcagaaagaggtcgagactatgatgcgtgaagagggagaggctgcaaccctggaagtcggtgtacatggcttacatcctgaactgatacgtcttcttggtaagatgaagttcagaacaagctatggacagaatgcattgaagcattctattgaggtagctcatttgtccggtttgcttgccggagagcttgggcttgatgttcgtgtagcaaagcgtgcaggtttgttacatgatatcggaaaatctattgatcatgatgcaggtatggaaggttctcacgtatccattggtgttgatctttgtagaaagtacaaggagtcggcaacgattatcaacgctgttgaggcacaccacggggatgtagaaccacagagtttgatcgcatgtattgtacaggctgcagatgctatatctgctgcacgtccaggtgcaagacgcgagacgttggagacatatacaacacgtctgaagtccttggaagacattgccaatggatttaagggtgttgataagacttttgctattcaggcgggacgagaaattcgagtaatggtagttccagagcaggtaacagatgcggatatggtattactcgcacgggatatctcaaagaagattgaatcagaacttgagtatccgggcacaatcaaggtaaacttgatccgagagtcgagagtaaccgattacgcaaagtaa

SEQ ID NO: 1490 - DNA, 852 bp, Unknown
  Unknown gut bacteria
gatggtatgaagattggattgattggagctggcagaatgggctttacgctcggcagacatttatccgatttcgcaaagtcacatgcagagatgctctgtgtggagggcttctatagtcggaatcctgagagtgcgagagaggcagcgagatttactggtacgaaatactatgaagacatggagacattggttcaggcgtgtgatactatatttttaacggttccggacggacaaatcgcgaacgtggcagaaaaaattgcagctagttcggtgtgtctggatggaaaaacgatgattcatacaagtggggctctttcctcacgtatattttctggtatgggtagtcgcgtaagcgggtattcaatacatcctatttatgcagtgaattcgaagacggattcctacatacatttccaagactgttacatgacgattgaaggcgaaggaacgaagacgcaggaactcatatgcctgtttgagaaaatgggacatacgatccggcagatttccgcagaccaaaaggtgaaatatcatgcatcggcagtatttgcaagcaatctggtgatcggactatataagatggggacaacccttctttcggagtgcggatttacaccggaggaggcagagcacgcactgatgccgctctttgcaaataatgcagagaatatggaacgctttggctgcgagaaagcattgacgggaccggtcagccgcggcgatgtggcaacggtggagaagcatctgcaggcactcgacggcgatgcgcgtgaggtgtaccggctgctttcgaagcaattgtgcaatgcggacagtcaggcaattcaaactatattggatatgaaggagtaa

SEQ ID NO: 1491 - DNA, 822 bp, Unknown
  Unknown gut bacteria
atgtcggcgatgcagaataaggagggaatcgttatgaagttagaaatgacacaaaaagacaaaaacctcctgatcatgctttctatattcgtgatcgtagtctgcattggttactggggtatttacccggttgtaaagggtatcgtgaatacgaacaaagagattgcgacacagaaggaaacacaggaagaaaatgagctgaagcttacgcaggtgccgatgatggaggcagataacgagcggttttcaaatgagatacagggagtacgagaatcattcttcccaatgatggaaagtgcagagattgataagtattttactgagcttgtgttaggatataacttgtcagcctatgatctggctatccagatgccacaggaagaaacggctttggagccatatgtatattcgaagcgtgcggcaatgctcgcagcacaggaggaaacggatacgactgaagcaccacagggcgcgaaagcggaacgctctgaaatcgaagcggctgaggagagtggcggtatgtcgacggacagcgaaacgagtgcgcttccggcatttgatgatgaggtaacaacaggtatttataatgcgacggtgacacttcgtctaggcggaaaagagagtgatctgcttcagctgatcgaagatctctcaaacagcgataagaaaatccgtgtgtgcaactattcatggtctgaggagcggagtatcacgaacctgaccgaagaaggtgagtacgatatcaagactgagcgtgttttgacattgacgcttgagatctatatgtacgaggaggtgccggacgatggaaatgcgcagtaa

SEQ ID NO: 1492 - DNA, 1605 bp, Unknown
  Unknown gut bacteria
atgatcaacgatataattgcagaacatagtgcgcggatgcagaatctgaaaaagtactatccgtttttcgtgttgaatgagacgacttttacacagtacaaggaaggtaagtatgcgtttttagatatgggatatatcacgatggcgtccttgcggtttttcatcaatgaaaacaatttccacgaaaaggacgtcacgtatgaagaatatgaggatttcctgcgggaacttctgacgcgggatttcaagctggaagaggaaccggtagagctgcgcgaactgatctcctatatttttgataagattaaaaatgacgggcgggcgtttgagtttcatttctatgatccggaagtgcgggaaaacaaggtcgcacgcgtgaagctgattgacagtcatatcgcgcaggggacggtttattatacgattacgccagagggcattgagttctatctggatacgaaggaaatcaaagacgagagcaagatcaatgtatcccagttgttgcttgagaagatgatcaatgcgaacaacttcaagggcggtatcgatgtggttcgtcggatcaacagtcaggtgatctcgctgattgagcagaaggagcaggtcgtaaagctgcttggagtggatgtgttcgagggtgcaaaggcgtatgaacatttcatggacacgacggcaaagtggtttaccgaagagcagaaattatttgtgaagaacaaggcgctggtcgataaggcgattgaaaaggcagagtttgaacgcgataccgatggaggttcaccgaccctgcattcgaaggcactctcggagatcagccagttggagacagagttaaagaaaacaatctacaatcatagccgcctgatcggtgagacaaccgagctgtcacagttgtccgatcagatcatcaaccgggcgaaattacggaaattaagaccagtctttgattttaagcaggcgttaaatacgatcatgaagctggatcagccggatctgctggcacatgtgctggaaccgctgtttgcgccgcggatggataagtatttcacgatgcggaacatcgacaatatcctgacgcttcgaagtgatgagaagcaggagacagagaagattgaaaagcgggaactgacaccagatttcaagtatgaggacgagattctggaggagaagatcggacgaaacttcgcccacctgttctacgagctctgcgatcagttgaagaagtggaatcgtgttaccttgaaggaatacaatggaatccttgaaataaaatttggcgaggaaatctatacaaaccgcgattactatgcgttcctggtacatttatccgggaagcggtcgtatcgggttgatgaaatgctcgagaagcaggaaacgatgttagaagagatggtcgtcgaacatctgacagaggaagaaaaggaacgcattcgagatattcgattcacaatcacatttggaacggatgaggtagagatcaaaccacagatgcaggatatagaagccgtcgagccgtttgtggtaacggatatgaattttgaaagggaggcagccgaggaatggaacagcgaaatctggaaaaagcattggatgtatatgccgcgttga

SEQ ID NO: 1493 - DNA, 666 bp, Unknown
  Unknown gut bacteria
atgcagggggatgcagggagattcagaatgctgatattaggaattaccggaggcgttggctccggaaaaagtaaaatattatatgacctgtctaatttatatggggcatatattgtcgagaccgataagcttgcccatacgctgatggagccgggacagacagtatatcaggcggttgtggaagcgtttggcacggagattttgcaggcagaggaaccatatgcaatcgaccgggcgaagtttgcacagatcgtgtttgctgacaaagaaaagcttgcacagttaaatgcacttacgcatccggctgtgaaggcatggattcggaaagacatcgaggagaaacggaagcaggacgtgaagatctatgtgatcgaggcggcacttctgattcaggatggatataaggagatctgcgatgaaatctggtatatctatgtcaatgaggagacgcggatcaaacgattgatgaaacagcgcggctataccgaggaacgctgccgtgcgatgttccacagtcaggaaccggaatcatattatagaaaatatgcagatttcactataaataatcaattagactatgaaaattcatcaaaacaactaaaagataggttgaatatcttacttggagatgctataattttaattaatcatgggaaaacagactaa

SEQ ID NO: 1494 - DNA, 909 bp, Unknown
  Unknown gut bacteria
ttgaaaactgtgcggtcgttctatgataaatatcatatggaaatcggaaatatagtgttgatcctggttcttgctatcgtattgttccccagactttctgcagactatgtactgcatcagtttgtgattatcgtactgttgacgatgggactctcgctcgagatgctgagcggtgttttggatttcgcatttatggcggaaatcgcaatgacgacatgcctgggcggactatgcctgcgggcagggtttccggtctgggtgagcttaacggttatgatactggcacagatgttgttcgggatggcaaaggggcttctaatcggcaaaattcgtgtaaaccctattttgctgacttttattttgcaacagatctatcaggggatagctgccgtgttcggggatgcaatacaggcaccaatcccgagggattactatggttcctacatgttttggatgattttttccggtattgcagttgtaatctacgtgttcctgcagttgctgcttacacatacatattatgggaaatacgtacggatgctgggagaaaatgaaacctcagtcaaaaacagcggaatccgttttgatatctgccgcatgattatctgtggaatcagtggtattgtatttgcccaggtggcattgatctttttgttcatcaccaatggcggcagtgccggtattggcaggagatatctgtatccggtaattgcggcagcgtgtcttggcggaataaactttctaaaaggaaaagggaacctgcgcggcactgttttgggcagtctgtccatggtgcttcttctgaatctgtctgcggggctttctctttacagctatttttcttatatctgggaaatcgcaattcttgtaattgcggtggttattttcgcaagggagagaaagaactga

SEQ ID NO: 1495 - DNA, 1050 bp, Unknown
  Unknown gut bacteria
gtgttctatatcggagtcaacatggcaaaaaaagaaaaagcaaatggcatggccattttaaatgaacaaatcaataagaaagaattcagtcgtgtgtatctgcttggtggaacggaaccatatctgatttatcagtatcgggacaagctgattgcggcgatgatcgatccaaacgatacaatgaattttatcacctacaagggtgagaattccaagccagaggatatcattgaatttgcagataccatgccattttttacagaacgcagagtggtgctggtggagaacagcaatttcttcaagaacggctgtgagaagctggaagaagctttagagggactgccagatacgacagtgctgatcttcgtggagaagaatattgacaaccggaagaaactaagcaagcttgtcgcacagcttggtacggtagcaatgtttgatgcaccggacagtgagatgttagctgtctggttaaatggaatgtttgtagaggatcagattgcgatcagcggtgcgacattgcgatatctgatcgatcgagttggaacgagtatgaatctgcttaaaaatgaagcagacaagctccgctcctatgctgtggaaaaaggaagcgtatccaaagaagacattgacctgctttgtgtgaatcaggtggaagacaaaatcttcgatatgattgatgcgatatcagaaaaaaaacagcaaaaggcaatggaattatatgatgatctgctgtatttgcaggaggcaccgatgaagattctcgtgttgatcacacggaacttcatgcagcttctgaagatccggtttgcactggatactggtacaccagagggacagattgcttcggcgttcggcatccgtccgtactttgtgaaaaaatatattgcgcaggcacgctctttcacgaaagagcaactgctttcctgtgtgaggttatgtcaggaagcagatacgagcatcaaaacaggtaaaatgcgggataagcttgcaaccgagatggtgatattagagcttttgctgcatggaggagaaaaacaggaagtatag

SEQ ID NO: 1496 - DNA, 1089 bp, Unknown
  Unknown gut bacteria
atgatttcgaatcagatactgcaggatacggttactggaattaagtcaattacgcgtgtagaactctgtgtgatggataccgaaggtaagatacttgcgacaactatgcgcggaatggaagagtatgaggatgaggttgtgaaattctctgaatcagcagcggacagtcaggtgattcgtggcttccagttttttaaggtgtatgatgagaatgaactggaatatgtcatactggcaaaaggggatgccgaggatgtctatatgatcggaaagatggcaactttccagattcagaatcttctggtggcatataaggagcgttttgataaggacaactttatcaagaacctgttgcttgacaacctgcttttggtggatatttacaaccgtgcgaagaagctgcacattgagacagatgtaaaacgtatcgtgtttattatcgagacaaagacggagaaggataccaatgcattggagacagtcagaaccttgttctccagcaagacaaaggatttcattacggcagttgacgagaagaatattattcttgtcaaggaaataaagccgagtgagacttacgaggacatgcgcaagacggcaaaagtaattgtggatatgctgaatacagaagccatgtcatcggtcaatgttgcatacggtacaatcgtcaacgaaatcaaagaagtgtcccgttcttataaggaagcaaagcttgcactggacgtagggaagatcttttacagcgacagaaagattatcgcatacagcaatcttggaatcggtcgattgatctatcagttgccacttccactttgcaagatgtttatcaaggagatttttgatggtaaatcaccagacgagttcgacgaggagacattgacaacaatcaacaagttcttcgagaacagcctgaatgtatctgagacatcccgtcagctttacattcaccgtaatactttggtttaccgtctggataagcttcagaagagtaccggacttgacctccgggtattcgaagatgccattaccttcaagattgcccttatggttgtgaaatatatgaagtacatggaatcgttagagtattaa

SEQ ID NO: 1497 - DNA, 1293 bp, Unknown
  Unknown gut bacteria
atgagtgcaaccgatgaaattaaaaactattatttaagtcttggcatcaaggaatcggtctacgatttctgcgaagcaaccgaacaggcattgcttccaagatttcaggagatcgaccgcattgcagaacaaaaccagattaaggtaatctctgctatgcagaaagctggattttcagagtcccatttgaatggtacgaccggatacggctacaacgaccgcggaagagaagcagtcgaagagatttacgcccatgtatttcacaccgaggacgcattggtacgtcagcagattacctgtggtacccatgcactatccattgccctgtccgcgaatttgcgtccgggcgatgaaatcttgtccccggtcggaaaagtgtatgatactttagagggagttatcggcatcagggagtccaagggatctcttgccgaattcggcattacattccgcaaagttgatttattgccagatggcagttttgactatgataacattaagaaaaacatcaacgagaagacaaagctgatcgagattcagcgttccaagggatacgatgtacgtccaaccctttcagtcgaacagattggtgaactgattgcatttgtgaaatccatcaagccagacgtgatctgtatggttgataactgctacggcgaattcgttgagacaattgagccatccgatgtcggtgcagatatggttgtcggttccctgattaagaatccgggtggcggacttgctccaatcggcggatatatctgcggtaagaaagaatatattgaaaactgcgcgtaccgtcttacaacaccaggacttggaaaggaagtcggtgcatctttgaacgcaacccgtccaatcgcacagggactgtttttagcaccaactgtaactgcagctgcattaaaaggcgccatctttgccgctaatgtctatgaacgcctgcattttaaatctgttccgaatgccacagaacctcgttatgatatcattcaggcagtagaatttggaaaaccggaatatatccaggcattctgtgaaggaattcaggcggctgcaccggttgacagctttgtaactccaatcccatgggatatgccaggttacgacagtcaggtcattatggctgccggtgcatttgtatccggtgcatccattgaactttctgccgatgctccaatgaaagagccatatgccgtatattttcagggtggactgacctatccccatgcaaagtttggtatcatgatgtcccttgaaaaaatggtagaaaaaggacttgtagtatgttag

SEQ ID NO: 1498 - DNA, 1521 bp, Unknown
  Unknown gut bacteria
atgaaagagaaaaagaaaaagcaagacagaagctccgcgaacaggagtcagccgttaacaccggaagaagaactgatcgcgaaagaaaaacaacgaattaaaaagaacaagatcaagaatcgtccgatcgttgtaatcacctatctgatggtgacagtgtttgtcggcatgattgcgtatgtgatctatttcatgcagttcaaggctgaaactgtgattgcaaactcccggaatgtccggcaggattcctttgccaagacggtagaacggggcgatatcatcacgagtgatggtgttgtgattgcgacaagcgaaacggacgaggctggaaatacgaaccgttcttatccgtacagcaacatgttttcccatctggttggctatgatgaatacggaaaagcaggactggagcttgccggaaatttctatatgctacggtcgcacatcaacatctttgaacgtgtttaccgcgaattaaaagaggagaaaaaccgtggcgacaatgttatcacgaccgtaaattatgatcttcaggcagccgcgtacaatgcactcggaagctgtaagggtgccgtgattgcaatcgagccatccaccggaaagattttatgtatggtatcaaaaccagactatgatccaaacgatattgaaaatgtctggagctatctgcagacggaggagggatcggagagtacgattctgttaaatcgtgcaacacagggactctatgcaccggggtccaccttcaaggtggtatccctgctggaattcatgcgtgaaaatccaacaacctacaacagctatcagttccactgtgatggcaattccatcttctccggcgtcggaatccgatgcagcaacaacaaggcacacggtgatctgtcgttagcagatgcacttgcttattcgtgcaacgtcagctttgcaacaatcggagagactttagataaaggttcctatcgttccacagccgaagagctgttgtttaacaaagatttaccatacgatggcacctataactcatcccagtttcggattacagcggactcgccggacgatgcgattccacagacagtgatcggacagggcgatacgaagatcacgccgcttcacaatgcgatgatcatgtccgcgattgcaaacgacggcgtcctgatgaagccgtacacgatcgactcgattgaaaacgacgatggtgccaaggtaaagacatttcgttctaaggaagcaggcacactgatgaccgcagatgaagcaaacatcctgacggactatatgaaaggtgtctgtgaatatggtaccggttccgggtatttttccggactttcttactcggttgccggaaagactggtacagcagaatttgacaacgaaggaaactgcaattcctggtttgtcggcttttctgatccggatgatccggacattgtcgtctgcgcaattaccgaacagtccaacgtgactggtgtgacaggtgcatgggttgccagacaggtgtttgatgcatattacagtaaatag

SEQ ID NO: 1499 - DNA, 999 bp, Unknown
  Unknown gut bacteria
atggaacgaatcattcaagcggatattattccggaagatgataaaatcgaacaggggctgcggccaagtcatctgtctgagtatatcggacaggagaaggcaaagaagaatcttcgtgtctttatcgaagctgcaaaaaaacgtggcgagccgctcgatcatgtgctgttgtatggtcctccgggactcggtaaaacaacactggcatcgattgtagcgactgagatgggagtcaatctgaagatcacatccggtccggcgattgataaaccgggcgatctggctgcaatcttaaacaatctgtccgaaaacgatgttttatttattgacgagattcaccggctaaataagcaggtggaagaggtattgtacccagcgatggaagattttgcaattgatattgtgatcggcaaaggtgctggtgcccgttcaatccggctggatcttccaaaattcacactggttggtgcaaccacacgcgctggtatgctgaccgctccgctacgtgaccggttcggtgttgtcaaccggctggaattctacaatgtgaccgagctgatgcagatcattctccggtctgcggccgtgcttggtgtcagcattgacgacgagggggcgttggagattgccaagcgttcccgtggtacgccgcggcttgccaaccgtctgttgaagagggtacgtgattttgcacaggtagaaggtgacggcgcgattgattacgatgttgcaaaaaccgcgctggatcgtctggaggtagactctatgggactggataataccgaccgcaatatcttagagacgatgatccacaaatttggtggtggaccggttggtctggataccttagcagcagccatcggtgaagattccggcacactggaagaggtatatgaaccatatttaataaaaaatggctttataaatcggactccgcgtggtagaattgttacggaacattgctacagacattttggattggaaaatctgatagaataa

SEQ ID NO: 1500 - DNA, 885 bp, Unknown
  Unknown gut bacteria
gtgaagaaactagcatacaatgacgtgaatatcgcagatactgttgtggcattaggaaaatttgagggcttgcacaagggacatatgttgcttatcaacaaagtattgcagttgtcccatgaggcaggaaaacaatcggtcgtattttccatcgacatgccgggcacaaagcgcatctatacaattccagagcgggatcggctgttggaggaacttggtatagactggaatgttacttgtgaatttacgaagaagtttgcggcgatgaagccggagacatttatcaaggatgtgttagtggagcggctgcacccggaatatgtggtcgtcggcaatgattttcggtttggcaaaaaccggcagggcgatgtgacgatgctgcaggaatatggaacccggtatggctttgaagtgcttgcgtttgaaaagctgcgggagcaggggacaattatcagttcctcctatattcgggagcagattgaacagggggcagtggatgtcgtccgtgaatatatgggacgcccatatagtatttccgggattgtccagtatggaaaacagcttggagctacaattggattcccaacagccaacttgattccaacggaagaaaaattgttagtgccaaatggcgtatatgagacgcgtgtcacagtgaataaccagcattatcgcggtgtgacgaacgtgggagataacccgaccgtggacgcagatcataaaattaaggtggagacaaatattctggatttcaatgaaaatctatatggaacctgcctgaaaatcgaatttttacgacaaattcgaaaagaaataaaatttgatagcatagaagccttgaaaaatcagatcaaatcggatatactagaagtcgcgcaccagtag

SEQ ID NO: 1501 - DNA, 2103 bp, Unknown
  Unknown gut bacteria
aaaaccccccgccgctttcaggagaagaagcgccgtcggaacctgctggattttagcgacttggagcaaatgaccctcggtgtgctggaacaggagagtgtctgtgaaaagcttcgccgggagtatgacgcggttttcgtggatgaatgtcaggacgtatccgccattcaggacgcaatcttgcagaaaattcacgataaacagaacagccttttcatggtaggcgatgtgaagcagagcatttatcgcttccgcttggccgatccgacgctttttctgggacgaatgcgcaccttcagcacggaaaaagacgctgctgagcgtcgaatcacgctgcaaatgaacttccgttccgacgcaaatgtgctggaagccacaaacgatctcttccgcacgctcatgcgccgggaggtcacggagttggattaccttccggaggatgagctgattcctgcgccgggacgcgccgagggcgcacaggtggagatgcatttgctgaatgcggcgcccatgcaggcggacgaggaaagcgagatcgcctttgccacatcattggaagcggaagcagcacgctgtgcggagctgattcatcagctgcaccgtcaggcggagcctatcgcctatcgggatatggtgattctgatgccgaaggtgcgcaatctggcggagcgcgtggccgagctgttggaaagtcagggcatccctgtgtactgcgacatgaagggctcctattttgatttgcccgaaattcgcgccatgctggatctgctgcgggtgctggacaatcctttgcaggatgtgccgctgctgtctacgctgaaattgccaggttttcatctcaccgatgcggagttggcggatatccgactgacagacagcggtcgaaatgtgccgttttatgtggcatttaccaaaaccatggcggaggacacgccgctgggactgcgctgccggcaggtgtgggaacagctggagacatggcgcttccgcttgagcacgcagtcgctttcggcatttttatgggaagtcatgcaggaaacgggctattatgccgccgtgggcgctttgagcgagggtgcggcccgacaggcgaaccttcggctgctttgccagcgcattacggagtatgagcagatcagcgacggcagtttgcagggatttttacagtcggcggaggagcttcgcgccagcggagaatcccgttcggcgacgctgctaggcgaggaagaagacctcgtgcgcatcatgaccattcacaaaagcaagggactcgagtttcccgtggtcttcgtgctgggcttggagcagcgtctgtttctcaatcagaaaggatatctgcattgccataatgagttgggcgtggcgcttccctatgtcaacaagcgtctgcgcattcgacgcggtaccatcgcggatcgtgcgtttgtgcagcgtcagcgggaggatgaattagcggagcgggcgcggctgctgtacgttgccatgacgcgggccaagcagcgcctctatctgctgggcagcaccaaggattgcgaacggcgtttgtggttcacgccgaacagcgcgtctcgcgtatggcagggtcagtccatgctggattggatcatgtgcatgttgatggacgatccagctttgcggaaggattacacggagcagctgcaactgaaaaagccgctttccacaggtcatccacaggccgcaaaccattggaaaatcaaggtttttgacttatattcttcacagcctgtggaaaaaagaaaagttatccacagcattcttccacagcttgaagcaagcgtttccggcacttctgtggatgaattggggaaacgctgggagcatatgtacgagcagccgacgttcgtgccgctgaagacctccgtgtcctcgctggtgcggcagttgcatgagggacagtctgcaccggatgcgcccgaagaggaaaccgccgaggataagcgtcagcctgcgggtattgtgccgctgcgcatggaggaactgccgccgctcccgaagtttctgcaaacggagacaattaccggcgcgcatcgcggtacggtgatccacaaggcgctttcgctggtggatttggacgcgctgcgg

SEQ ID NO: 1502 - DNA, 1602 bp, Unknown
  Unknown gut bacteria
atggatttgtattcgcttcgtgagcagctgaaaagccgctccatttacgatttaccgctgcgcgtcacgttctatgcccgtgtgtcaacggataaggacgagcaggcaacctccatccgcaatcaggatgattacttcgttcacatgatccacaatgttccaaactggcgctactatcctggctttgtggacgaaggtatctctggtacaagcgtcaacggacgtgttcagtttcttcgtatgatcgaggaagctaaggcacataagttcgatctgatcttgaccaaagaagtttcccgttttgcccggaatacgctggactcgctgacctatacacgggagctgctgcgcgaggggatcggcgtgtatttcgtcagcgataacatcaatacgcttgacccggacagcgagctgcggctgattattatgtccggtatcgcgcaagacgaatctcggaaaatctcctcccgcgtgaagttcggtgcgaaacaagctatcaagaacgggcgtatctacggcagcaaccgtatttacggctatgactatgtggataagggactgatcatcaacgaagcgcaggcggcctttgtgcgcgacctgtatgagcgctttgcgacgggcagctacagtctgaatcagcttgagaaatactactacgcacagggtttgcgaggcattgatggcggaaaaatcaatcacgcaaccatgtcgcaggtcattcgcaatcccaaatacaagggctggttctgcggcggaaaaacaacaatcagcgatccttttgaaaagcgggctatacgactgccgcaggaaaaatgggtcatgcacaaagacgcgcaggttccagctattgtgtctgaggagctttgggaaaaggctaatgcggttcttctcaaacgaagtgaggatgtcaagcgtcatcgaggacagtacacccacgccaacctgctttcctgtaagatgtattgtacccattgcgggacggtctatcaccgtgtcagctccacgagctttggcaaaaagagcgtcccgaacagttcctgggtctgcgcgcataaaaagcgccacggaacgcatacctgcccttcccgttacatttgggagtccgaaatcaagcaggcgctctttcaggtgttccaaaccttctctgccgaagccgatcaggctatgaccgatttgctggagcagctgcgcaatctatcgcctagagaaaagttgcaagacatcattcaggcaaagcagaaggagctggaaaagctcaagcagcggcgcaccaagctccttgcatataatgcggacgggcagattaccgatgaggattttatcgctttcaatgcggagcttcgtccacaaattgctcagttggaggaaagcattgcaggacttaccgaacagaagaacgaatcgaaccaaatggatcagcgtgtggatgccatccgcagggtgcttgcgttggtgcgcacggtaccttccccggaggccatcaccccgcacctgattgatgaagtaatcgagcgcattgacgtaacgccgatgggaacggacggcacagaaatttgtctggacattcgcttgacctgcggagattctgcgcaaggtgtattg

SEQ ID NO: 1503 - DNA, 1788 bp, Unknown
  Unknown gut bacteria
atgtctcgaaagaagccaacgcataagctgtttttttggttatttatccgggtgtttagtgtgcttacactgatcgtcgtggctttttttgcacttgttttttcacctcccgtacagacgatacttcaaaaaagctcccatgaatcctttgcgcagcgtgcctcctccaaggctgctgccgtaagtcaaaacctgcggcgccgctggagcaatctggacagcgtcgcctccgacctgaacgccacccttaccgatacgctgactcaaaacaacgctaatatttccgatattgccgataatccgcatctaaatcagaccatccttgcagacatgtacagccagttggtgaacctgatccgtcagatgaacgtcaacgatgcgttcatcatcctcaacggacccggccgtgagaacgagcccgccaagacggcccgcgccgcgctgtatctgcgcaccaatgcgcccaacaactattatcccaagaatagcgacctgctgctgcgcatcggcgctcccgccatcagccgcacatacaatctggcgctggacagctactggcagtcctgcttcgtacccagtctctgcgctgacacggatttttttgatcagccctataacgcttatctgcattcgcagggcaccgccaatgcgggccccagcgactggggctattggtgcatggggagcaagctctatgaacatgacgccgccaatctgatgacctattccgtgcccctttataacgccagcggcacgctctggggcattctgggcatcggctttttgcagcagaatctggaaagcgtgctgcccgccgccgatttgggcgatggcggcggcgcgtggctgttggcccatgaaagccgctcctccatgcgcaccatttgcgccttcggcgacccggcctatacggtgtatctgggcgactccaacctgtttctcaccgcgcaggatcatctcgccaccagcacagtggacaaggtgcagggcatcacggaggacttggccgctgtgtccgtgcccttgcagctctacgcaaataacacaccctacgcgggcaatcagctttacctcattgccgttacacccttaagcattctgaaccgcgccgccatacagaccacaaccttgctgtgcattctcggatgtgtgatctggtttgtcagcacgcttggcacatcgctcatcgcatggggcactgcgcgcccaattaccggcctgtccaaggaggttcgcgccatggcgccgcagaaacccatgcacctgacccgcacaggcattgaggagatcgacgtgctgagtcaggccgtggagcagaagaaccgcgaggccttggaggaagcgtcccgcttcagcgagatcgccgaaatgactggcgagctcttcggcgcgttcgaggtggataaggccagcggcaaggtattcattaccggcgacatggtgcatctgctggggcttgaaccctctcagcattgggtcgagatgccgaagaacctcttcgaccggcgcatggagcttctcatgcgcaaccagttgaacaaggatgagcctatttaccgtctgataaacgaggacggcagctgtcaatggatcaagctgagcatgcgcaccagcgaatacagcattcgcggcgttatcacgaacgtgaccgatcaggtcgaccgccgtctgaaaatggactacgagcacacctacgatgtgctgaccgacctgatgaacaaccgcgccttccaagagcgtttgagcaagcttttcgtggacaagaaatccctcggtctgggtctgatg

SEQ ID NO: 1504 - DNA, 1701 bp, Unknown
  Unknown gut bacteria
cccgccacggcggtcattcagtataccaacgtcaatgcctcggaggggctgaacgcggacggcacggagctggatcccagcgaaatcacctcggcagccgttattaaccgcacgatcgaggacttgggactcacgtccagcacggagtccatccgctctcgcgtcagcgtgcaggaggtcatccccgaggacgaggagacccgcaaggagacggcgctgaagaacggcgaggaatatcattaccaccccacggtgtatcaggtttcctttgccgtggacgatcaaaacgcggcggattacgcccgcaaggtgttggacgcgctgctgagcaactacttcaattattatggcgagcggcacgtggattcggatttgttccccaataatgcggtgaacgtttcggtggacaactatgaatacatcgactgcgtagaaatgcttcgtgttaacgcgaatgacagcaccgtatacctgaaccgcaaggccggtgaaaagtacggcttttacagcgtacagacgggttattccttttctgatttggtgtacagttatcgttttctggaaaacaacagcctgaatgatctgtatgcctttattatcaatcacgcgctggtgaaggatcgggatgtgctgattgataagaagcagaacgaggtgctgcaataccagctgcaaatcgacagcttaaacaagaatatcgccgaggtcaaggccttgattgaccagtttggcgacaagacgctggacggcaccgcagtgaacagcaatacgtcggatgaggacagctcaaaagcgcagatcattacggacattgccgctggatgggacagcaagacgatcgaggcctcccgtgacgtgaccacgacctatgacaagctgattcagcattatgcggatctacaggctcagcttattgaggtcacaaaccaaaagggacaagccaatgagatcctctcaatttatcaggacgttaccgccaacacctccgcagacagcgaggaggcgcaatgggcggcagcgcggattaaggagctggcggattcctttacggagctgtatcagacggctattgccaccatcaatgagtacaacgaggtcatcggtgcagacaacattgccatgaagtgcagcgtggtggtcaatgaaaagctgaatttgaagctttatcagatgctggccatggtgctgttcctgattgtgggctgcttcttggcgatcttcttaggccgcttgggcgacttcattgactatttcctgtacgtggataagaagaccggtctgcccaaccgcgaacgctgcgacgaccgtatcgagcattacggcgagggcaagcttcaggatcgcttctccttcatttctttgacgctggagctttccgagctggatcgcaacgatggcgactgggcgctgcaaattgtgggcgaggccctgcagcgcgtcttccgcagcattgcctttgtgggctataacggcgcgggtcaattcatgattatgatggaaaacagcacggaggacttcacggcaagctgcatcgagcgcttcttacaggtgctgaagcgcagcgagctgccggggctggaggcgcatgtgcatgtgggcatggcgaactccacggcggacgatgtgtacgagattcgtgcgctgcttcgtatggcgctgcgccggtgcgcgcaggctcatgagcaggacagcgtgacggtg

SEQ ID NO: 1505 - DNA, 1284 bp, Unknown
  Unknown gut bacteria
atgctggagcaactgctggcggttaccatcggcatgatggataccatgatggtagcaaactgcggtgaggcggctgtttcaggcatttcgctggtggactccatcagcgtgctgttcatcaatatgttctctgccctagcaacaggcggtgcagtagtagcatctcaatatctgggacgcaaggaacgagagaatgccagcatagcttcgaagcagttgttctatacgatcttgctggtgtccacgtcggttatggtcattttccttgcaatgcgttatccgctgctgaatatggttttcggtcatattgatgcggatgtgatggagagtgcgcagacttatttctggatcacgacgctgtcttatccttttctggcaatgtataatgcctcggcggcgctgctgcgggccatgggcaatgcgaaggcttccctttatacctcgctggtaatgaatattgtcaatattgtcggtaatgcggtgctgatctacgttgtgggcatgggtgttgcgggtgccgctgtagcaacgctgacctctcgcatcatcggcgcttttgtgatccagcatacgctaagcaatccgcataacctgattccctatcctgtgctgcacaagtttgagtggcgcggcgatatggtcaaaaggattctgacggttggagttcctaccggattggaaagcagcttctttcagtttggcaagctggtgctgctgcggatgattagcacgttcggcaccgccagcattgcagccaacgcggtggccaacagcctgacgaccttgcaggttctgcccggaaacgctattggtttggccatggtagctgtggtgggacgctgcatcggcgcaaaggaattcgatcaggtgcgttattatgttaaaaagctgatgctcaagtgctacgcctatatgggcgcgctgaatattgtgatgctgctgtgtacgggcattttgaccggcctatatcatctcacgccggaggccgataccatggcgcgtcagatcattatgctgcatggcgtgggctgcattttcctgtggccgatgtcctttgtgctaccgaatgcgcttcgtgccgcaaatgacgcacggttcacaatgacggtttcgtgtttctctatggtggcgttccgtattgtgtttggctttctgctggccaagcagtttggctatggcgtggttggcgtatggatggccatgcagattgactgggtgttccgtattatctgctttgtatggcgctttaagagtggcgcgtgggagaaaaagcagctcatctaa

SEQ ID NO: 1506 - DNA, 1860 bp, Unknown
  Unknown gut bacteria
gggcaggtcgaaaagggcggggagtgggtctccgccggtgtggacgtgaatacgaattttctgcatgcctacgcagccttccccgagggcgtgacccgcgtgcgcctttatgtcaccgacgagaaaaagaaggccatgcgtatcaacgagatctttgccttttccagcggtgagattcccgactgggtgcagcgttgggagccgacgccgagcaaggcggacatcctgtttctggcgacccatcctgacgacgatctgatcttcttcggcggcgcgatccctacctacgccgtggagcagcagcgggacgtggtggtggcctacctgacccgctccaactccacccgctccagcgagctgctgaatggcctgtggtccatgggtgtgcggcagtacccggtgatcggctccttccgggacaattatcccaagaccatggagcaggcctacaaaaacgccgggggctccagcaaagtcatcggctgggttgtggagcttttccgcgcctatcagcccgaggtcgtagtcacgcaggacgagaacggcgaatatggccatccccagcatcagatggtggcggacgcggctaagcaagcctacgccctctctcccaccgcacaatacgaggattcctacaacacctacggcccgtggcgggtcaagaagctctacctccacctgtatccgaacgaccaaatcacgctggactggtcgaagcccctgcaatccatgggcggcaaaacgggcttcgagctggcggaggaggccttcgcctaccacgtcacccaagccaagtgcggccttgacgtgacgaacaccggcgtgaagtatgataaccgtgttttcggcctgtacgccacgcaggtgggtccggacgtgcgcggtgacgacttccttgagaacatctacgatgcgcccgcttccttcgtgacagcagcgcctacccccgaacctacccccgtcctcacgccggaacccgcctacaccagcctgatgcccgcgctgaacgccagcggctacctggacgagggcgagttcgtctacgccaacgacaccgacggcctgtacatcttcgtgaatcagacctgcaaggtggtcgttcagcgccaccacgacgacagtcagcccctgacatggtacgacgcggagatttggggcgacgtggcctccggcgagctgctgaagaccattcagtatgatccggagaaggtcgaaaaggttcgcgtggacgcttccgagaccgcgaagaagtacaacgtggcctttgccatgaacacggactactacacctatcgtctcggcagcaagaacgggcggcccatcgggctggtcatccgcgacggacagattcgctacgagaagccctacaccaaggcgacgaacaactttccgaatctggacacgctggctttctatcctgacggcagcatggatgttcacgccagctatgagctgacgggacaggaatatctggatcgcggcgcgtacatggtgtactccttcggcccgtacctgatccgcgacggcgtgctgaacgcccacttggaagacgtgagcaccagccgccagccccgctgcgccctcggcatgatcgagcccggacattatgtggccatccttgcggagggccgtctgaaggacagcaacggcgtttccgttaagcagcttgcgctgatgatgcgcgagaagggctgcacggtggcctacaatctggacggcggacagactgcggtgttcgagttcatgggcaagcagctgaaccgcatcggcgtatacgacggtaaaacgaacgcccgcaaaacctgcgagattctgggtatcggcgcctccgagcaggtcggaaacgtggcgtttaagtaa

SEQ ID NO: 1507 - DNA, 1611 bp, Unknown
  Unknown gut bacteria
tgcacgggtaccgccggcgacaacatggtgcgctcctccatcatcctgaacgacgtgaaccacgccgccggcgctggcgcgggctatgtctggggtgcgaagaagctgaaggccatcgccatctacggcgaaaagtccatttccgtggcggatcccaaaaagctgctggatctgtaccactatcagctggctgagctgatcggcgcgaacaacaaccacgttgtgccttccacgcagcagagctggaatgaatatgtgtcctggacccgttggcagggcggccccgatcagaactgggaaatgggcatcggcggcgcagttcccaccggcgagcagaagcccggcgacatcaatgccgttggtatgcgcaacagcaccggcaacttcttctaccgcgatgtgtacaagcataccgtgaaggatggcggctgtcagagctgccccatccgctgcgtcagccaggtgcgtctgcctgaattgcagaagtacggcctggagaccgatgtaagcgccgtgtgctttgccacctctcatgctagtggcttctatccggctggcacccatgactttgagaacgagggtgacgcagccaccgtgctgggcttccacatcgcgcaggtgatggatgattacggcctgtggtgcggctacggcgaaatggataactatttctcttactgctggaacaacggcatcttcgagaaggtgctgcccgcagacgagtacaaggagattccgtgggatctgatgaaggacggcgatcctcgctgggccgatgagatgatcaagcgtatctccaccaagcagggcgagtttgctaccctgggcgagggcgctgtgcatctgaccaagaagtggggcatcgacgagagcttctacaatcagagctataagttcatcctgaagaagatgggcattggcctgcaccactcctccgagtccatgggccaggtgggtgcgctgatcaacattctgttcaaccgcgaccccatgtgccacacgcaccagaactgcatcggcaacggtctgccggtggacatcattcagtccgtgctggaaaagaagttcggcgagggctgctacaacaagcccgccaactacacccccatgacccagaaccgtgccaagtgggccaagtgggccatcgtccgcaacgatgtgcatgacatggcgacgctgtgcaactgggtgtggcccatgatgttctctccctgcaaggagcgcggctatgagggtgacaccagcctggaagcccagctgatctccgccaccaccggtgtggaatacaccgaggaggaagtggatcgcattggtgaaaaggtgctgcagctgcaccgcgccatgaccgccctggagatgggctccaagaacctgcgcgaggatcacgatcccctgagcgactgggtgttcgaccgcgatcccgacaagcagcccttcaccgagggcaccaccaagctggaccgcgaggactgggaaaaggcactggacatgttctacaccgagttcggctgggacgtgaagaccggcatccccacccgcgcgacgctggagagctttgacctgggcaaggttgccgacgagctggaagccgctggcctgctgcctgcctaa

SEQ ID NO: 1508 - DNA, 1251 bp, Unknown
  Unknown gut bacteria
atgacgcgacatgagccctttgggcaatgtctgcaacgcattctccggcaggagggctggtcagccacgaagctggcgggtctgctgggctacaaaagccgtaacagcctgttccgcattttgaaggatcaggccagctatgaagctcaggctgcttttctggaatcccttcgcggggccgatgtaccttggcttgcgtcctatgaagccgagctggaggatgcgctggagctgcgccgggttgggctgcgcgaatttctggacaaccgatctttgctgacgctgctcagaagtgctcccgcgcagacggaggatattgctgttgacccggtcatggattctcagacgaagaccttcgcacagctgctggccgaatatgctcagggcgagagcgtgcggctgctgctgtgcaactgctgtgatgcgcgtatcctgtctcagatctatcaggccttatgtacggagcaggctgcttgcgccacctctattctgcacttcttcctgcttgaagatgaaagcgtggtcgatcaggtcttatcccttcaaccgctgctctacacgccctgctatgagtcctttgttctggaaccggatgcgtcctccgcagagactgaggcgctctatcggctgaatcacatacttgtccgtttcacagatcgtcagcatcagacacattggcatcatctcattatgtacagccatgatcgctttgcgctcggaggctattcgcctgagaatccgcagtattttgtcgaggagcatctgctcgcacagcgtcccagcatgcatgctattcggaacacttttccgctgaaccattccgctgaggactatctggcatatacgacgcagtttcttgaactggaggctgactgtgagctatacgacgtcaagcccgatgttccgctgaactttatccatccggacattcttgtgcccgttgtgatggatggttttgcggcatcgggttttgccgcgtccgatggcttggaggagctggtgcagcgcttttatgacattcagatgaagcgctggaataacttcttcaagaagcgcaaggtaacgcacattgttttctcctatacggcgatggagcgtttcgcacgcaccggacggcagacagatcatttctttgccatgcggccctacacgccgaaggagcgcttgcagatcctgcgctttctgcgggagcagacggcgacgaatccgtatttttccatttatttctgcaaggaagattttcggatcgat

SEQ ID NO: 1509 - DNA, 1725 bp, Unknown
  Unknown gut bacteria
atgcagaattatccccagaaggatacttcagaaacaaaagcagcgcagggcagcggctacgtccgccgcccgcgtgttgtttatgctcaaaatcacacgcaggatacctcatggcagaatcccggtaagccgccgttgggacgcagcgagcagcttcagccgccgctcatgcgggaacagcccaacggggatgaccgtgaagagcacacatcaaaaaatgatcgtaagcggccgagaaagaaacggaagcatcgcgtgctgtatatggctgtcatcctgctgtgcttgctgggtctgggtgcgctggtactctttgttgcgccgcagctatggggcgtgacatggagtgagatgcctaattacgcgtttatgaacggctcgattatttccttgagcccgaagacctacagcgattataaagcctatcgtcaatacatggctgaagacacgatttatcccggtgtgtatgtggatgatatacatgtgggcggtatgtcggtgcaggaagccaaggctgagctggaagcggcgcatacggatacggtgggcattttcagcgtaactgtgaatgtaggcaataagagctgggtcattgactcaagccgtgttccgttgatgcgtaattatgacgaaatattggccaaggcttatgcgctgggcagaacgaatacggcgaacattcgtggcacgggcgttacaccttttcaggagcgtctgaatgctgcgctgaaccttcgcagtcagccggtcagtctttatacggaaatgacctatgacaaagagacggttcgagcgttgacggacagcatcgtcgcgtatgtgaaccgtgatccgatcgacgcgcaggtgacgacgttcaattttgatacgaagacctttactttcagcgacgatgaacctggcgtatacttggatggggacgaggtttacaataaggttgttgctgcgttggacggcggagacagttttgctacgctgacgattgagccggaaattttgttggctgatacgacaaaagcagagctgatgaactcctttaagatggtctcatcttatactacgaccacgacgaagaatagtaatcgcaacacgaatattgaactatcggcaagtgccatcaatggtacgacggttatgccgggagaaaccttctcctttaacgataccacaggcaagcggacggttgagaaggggtataaggaggctgtcgccatttccggaggtcagaacgtgccggatgtgggcggcggcgtgtgccagacttcttctacattgttcaatgccgttgcgcgggcaaatctggagattgtgtatcgttcgccccatgcgtggcccagcagctatgtggaaaagggaatggacgcaacagtcaactggccgaatttggatttcaagttccgcaataatacggattatcccgttttcatcgtgtcctactatgcaaaacagaaggttacggtggaaatttatggtgtgggccttcaggatggcatgacgattgatttgcaaagcgttgtgacgaagacaattcccgcgccggagggtacgaagtatgtgcagaataccaaccttccagcgggcacgcagaaggataccgtcaaggcgcgtaccggctatgtggtggaaacttatcaagtatggtataagaacggcgtagaggtcagccgaaacctgctgtgtacctcgacctataaggcttaccagaaaacagtcgaatataattaa

SEQ ID NO: 1510 - DNA, 1203 bp, Unknown
  Unknown gut bacteria
atgcgcgaaacggtccgtatcaacctgctgggaagctttcatatttatcgcggcgcggacagcatggacgcgctggtgggcaagtcccgcaagggtatgatgctgctgcagtttctggctctgcagcacggcgaaaatgttccggtgtatcggctgattgaaaccctgtggagcggcgagggcagcagcaaccctgaaagcgccttgaaaacgctggtcagccgtctgcgcgtgattctggcgcaggtcagtcccgcgctggcggcgtgcatcgtcaccgagcgcggctcgtaccgctgggtgacgcagccgggggtcagcatcgacctgtatgagttcgaggagctggaaaagcgcctgagcacctgcaccgaactgacggaggaaagccagcgggactaccagcgtgccctcagcctgtacggcggcaatctgctgcagggcagcgaggaggagtgggcgctcagccgttcggctgcgctgcacgcttcttttttgaagctggtctatcagtatttgacgctgctgaaagcggcggagcggtataacgagatcattgacgtgtgccgcgcagcgctggacgtggacgcttttgacgagacgctgcatttgcagctgatgaatgcgctggtcaaaacctgccgcaatcatgaagcgctcatgcagtataagcacgtgaccaatctgcatttccgctatctgggtgtgcagccgccggagggcattcaggaattttataagcagatcatgcaggcgggcgatacgctggagatgaacatcgatgcgatccgcgaggaattgcaggagtacggcgaggtgtccggcgcgtttgtgtgcgagtatgccgtgttcaaggaaatctacaacctgcaaatgcgcaatttggagcgtttgggttccagcatgtttatcgcgctgctgatggtttccagcatggacagcaaaccgctgaatccgttgaagctgaacgacgtgatgaagggcttgctgaaggtgctgaccgccaatctgcgcaagggcgacacgattacgcagttcagtcccacccaatatgcgctgctgctgcccacggtggattacgacagcggcaaggctgtcatggagcggctgaagcgcaagttttatcaggcctatcccaattcgaactacatgcttacttatcggcttggcccgctgagcaccaaaaagaccgacgcggagcgc

SEQ ID NO: 1511 - DNA, 1257 bp, Unknown
  Unknown gut bacteria
gacggctatggtgtgcagaaaccgctggcggaacagcagccggtgcaagagggagaactcgaaataccgtatgatggatgttcctttgaaggaatgcccctcatgagcggaacatgcatcttctctgtggaattgctgggggagagcggcacacaatatcagacggaggctgtctcgaagataggcagtccgggcgctgctgtggagtatgccctgccgcgttcacgagtatattatacggagcagaagacagggtggaaggttgactgcggcataagcggtggagacacggtgctgctggaaatcttttcggacaaagcgatgacgcagcgcgtggcgaaggtggctcgccatgtgccgggaaagagcatgttcaccttcgtatggaagggctggttcgggaagaagcgagctgaagcggggaagtattggtgtcgagtgatgctgaaggatcagccggaaacggcgaaaaccttcacgctggaggtggaagaaggtccggagccggtcgagcctctgcgcattacggggccgctgctgccggaaacggatgatcccgatgagctgctggagctgctttgtgcgcccctgactgtggtggacatcgacgcgacggcgcatcaaaagatttatgcagagcccggagaacgcggcggcgtactgggacgcgtacacgggcagtcgcaggggctttgcgtgctggagatcggggaaaaatatacgaaggttggtgcgtggcggcatgaggacggcgcatacatagagggctatgtgccgacgaagcttttgaagattgtacgaccttatgagcactacggtgtggtggtggacaagcccctgcaggagctgcgcgtatacgaatatggccgactggtggggcgaatgcgcatcagcacagggttgatggagaagaatgagttagcgcaggaaacgcgggcgggagcatttatcacgacggaccggatgattaccttcgagagtcacggctttgattacgactatccgatacgcattgacggcgggaatctgctgcatcagctgggacgagtttcaccggagcagggcggcttttcggcacagatggcaacgctgggacagaaggcctcggcggggtgtgtccgcatggattatcggacggatgcagcgcacacgatcaacgcctactggctatggacgcatctggaatggggaacaaaggtgctggtgctggatgatcccgatgcacgagaagcgaggctggcagagctgggcgagtga

SEQ ID NO: 1512 - DNA, 978 bp, Unknown
  Unknown gut bacteria
atgacttgtacgccagaaagactgaaatatttgacgctgctggcagagggctatcctacggtgcagtcgctttgtacggaaatcgtacatttggaggcaatcttggctctccccaagggtacggaacactttatgagcgacattcacggcgagtatgaggcattctgccacattctgaacaattgctccggtgtgatccgcgagaaggtcaatatgcttttcagcggtaccatgacagggcgggaaatctccgggctgtgtaccctgatttattacccggaggaaaaattaaagcgactgaaaaagcaaggtcgcttgactaaggaatggtatcgctcaacgctgcaaaatctgattgcgctgagtaagctgttgtcttccaaatatacgcgctcaaaggttcgaaaggcaatgcccgaagcgtatgcctttctgctggacgagctgcttcacgcacaggcggacgaagacgataatcaggtagcgtatcatgatcgtttgctggaatcattaatcgaggttggcgagggagacgatttcattgtggaagtctccacgcttattaaacgcttggctgtagaccgcctccatgtggtgggggatatttttgatcgcggatcgcgggcagacagcgtgcttgaactgctggagcatcatcattctgtggatattgaatggggcaaccatgatattctctggatgggtgcagcttctggttcgctggtatgctgctgcgccgtggtgcgtaattgtctgaactaccacaatatggatattttggagcgcggctatggtattcccttgcgcccgctgacgctgtttgcagaaaaaagctatccggagttgtctccggaggcagcagcattacatgtgattacgttgctgatgttcaagctggaaggacagctaatccggcgcaatccagactttgacatggattctcgcttgttgttggacaagatcgattggaagcagtat

SEQ ID NO: 1513 - DNA, 912 bp, Unknown
  Unknown gut bacteria
ggtggcaccgccggcttcggtctgctgaactacatgtatgtgtacgatcccttcaccggcgctgcctatcgtaacaccgacgcggccaaggctgctctgtgcgacatctacggcaccacctacggcgagggcggtcagtatgacacgctggacgaggcctacgaggccatcaccggctatgacatggccaaggcgcaggagctgatgcagactgcctatgacaaggctgtggctgccggcatctacgacggcgagtccgaggtcaagatcgacttccgcgtctatcagaacgacaccgtgtatgtgcagatgttcaactacttcgatggtcagctgaaggaagcctgcaagggcaccagcttcgagggcaaggtttccatgaccatgaccgttgacgctgactattacaacaccatgaattccggcaacgcggacgctatcttcaccacctggggcggcgcggccatgggtcccttcggcgtgctgggcaactgctacaccgacgcgagcgacggctccggcaaccagaatgagtatggcttcgacaccagcaagatcgccgtgaccttcaacatgaacgatgaagacgtcaccgcgtccctgcaggagtgggctaactgggctaacagccaggatgtggaagacatcacctccaaggtcggcaactacaatgattacagctacgcgacccgcagcgcgatcttcgccggtctggaagagtgctacctgtcctactacgtcaccacgcctatgtactatcgcaacgtggccagcctgacctctcagaagatgaacgtggccaccaccgattttgtgcagctggtttccttcggcggcgtggagtacatcacctacaactatgacgacgcggcgtgggctgactacatcgccaacaacacgctggtgtactaa

SEQ ID NO: 1514 - DNA, 1095 bp, Unknown
  Unknown gut bacteria
accctgccgaacggtgcgattgcagcgctgccgacgatcaacacgctgcaaaacgacaatgcgatctggatcaacaagacttggctggataatctaggtcttgacatgcccacgactgcggacgaactgctggaggttctgcgcgcattcaaaacgcgtgacccgaatcaaaacagcaagcaggatgagatccccgtcagcttcatgggtatgtgggatttgaagttcttaggccatgctttcggtctggtcagcaacgactacggcgtgtatctggataaggacggtcaggtcaaaacaacgctgaacgtcgaggaaaatcgtgcgtttctgacatggctgaacacgctgtgggaggagaatttgctggatcacaatggcttctccacgatagacagtctgcgccagattactgacagcaacgccacaatgacgtatggcatgtttttcgcaccgacacctttgaatcttgtcccggctgcatccatgaaccagtatgaggttctgctgccgctgacctatgaggggaagcaggtgtatcgtgatctgcttggcgatgtggtacgtggctcttttgccgtaacctctgcgtgcaaggaccccgaaacgattctgcgctgggtggattacctgtacagcgaagagggcagtatgctggcacaggccggtcaggaaggcgttgaatatgaaagaaatgccgacggtacgtgggtatggatggacagcattgaaaccgtagccaactcggtactatcagaggcgaccattgcagacggcggcaacgcgccgggatactaccccgcagagctgcaattaaccttcgacaacagcgatacgcatcgtattgtcagcaatatgcagacgttgaaggaatatgcggtctatccctatccgttggtctatctggacagcgctgcacgagagcgcgtaaacgcgattcagttggagttgggcgcttatgcagaaaatgcgatggttcgctttgtaacgggcgacataccgctgacggacgaaagctggaacgattataccgcacagctggataaccttggtcttcaggaaatgcttgaaatctggcaaaatgctttgaaataa

SEQ ID NO: 1515 - DNA, 1110 bp, Unknown
  Unknown gut bacteria
atgcggacgaaatacgcgatcatcaatatgctggtgggcgtgggcggacagattttgaatctgattctgtccttcgtgacacggatcgtatttgtacattatctttcggaggcctatctgggcgtgaacgggctgttcacggacgtgctggggctgctgaatctggcagagctgggcatcggcacggccatgatcttcagcctgtacgagcccgcggctcggaacgaccacaagcagctgacgcggctgatgaatctgtaccggcggctgtaccgtattgtggcgctgtgcgtgctgcttttcggcgctgtgctattgccctttctgcacgtctttatcaagggcggcgagggtatcgagcatttgcggctgatctattgcttgtatgtgctgaattctgctggatcgtatttgctcagctacaagaactccatttatttggcctatcagaagggctatatccgcacgggtctgtatcagattttcgagctggtgcgcttcggcgtgcagattctgattctgatgctgacggggaacttcattctgtacctgatcgcgcagtttgtgatacagttcattccgaacattctggtgtcgcgcagagtggatcgggaattccccttcctcaaggaatcgaaggagctgccgccgccggaggagcgcaagcatattctgaaaaacgtgggtgcgctgagtctgcatcgtttggcgacggtggtggtgcgcaacacggacagcatcatcatgtcctcctttatcggcttagggacggtgggcttatactccaattatcggatgatcctctccggcttgaaccagcttatcagcaagttctttgcttccttcaccagcggcgtgggcaatctgaacgccatggcggatcatcacaaggtatacgctgtctatcgggagctggacttcattgtgttcctgatctacagctatctggcggcggggctggcggcgctgctgaatccctttgtgcggattttgttcggcgagggctactgctttgccatgccgacggtgattgtattcataacggagttttacctttctggaatgcggtgcatgaacctaaccttccgcgaggtgaaggggcttttctgg

SEQ ID NO: 1516 - DNA, 1626 bp, Unknown
  Unknown gut bacteria
attgctcaattattcacgccgctgaacaatgcggaagccggaaccggcgaaacgctgaccgacgcgcaatatgatctgctgctggaacagctgatgaaattttatgcgctaaccgatcacgatctttttctcatttatgaattagccaagaaactgctgccccattttctcacgaaaggtaccacggagcagcagatcgatgtatatacctgtctttcctattcaaacatagaactatcccgcgtggtacatgagggatacggcaaacgctcggtggagtactatgccaagatgatctcgctgggcgagacgatgctggggcaggattgtcccatggtctatcggcgcatggcggtggcgtacatcaacatgctgattacagaaagcgccctatgcaacatcaccatggacgatgcgaaggaatattggcttcgcctgaagtccctgcgcaacggcccgaaatacgcgccctttgtcgaatcggtacagcacgcaaccagcctgatggatttgaccattgagcgctttgccacagacgcttacggcatctatctgaacaacaacaagcaagcctcgccggagtttgtgcagcagatgatcgacatgaacgaggaggcttatcagcaagcgctgcaggaagcgggcaatctgctggactgcgacccggacatggttatcacgcacattgaaatggactatgcgctcaagcgcagcacggcggacgaagcccgcgagcggctgtacaagtacatgatggaaaaacagcagctgctcgacctgaagcaggacgacattatttccttctgggcgacggggctgcaggacttgatttcgctgctgccagagggtcagcttccttttgaggagcagcgggcacttgcgcaccaatacatggatttgctggagcagttcatccgtgactacgaccgcacgtccagccatgcgtattctatcaacaatgcgctgaccgtactggcgttcctgccgccgatctatgcgtacatggacaccttagaggacaagattcgcttcatttaccgcatggtcattcgtcggcatctttcgacctatctgcattcgcagatggtggcgcattttgccatggtgatcttggacagcgtattacgcagccgccccgatctgctgattggcttccacggcattgccagcgcggaggaagcgcgttccaagcgcacacagctgatgcggtttgtgcgcaacgcaagcctgctgcacgacattggcaagacaaagattctggatatggtggatacgcagttccgaccgctgtttgacgaggagttttcgctgatccatatgcacccggacatgggtgcagatttgctggaggtagaccacgagctggcgcagttctcggacattgtgcgcggacatcatcgcttttacaacggcaagggtggttatcccgcggactttgacaactgcgcctcgccggacaagatcatgattgatctcatcaccctgagcgactgcttagatgccgcaacggacaatctgggccgcaactatcagcgtgcaaagaaggtttccgccgtcctagaggaattcgccgccggttccggcacgcgctacaatcccgatctggttcatcttctcttaaccgac

SEQ ID NO: 1517 - DNA, 1134 bp, Unknown
  Unknown gut bacteria
ttgccggtacagacccatgttgtagaatactctgatgctgtcattcgtgacgcaattcttcgtgagctgagccgtggcggacaggtttacttcctgtacaaccgtgttcattctattgagcaattttatacacggctgcgggcgctggtacccgaggcacgcatcggcattgcgcatgggcagatgaaggagcacggtctagaagacgtgatgatggacttttacagcggcaattatgacgtgcttctctgtacaaccattatcgaaagcggtttggacgtgcccagtgcaaacacgctgattgtctttgacgcagatcggttcggtctcagccaactttatcagttgcgaggacgcgttggccgaagcaaccgtcaggcctatgcttatttcaccgtacgtccagacaaaatgctctcggaagaggcagaacagcgcctcagcgccattcgtgaatttaccgagtttggagccggtttccgaatcgccatgcgcgatcttgaaatccgcggtgcgggcaatctgttgggtccggagcagcatgggcatttagcgacggtcggttatgacatgtattgtaagctaatggaagagacactgcatgaggtgcagggacaacagcttgttgcacccgaattggctactcgtgtggacctgaaggtggatgcctatctgccttctgattatgtgcatgatgaacgtcaacgcatggaaatgtataagcgcatttcgtctttgcgcacggacattgaccgcgaagacatcgaagaagaaatgatcgaccgttacggcgatttgcccgcgcctgtggaaacgctgctggatattgcacaaatgcgtgcgctggcacagcggttgggtgtttcacaggtactgtatcgtcctaaaggacagctgatgatgcggctggatcaacgctatatgcccgatcttcagcttatgatgcaagccatggtagatacggatagccgtctttcgatcacgccttctcagcctgtttccatggtactcaaggatcctacacatttggagagcggtatgctgacagagggattgaaggtactcaaacagcttgttgcgcatctggatcagctgcttgcagcacaaacgctggagacaaagcaaaaggcctga

SEQ ID NO: 1518 - DNA, 1110 bp, Unknown
  Unknown gut bacteria
atgatcttttatctggaaatcaacctattctgcctccttattcttggggttattctgatgaaagcctgcgccagtctggacaagcggcagacgtggtcgctgttcaagcaaatgcttgccgcggtcatggggacgacggtgctggacgtctgctggcggctggaaatcacaggctgctggcagctgccccaggttgtccgaacgtgcgtgaatgcggcgtatttcagcgccatcggggtttcagcctatctatggttttgctacacagacagtcttttcggcacgcgcattctgaacagccggaaagggcgggtcattgcgctgattccgctggtgctgctgtgcttgctttctctggactccgggcagacggattttctgttcgtggtagatgcgacaggacggcatcatcggggcatagggtatgtgctgtatgcggtgttggcctacgggtatctggcggtggcaagtgtgaagggcgtttacttagcgacgcggaaggagcattacgcagagcggcagaaatatctggtcgtggaatccttcacgctgccggtcgtgataacgggcattgcgcaggtgcgttttgaacaaattccgctgctatgtgtgggtgtaacgctggcggcgctgatggcgtacctgaacgcgcaggagctgcaaatctccaaggacccgttgacgggcatgaacaaccgcggtcatttactgcaatatctctcaaaaaagatgaagaaccatcaggctccgctctatctggtaatgattgatgtggatcatttcaagggcatcaacgaccaatatgggcatgtggaaggcgaccgggcgctgatgcggattgcaggtttactcaagcgtttatgcggcgagcacaactgttttggtgcacgttacggcggagacgagtttgtgctgatctacgaggggtcagccatggacggcagcggtctatgccgcatggtacagcaagcagtagaagccgaaaacgcgcagatggaggggcgctgtccctaccgtctgagtctcagcgtcggctacgcggtctaccacaacggcatcacaagcatccccgaattcatagaacaagccgaccagcagctatacgtagca

SEQ ID NO: 1519 - DNA, 1380 bp, Unknown
  Unknown gut bacteria
atggatcttcaaaacattcaggcgcgggtgcctgactaccagacctttatgacggtggatgagctgaaccaaagctcctatgacctggcggcggcttatcccgaggtggtgaaggtggaaacggcggggtactcccgcgagggacgtcccattctgcatctgacgattggccgtggcagcaagaatgcgctgatgttcggctgtccgcaccccaatgaacccatcggtgcgatgacgttggagtttctcacccggctgctggcggaggatgaggcgctgcgcacggagttagattataccttccatgtgatcaagtgcatcgatcccgacgcgattacattgaaccagggctggttcaagggacccttcgaggtctacaattacctgcggcattattatcgccctgctttccatgagcaggtggcatggacgttcccggtggattatgagggcattcactttgacaagcccatcccggagacgcagatcctgatgaagctgatcgatgagctgcacccggaattcatgtattcgctgcacaacctgggctttggcggcgcgtactggtacctgagcagcgacgtgccggagctgtacccgaagttcttcgaagtggtggaaaagatgggcatcccccgcaagctgggcgaagcggaggtaccctacgccacggcctttgcccctgcggtgttcaagatgctgacggtgaaggacgaatacgattacaacagccgctatatttccaaggaatacgccgtggcgcaccacgcctacggcaccttcagcggcgactatgccaaccgcaacggcggcaaaaccttcacctttatcaatgaactgccgtatttctacgacgcccgggtggcagacctgagcgactccgacatgacgcgccgcgaggccgtccgccagagctgcgattataaggttcgccactatgaggacatcaatgcgcagtgggaacgggtgaaggcgctgatcagcaagccggacaaccactttgccaccgcgctggaggagcgcatgagctcgggtgtgggcggcattcaggcgcagaagcgctgggccgaggagaacgaggactttgaaaaaaaggccaccgtggcgcaggtgtttgacaacctgtatgtggcccggttcttccaggcgacggggacgacgctgctgctgcgagcctgcgaaaaggaagccgcccgcacggaaaatgccgcggacaaggcgctgctcaccgaggtgtggcagtgggcggaggactatctccgcgatgagtgcggctggctggaggagaacatgaactatcatgcgatccccgtacaaaagcttgtgaccgttcaggcctcctgcggcctgctgacggcgcaatatatttccaaaacctga

SEQ ID NO: 1520 - DNA, 1479 bp, Unknown
  Unknown gut bacteria
gcggcggtgctgctgctggtgggcgcgtatttctatatcacgcgcacggcctcggggcagcgcattttggcgcggatgggcaaggataccacggctacggcgctgtgggaggtgggcgaggaagccctcgacgtgggcaacatcgaccaggcgattatcgactttgaaaaggctcgggagcaggacggcgaggataatgtcaacgtggacggtctgctgctgctgggcagcgcctacgaggccaacggcatggcggaggaagccatggcgctgtacgaggacatttacacgaacatcgtgccaacccgtccggaggcataccgcaacatgatccggctgcttcaggcgcaggatcgtgacccggaggcggcggtgctgatgcagctggcctacgaaaagacggaattgacgaccttccggaacatgaggaacgagctgctgccccagtcgccggtggcggatttgacggcaggtctgtatagcatgacgaaggagctgacgctgacctcgccgcagggatacgacatttattacaccatggacgcgaatgcggtgctgccggatgagggcacgctgtatacagagcccatctttctggacgagggcatctgggctttgcgggcggtggcggtgagcgacgatctggtgagtgacgagctgacgggcacgtacaagatcatcatgccctcgccccagaagccggactgcactcttgcgcccaacacttacaagcagcgtcagcgcgtgcgtctgcgcgtgggtgcggacaaccagatgaaaaagggtgaggagtacagcaaggaaaaggatattacgatgtattacaccatcgacggctccacacctgacgcagattcacccatttacacagacgaggccattgtgctgcccggcggcaaggtgacgctgaaggcagtggcggtgaacggctacggcaaggtgagcaacgcgctggaggtgggatacgaaattctcacggggcctttcccactcaagagctatgtgaataccgacttgatggcgaacctgaccctcggcaccacgacgcgggacgcgtttgtggaaaagtacggcgaaagccagttcacggaggaggtcacgcaggagggcttcgacgcgccctgcgacaagctgatctatccgtggggctacgcggtcatcggcaagctgcggaacaaggacgtcctggtggagctttatgtgacggacggcaccatttccgggccgcgaagcacggcggtgggcaacagcgaaagcgacgtagtggggcagttccgcgatatgggacaggtggaaagtccctcgggcaatcgcggactgtacagcaacagctacggcacgggaaaaatctacaagctggaaaacggcaaggagattcgctacgtggcgaagctggatgacggtgcggtctggaatctgacctacgaggtgaacagcacgggaacggtgacgggcatccgctggcagcttgtgccttga

SEQ ID NO: 1521 - DNA, 1254 bp, Unknown
  Unknown gut bacteria
cgtcagggcatcaagttcagcgatggcagcgacttcaacgccgcggctgttgtgtggaacttcgacaagatggtcgagttcggcaagagctccgagctggtgaacgttgcttcctacgaagcgaccgacgactacaccgttgtgatgcacttcgacacctgggccaacacctgggaagacaccatcggtgaagttcgcatctattgccccgccgcgtttgaggcgaacggcgctgactgggcggctatcaatgccgtcggtaccggccccttcgtgcagagcgagttcgtgcaggacagccacatcacctatgtgaagaacgacaactactggcgtgatggcgagccctatctggacagcatcaaggttctgatgatcagcgacgctaccactcagctgtccgccttcaagaacggcgagctggacgtgctgcgcaaccccaacaccaccgcaatcgagcagctgaaggacagctacgagaacgtggctggcaacgctcctgacctggctggcatcacctacatgatgttctgctccggcgacgagcagtctcccttctacgatgtgaacgttcgtctggctgtgatgtacgctgtggactgggctgacatggccgagggcatctacaacggcctgggcgatgcgacccccgtgttcgctgttcccggtgcttacagctacgacgataccctggaggtttatccctatgatcccgagaaggcgaaggagctgctgactgctgcgggctatcccgatggcttcaacaccaccatcaccatcaacgatgagaacgccgccaacaatcagtgcgccgtgatcctgcaggcttacctgtccatggtgggcatcaatgcggagatcaagaccctgaccaatgcggacttcaacgcgcagaaggccgagggcacctatgatctgggcatcatggtgaacaacggctcttccaagctggacttcaccgccaactacatccgtctgtactcttccgagggcgtgaactacaagaacatgatggcgaagcccgccgactatgaggaagctctgttcggcgcccgcgctgccaagaccctggaggagaagaaggaactgctgaagaaggcagctcgcctgttcagccatgactatgctctggttgtggccaccggctatatgcccgcttactgctatgcgcagaagggcgtgcataacaccggcatctgcaccaccaccgctgagtcctggacgcctgagtgcgcttggaaggaagctaagtaa

SEQ ID NO: 1522 - DNA, 1035 bp, Unknown
  Unknown gut bacteria
gctgttacctgctataatcgcgggggacaccatgtcagcggcgcggcctatgacggggaacggctcagcgagtataagggcgttcgcctgaaaaatatccccaccattgataaaaaaggccttgcggcagtttcggcaagcttcttcggctgcctgtgggctgcgttcggacggtatgacgtggtgcatatccattcggaaggcccggcggcattctgctggatgccgaaaatgcttggcaaacgggtcgtcatgaccgtgcatggattggattgggctcgggctaaatggaagggaacctttggcgaaaagttcatcctctacggggagaaaatggccgtaaagcacgcggacgagatcatcgtgctgaatcaggcgcatcagcggtactttcaggaaacgtatcagcggaagacgaacttcattcccaacggcgtgaatcggccgcaaagggttccggcagaggtcatccgcgaaaagtggggactggaaaaggatgggtatatcctgtatctgggacgcatcgtaccggaaaagggcgagcagtatctgtgcgaggcctatcgcaagctccgcacggagaaaaagctggttttcgccgggggcgcgtccgactcagcggaatacttcgagcagctgaaggcacaggcgaaggactgcgaaaacatgatctttaccgatttcgtgcagggacgcgaacgggaggagctgttcagtaacgcctatttgttcgtgctgccgagcgatctggagggtatgccgctggggctgatggaggccatgagctacggcaactgcgtggtggcctcggatattccggagtgcgcggacgtggtggaggatcacggcgtgaccttccgccggggcgacgcggaggacttgcgaagggtcttgcaggagctttgcgatcagcccgaaaaggtgcggcagtatcaggcgcgggccgcggattttatttgcgaaaaatatccatgggatcagattacggcgcagacattgaagctgtatgcgcggtcttcggcagagaaggcctga

SEQ ID NO: 1523 - DNA, 1251 bp, Unknown
  Unknown gut bacteria
atgacggacatggacaaacgtgcggcgcggctgaaatggtttcaggatgcacggttcggcatgtttattcattgggggttgtacgccattcccgcccggggcgagtgggtgcgttctaccgagcagattccgccggaaaactatgagtatctgaaggatgaattcaatcccgtgaactacgatccccggcaatgggccaagctgtgccgtcaagcaggcatgaagtatgccgtgctgaccacgaagcatcacgacggcttctgcctgtttgacagcaagctgacggatttcaaaagcaccaacacgccctgcggacgcgacttggtgcgggaatatgtggaggccttccgggcagagggtctgaaggtcggcatgtattattccctgctggactggcatcatccggattatcccgccgagggcgaccggaaccacccgctgcgcaatgtgccgggagcgcacaggggctatcactttgagcgctatctggaatacatgcacggtcaggtgcgggagttgatgaccaactacggcaagatcgacctgctgtggctggacttctcctatgacgacatgacggcggaaaaatggaaggccacggagctggtgcgcatggtgcgggagcttcagccggacattttgatgaacagccgtttggagagcagcggcgagagctacggcagcctgatgacggacgagcccggggagatttccggcgacttcacctgcccggagatgattatccctccccgcggactgcgcacgccctccggccgtaaggtaccgtgggaatgctgtgtgaccatgaacaacaactggggctactgcgccaacgatttagcctacaagtctgcggatgtgatcgtgcgcaagctggtagaatgcgtcagcaaggacggcaaccttatcatgaacgttgggcccaatgcgaagggtgaaattcccgcagagtcggtgaagattttgcaggaggtcggcgcatggatggcgcgcaacggcgagagcatttacggctgtggttcgtccgagctggacaagccggaatggggccgcttgacgcagaagggcgacatgctgtatgctcatgtgatggaacagacgctgggccctgtggcgctgctgggcatgaagggcaaagcggactatgcgcgtcgggtagacgacggttccgaggttttcatggtggattcctgggcggtgagtcagttcaaggaagatttgttcctgtcgctggatcggggtggttccgcc

SEQ ID NO: 1524 - DNA, 1194 bp, Unknown
  Unknown gut bacteria
accgcggacgtgcttcaagacaatcaaacgctggccagcaaggaatataacctgtccgagctgtatcagtcagataattccctgctgctggagttcccggacgacacgctgccggtgggtcgcaaggatgtgaccctccgcctgaccctgcatacggatggggagaccaatctgctccccgccttctgggtcggcaacaaggtcgatacaggccgcattgcgctggacgccagcaacctcgaccgtttgaccgtgaacggcgaggcgctgcaaggccagctctgcatgaccgtcgtcggccacagccgcagcaacatcatggcgtggtattggcccatttgcggggcgctggtactgacgggtgcggcgctggtactgatttgcgcatggaagcgtgccaacggcaagcagaatttcctgctgctggtggtcgagctgctggatcgctatcggttcctgatccgtcagttggtctcccgtgatttcaacaccaagtatcgtcaaagtgtgctgggtgtgctgtggagcttcctcaatccgctgctgaccatgggtgtgcagtacattgttttctccaccattttccgcagcagcattgcgaacttccccgtgtacctgatgaccggtatcgtgctgttcaactacttctccgaggccacgtcgcttggcttggactccattgtggtgaacgcgtcgctgattaccaaggtctacatgcccaagtacatttatcccctcagccgcacgctgtcctcgctcatcaatctgctgatttcgctggttcccctgctgctgatgatgctggtgacgggtgtgccgctgaccaaggcgcttctgctcacgccgctggtgattcttttcgtattcaccttctcgctgggcatgtccatgttgttggcgacgatgaatgttttcttccgggacacgcgcttcctgtggagcgtggttgtactgatttggacgtacctgacgcctattttctacccggagagcatcattcccgcgcagttgataggcctctatcacatgaatcccatgtatcagttcatttacttcatgcgctgcatcaccttgggcggcattgcgccgaatccgatcacctatctgtactgcacgctgggctgtgtgattccgcttttgattggcgtgtgggtgttccggaaaaatcaggatcgcttcgttttctatctgtga

SEQ ID NO: 1525 - DNA, 1215 bp, Unknown
  Unknown gut bacteria
atgctgctgaccggctgcgccctcgttgagaaggatcaggctgtcgatctcggtcgggaagtcattcgtgtgtcctatcccgccggcggggacgacatcgtgtataccaagggtcaggtgctgaacaatgtggagtatcagctgaactacatggcgtatatgtacaacaggttcggttccagctatgacgcgaccagcgcgaccaacatcgccaacaccaaggacagcgtgatggattcgctggtgaaaaacagcgtggagacgctgatggcgcattccctgaagctggacgaattcaccgacgcggagctggaagaaatcaacagcgcggcagataagaattgggcttccctgaaggacagcctgaaggctaaggaatttgccgacaccgagctgaccggagacgagctggacgcggcgctggaagcccgtctggcagagatgagctactcccatgacgcgtatgtggaagcggagaagcagtccaaggcggaagagaagctgaaggactacgtcatcaaggacgtgaccgtgaccgaagaggagctgcaggcggactttgacgcgaaggtggcctctcagaaggagacctacgacgcgacgccttcctcttacgtgagcgcgaagaacagcggcagcacggtatattatgcgcctgccggcgtgcgtctggtgaagcagattctgctgaagttctcggatgcggatcaggcggtcattgatgagctgaacaccaagatcaccgacaagaacaacgcggtgtccaccctgaccagcagcgtgcgtgacgcgctgggcagcgatacggatgtgacggtggaggatgtgacggcgcaggtgaaggtgacgatggagcagcctgagggcgtatccaccgttgcgacggtcagcgacctgacggcggacttcacctccgatgtgaacgaggacgtgcaggatctggcgaagcagctggctcaggcgcaggcggagctggctttctatcaggagcagctgacggcggcccgtgaggctggctgggcgaacctgagcgacaaggcggacgacatcctggcgaagctggccaacggtgcggacttcgacgtgatgattgccgagtacaacgacgacagcggcatggcgagcggcagcaccgcacgtaagaacggcggctatgcggtttgcgagggttacacctcctttgacagcgatttcttggcggcggccatggcgctg

SEQ ID NO: 1526 - DNA, 930 bp, Unknown
  Unknown gut bacteria
atgttgattgcgctacacaagcaagatgcctccagcattttagaaaagcaaaagctgattgcccgtttgctgcaaatgcaggccttcagcaataccatttgcgatattggcatttacttgaacaatctcgaccagatcgtaacctccaagagcagcagcaactccgaagatttctacgaatacatggagcacatcaccctgcgaaccatgcaagcagaattgcagcgtacatcctcgtccaagctgtgcatgttcgtaggggtggattccgtacgccggatcatgagctcggaaaaggtgcttgtgtttatgtccgccctgcccatcaatgcccctgcgggaaaagattttgcgttttttcatttgcagggcagtaaagtggcttcctttctgactgaaagccaaagcagcttcatgctgctggccgataatgaaggaaacgccttattgggcgtaacgaatgacctgaccggtgcattatgcaaaacctatatggagaatcatgccagcaccatccgctataacgggcaggaatacggtgtactggccatggaaaccgatgcgcagggactttactgtatggccattatgccctttacgcaaatgttcgcacaggccacggaaattcgcagtctgaccatgctgattatgggtgtttgtatgttgaccggtctgctggccgctacattcttcagcaagcgcatgtatgcgccgctcgagaatctgctgcaaagcattcggcaaatggggcatgcgcttccccatgcaggaaaagcagacgagtataagctgctggacgatgcgattcatctgatttccgaagagaaccatacgttgagcctctccaatcaagaggtgaatcggctgctgaaaaacaatctgttgggtgaatggatggaggggcgcttaaagcgcaatgccgtagaatca

SEQ ID NO: 1527 - DNA, 1284 bp, Unknown
  Unknown gut bacteria
gtgcagtatgcggactcggccatggtgggccaattaggcgcacagtccacggcggcggtgggtattaccacgccggtgagctggctggtgaacgcccccatgtttgccatgggcataggctttttagcgtgcatttcccgtgcgctgggtgcgaaggatgaaaagactgcccgcactgcggcggggcagaccattttcgcggtgctgattctgggcattggtattggtcttttgaccgtcggcctgagcccctttattcccggctggctcaacgcggcgccggagattcaagcgaccgcgtcgcggtattttgcgattgtctgtctgcccatgatattccgtgcggcaagcgcgctgttttcctccgccctgcgtgcggcgggcaacacgcgcacgcctatgctggtaaacgccgccatgaacgccatcaatctggtgctgaacttcttcctgattttcgacagttgcacgctgacgcttttcggtcgtgagctgctgatcccccgtgcgggcttaggcgtggagggtgcggcgattgcttcggcgatctcctatgtattcagcggcttgatgatgtttcgtgcgctttggcggagtccgcttttgaccccgaaggggatgcgcttgcgctggaacaaggaggtcatgggacaatgtgcgcggatcggcgtgcccgtggtgttcacgcggatcggcgtatgtctcggtcatgtggtctttctgtcgcaggtgtcctcgctgggcacgacggcgctggcggcgccttcgctggcgctgaccacggaggaggctgtgtatctgcccggttacggtatgcaggctgcggcctcgacgctggcgggcaatgcggtgggtgagcgcaacgagcgaaagctgatgcgcgtttccatgctgatcttgatttcagcggcgctgctgatggcgctgacaggcgggatactcttcctcttcccaagtttgatgctttcgatctttacgccggatcagcaggtcatcgccatgggcgcgacggtcttgcggatcattgcggtgacggaacccatttatgcctgtggcattatttgggagggcgtattcaacggcgttggcgacaccaaggctccgttcatcatttcgatgttcacgacttggtgcgtccgcattctgctgaccgccatctgtgttcacgtgctgcacctcggtctcaccgcggtctggtgctgcatggcgctggacaacgtgacccgcgccctcctcctaggtctccgcttcttccgcggcaactggaaaaaaggattattttaa

SEQ ID NO: 1528 - DNA, 1173 bp, Unknown
  Unknown gut bacteria
ctgaaccgccgcctgtgcgccaagctgtggaattatttccccggcgaatgggagcgcatcggctccatggccattatctcctataaccagattcacatggcgaacctgtgcattgccatgagcttctccattaacggcgtaagcaagctgcacggcgaaatcctcaaggaagataccttccacgattacgccagcatcatgccggagaagttctccgccatcaccaacggcattacgcaccgccgctggctcatgggctgcaaccccgagctgaccagcctgatcaacgaggccatcggcgacagctggtatcgcaatcccgaaagcctgagcgccctgaagcccttcgccgaggataaggccttccgcgaaaagttcgctgcggtgaagcgtgataacaaggagcgcctcgccaagatggtgctgcaaaatcagggcatcaaggttgatcccagctttatcttcgacgtacaggccaagcgcctgcacgagtataagcggcaaatgctgaacgcactgcatattctggtgctgtataaccgcattgtcaatgacgaaagcttcaccatggagcctcgggtgttcttcttcggcgcgaaggccagccccggatactaccgtgcgaagctcattatccgcttcatcaacgcgctgagcgacctcattgccaagcacccccgcgcctccaagatgctgcaggtggtgttcttggagaactataacgtctccaccgccgaggtgctgatgcctgcggctgaggtctccgagcagctatccaccgcctccaaggaggccagcggcaccggcaacatgaagttcatgacgaacggcgccgtccccatcggcaccatggacggtgcgaacgtggagatcagcgagcaggtcggcatggacaacatctatattttcggtatgcgcgccaacaccgtacaggatatgtaccgggagcatacgtataatcccatgcagatttacgagacgaatcaggaaattcgccttgccatgactcagatgatcgacggcaccctgttccccgacagcgccaccaccctccagcccctgtatcacagtctgctgctgggcgactacggctccatggcagacgcctacttcgtgctgaaggactttggctcctactccatggcgcagcgccgtctgaacgacgactacgca

SEQ ID NO: 1529 - DNA, 1863 bp, Unknown
  Unknown gut bacteria
atgaaaagtgcaaagggtttcctttccctgctgctggcccttgtcatggtgctgagcgtggcgagcgtttccttcgcggaatccgccgtgacgctgacctatgctgaggatcagacgctgcgcgtggtgtacggcaccgaggcttcctctctgtcttcgctgggcggcaacggtactgccggcgactggaaggctatctccaatgtggtggagggtctgctgggcgaggactcctacggtcatcgcacctatgcgctggccgacagcttcaccatcagcgaggatcagaccgtgtacaccttccacattcgtgaaggccagtactgggtcgattacaccggcaagcaggtcgccgagctgaccgccgaggacttcgtgacctctgcgaagttcatctgcgatcccgccaacgcctccggtaacgcgtactactacgccgataccatcaagggcgcgaaggaagtgctggataccgagagcggtgtgaccggcttcgacgagaacgtcggcttcaaggcgctggataagtataccctggagctgacgctggtcgctcctatcccgtacttcaccgactactgcggcagctttatccccgtgcccaccgagttctataacgagatgggcgaaatgtacggcacggacgctgagtccaccctgtacattggcgcgtactacgtctccgactgggagccccagttccagcgcgtgtacaccaagaatccctactacttcgatgcggataaggtgtacatcgacaaggtcgtcatgacctacaacgctgaggccagcacgctggcgcctgagatgttcaagcgcggcgaggtcgatatggcgaacatcggcaccgacattctggatgcttggaagcaggacgacgcgaccaaggacatcgtgctgcccgcgctgcccgataacacctacatgtactattacagcttctgctggaatcctgatctggacgaagcaacctacgagacctccaattacctgaaggccatcgacaatgagaacttccgtcagtccctgtattggggtctggatcgctacaaggcgaacctgaccaaggatccctacaacgcggatctgtacctgaccaagaccatcacccccgaaacctggtgtgaggtggacggcaaggactacaccgccttcgacgagctgaagggcatcaccgagcgtgaaaactacagcttcaatgaggctaaggcgctggagtacaaggaagctgcggtgaaggagctgaccgaagcgggcgttaccctgcctgtgaagatggtcatgccctacaaccctgtttccaatggctgggcggaagaagtgcaggtcgtgaagcagcagctggaagcgctgctgggcaccgattacatcaacctgaccatcgaggccggccccacctccggcttcctgagcgccgtgcgccgcagcgcgaagtatcagttcatgaagctgaacaacggcggctcctatactgatcccaccgcgtggattctggccttccaggccggcaacaactggaccttcctggatcaggtgacgacccccaacgtgcaggcgctgcagaaggaatatcaggccctgctggacgaggccgcgacccacaccggcaaggacgaggcccgctatgcggcctatgccaaggcggaagccttcctgctggagcacgcgctggtcattccgttctctaccgacacgtggggcaacacggttggccgtgtgaaccccttcgagcaggtgcccgatcagtccggccgctataagtacatgcacgtgctgtctgagccgctgaccgcggagcagttcaccaccctgtatgccgagtggaaggaagcatgcgttaccaacgcgcccgaggttcagtaa

SEQ ID NO: 1530 - DNA, 1209 bp, Unknown
  Unknown gut bacteria
gagcgttcaggcatcagcttctccattactgatgaaagcattgcaaccgttacgagccgcggtcgcgtccgtgcccgcgcagtaggcactacaacgctgaccgttaccgcaggaggccttcagcgtacctatccgctgtatgtttatgggaaaatcagcaaaattcggctggatgaagcgccttctgaattgatggtaggccagacaatgactctaactgcaaacgatggcaacggcaacgccgtttccgcgcatttcatctcctccaaccccaaacttgcctcggtggatgcgcgtacaggcgttgtaacagccttggctcccggacgtgtacgcattacagcgaagcctgcctccgggcagaataaaaccacctacaaaaccattaccattgttgcagcaccggaacacattgagctgcccgaaattctccaactgcctgtcggtgcgtcgcaagcattattgtctaatcaaacggctctgccggatgcacgctggcagtcctccgatcctcaagttgccattgtagatgagcaaggcattgtaacagcgtgcggagccggaaccgctgaaatcacgctgacaagcgaagcactttctcagctttccgcgaaatgtaccgtctatgtgggtgctgctgtaaccgctattgctgtgaatgcaccaacagatatactttggtgtggagacacatggatgttaatgccgcaggtcagtcccagcaatgccgcctatcctgtccttagctggcaatgcgaacctgaaggcatcgtctctatagataatgcaggaattctcaccgcgcttgctcccggtcatgttgaggttactgccgccgcgcaggatggttccggcgtatccatcagcttctctattaccgtaatgcaggaagtcgagctgatgctcccctactccgttgagttatccgttggtgaggtctataccccgccgaacttcgatcaagccgagatttactgggctgtcagcgattcttctcttctgacgcaagaggctgacggcttccgtgcgctggccccggggcttgtcacgctgacggcggcgcttgggaatcgtcatgcccaatgcgacgtgcatattgagcagttgattacagggatcgcttttgtgaaaaccatcgagaccatgcgcgtgggcgacatcttcattccgctggtggattgtcagccgctgactgccacgaatcgccgg

SEQ ID NO: 1531 - DNA, 1824 bp, Unknown
  Unknown gut bacteria
aacacccgcaatgcctacggcgcattgatcgtcagcaagacgctgagcggcaatgccacggaggcggagcgcctgttcagcttcgagctgaccctgcgcaacgacggcttccagaacgatctggatcggaactatcaatgcgagctggtggagggtgcggcgagcacgccttacgaattgaaggttgtgaacggcaaggcttccttccagctcaagggcagtcagagtctggtcatccccggcattctgcgcgacacgctttgcacggtgacggaggacgacagcattctggcggaaaactacgagattctgggcgggaacaagcgctatgtcaccatcgttgaggaggacggcgtttataccgcggcctacaccaactatcgcgcctccggcacgctggaggtcagcaagaccctgcgcggcaacgcgacggacgcggagaaggaattccgcttcacgctgacgctgagccgcaaggacgacatgctggagagcctgtggaagaaccacacctacgaagcggagctgacggctcccggcctgtacaccgtgacgacgctggaggtcaaggacggcaaggcggagttcaccctgaagggcggacagacgctgagcattctgggtctgcccaagggcacggagtacattgtaaccgaggacgacagctgcttcgcggagggctatatcaccgagcctgacacgtacaccttcagcaacacgatcaccgatgtgcccgacggctatctggcagactttgtcaacaaccggaatgagggcagtctgaccatccgcaagaccctgagcggcaacggcggcgacgcgaaccgcaagttcctgttcaccctgcgcctgacgcgcaaggatggcgtgaacgtcagcggcacctacgcggcaaagctgaacggcgaggcggcgacggtaacggtggacgaaaacggctatgtgacctttacgcttgcggatcaggaggagctgaccgtagagggcattctgaccggcacggaatacaccgtggccgaggaggactgcgccgcggacggctacaccaccacggcgacgaacgctgcgggtgcgatcacgaccgcaaataccttggcggccttcgacaaccaccgcgaggtgggcagtctgacggtgcgcaaggtactggaaggcgacgcggcggacgaggaaacgatctggcactttgtcattacggcaacgctgccggatggccgcccggtgaacggcaccttcccgctggagggcaggaggaacgcggagatcgccttcaccgagggcaccgcgaagctgtccctgcgcggcaacaccgctgtgacgatcacgggcctgctggcgggcacgacctaccgcgtgcgcgagatcgaagcggatatcgacaattacgtaaccacggcgaccggcgcgaacggcaccatccgctatgcggagacggcgacggcccggatcgtcaacacgcgcaacatcctgcaggagtacaagaacatcagcgtggaaaagacatggagagaccgcaacaaccgcgagaagctccgtcccgaaacgctgaacgtgtacctctttgcggacaacgtcgccattgcaaaggcgaccctttccgaggagaacggatggaagttcaccttcgagaatctccctgtgtatcatgaggacgcgaccgagatcagctatcgcgtggtagagacggccaccgccggatactacgcacggacgcagtatgacgggaacacggtgcgcctgaccaacacgcacccgacggagaccttcatcaccatcgaggatacgcctgtacctctgggcgcgggtatcaacatgaacgagggc

SEQ ID NO: 1532 - DNA, 1230 bp, Unknown
  Unknown gut bacteria
atgaaaaccatcaagagaatttccggcgtccttcatgtagtgggcgttgtgctgctgtgctttgcgctggtagcctccatctatgccgccgccaactacggtacggtgtggagcagcatgcggggcaagctggcggagtccggcgttgagacgaatttcctgaccaagatcaagtttgacaatcgtctgtacagcgccctgagcgcggcgctggcggacaaggacagcgcgaccacggctcgggcggcgaagctggagaagtactttgcggacttcgccagcgacgcggaagcgaaccgcgagacggtgctgaccaacgagcgtgaggagctgctgagctacttcgagaacgagttcgactatgcggcgttcctcgaacgctataacaagctggaaaatggcgagggcgcgcaggagcagcgcgaaatctttgaatatctggattcgctgacggtggtgctcaagaagggcaagctgaacgtgaagcccgcctcctgcgcaccgtggttctcggattactacggaaccttcgcggaggagcacggcgaggaagccggaacgtatctggaattcctgaccaccgtgcgcagcatgatcgagacttacgtggcggacggcaacaagctgagcgccgcgaaggattacatgacctccggcttcacctatgaggcctatgtggaggagctggccaagacccgcgccgctgagaagcaggagagcgtgggcaacgcgctcgacgatatgggcgcatgggctcaggcgaagaccgacggcgaaagcatcgacgttcgtgaaccgctggaaagcactttccagaagctgaaggaaaagtacagcgacgtggagctggacgactggaacgtgttccttgtcagcatgaaggaattgctggcgggcgacgcggcgaaggatttcgacggcagcttcagtatgctggcggatgaaatgcgcacgcagatcaccgcccggagcgccaatgctttcggcccgtacctgacgagcttctgccgcgaacttgtgaccattgcggacgcaagcggcgccatcggcatggtgggcttcctgtggggcgtagtggcgcagtttgtgtggctgtgggtcgcgggaatcgtgctgctggtgctggcgaaggtgctgaccatcgtgctgaccaagcgtctgctgaagcagcgcgagaaggccggtattcaggaggatcccgacgtgctgctgcgcgtctcccacctgaag

SEQ ID NO: 1533 - DNA, 993 bp, Unknown
  Unknown gut bacteria
atgatggacgaaaagaagctgcgggacatccccgctgaaaaattccaatttgcccagaagggcgcaaagctctatgacgccaagctggaaacgaagcccatcggttacttcaaggacgcgtggatccgcttccgcaggaacaagagcgccgttgtggcgtttatcctgatcctgtcgctgatgctgttttcgctgatcgtgcccttcgtgtcccagatggacgtgaacttccgcgacggctattacaagaccgtgctgcccaagatgccggggctttccaatctgggcgtctgggacggctgctccacccagaaggtgacccagagcggctatgactacctgcgctccatcagcgtggagacgggtcgtccggtcatcattcaggaaaagaatagttatcaggacgccaagggtctgcaatattacgacctgaaggtggacagctacaccaaggtcggctacgtcttcatgaacctgagcgaaagcgactatcagaagctgatgcagtatcaggatgagacgggcattcaggtcatttatccccttcagcagacgcatcagaccgactacgtgatggctaacggcggcgcgaacttctggtacaagctgaagaatgagaacaagacctccgacggtgcggcgctgctggacgaggccgggaactttatcccgaactacatgaccagcgacaacaaggaaaaggccgggtataccagtctgcgcattgcgggcgacaacggcggcgcggatggcaacacttggtatgtctacgcccagaagaaccagtccggctataaggtgcgtctggattactatgagtatttccagtacatgaacggctttgagcccatgttcatcttcggcaccaacatgtatggtcaggacatcttcgcgtgccttgcggccggcggacggctgagcttcctgctggccttcggcgtgagcttcatcaacctgctgatcggtgcggtgtacggctccatcgagggctac

SEQ ID NO: 1534 - DNA, 1134 bp, Unknown
  Unknown gut bacteria
ctggtgccgattctggtagcaatcatcgttcttctgctggcaacaacggcgtgggcgatggtgaatcgcagcagcgtaaccgactacgataagtcggaacggctggccagtcacgtaatcgccatcaatcaggattacgaggatgaacggatcaagctgtcctttaacgacgcggtgtttgacggacagcagctttcgctggtcatggacgcggagaataagaagccggaggagcctgtgtttgtgcaggtgggcatctacgcgacggatgaaaacggctataccttggaaactgacgtggagggctgcggcggactgaacttcttctcgggcagtctgttcccggcgctcacgccgcagatcgacgacggtcagccgtggagcgtagacgtggccctgctggacgaaacgctgcccacgggagacgtgcattggaagttcaccgtgcgtgtgcttacgccgaactggccccttgaggtgggcgacgacgttttcgacggcacggaggactatgacgcgatcatgcagcggtacaaggacgcttactcccagaagaagattcgtgcgctggacggcgctgatctggtggaatactgttctgtgctgccgcgtccggtaacggtggacgaatatacgtggacgtacatgcgctggtgggagcagctggtggcctgcggtgcgtttgatctatataccacagtggactgcgagttcaccgcgtcagcgccccgcgaggatacggcgctgaacattgcccccgatacggtctatgatctgggcgactttaccgcgtatttccaaaagctggacaaaaccttccagacggtttccttcaccctgcgctgtgatttcaaggatgcagacttgacagagacggaacaggaggagctcagcgaggtactgacccatgtaaagagctggcacttgtatttggatgatacgctgatggagtccacgacgtacatgagctcgggcctcgaggaagacgacgacggcgtgcgctatctgtccctcggcgcaggcgtatccatcccggaggagatgtcccccgataccctgaccatcgtgcccttggacgcgcagggacaagagctttccgcagaaaaaattcaggtggatttgacgggaagctga

SEQ ID NO: 1535 - DNA, 732 bp, Unknown
  Unknown gut bacteria
atgaagcttcaggaagccttggaacgactggatacgtatgaaaaaacgtcacatgcttattcgcacgccatgggtgtgatctcgctggacgctgtgacctgcgcaccctccgggtctgctcggggacgcggcgaaaccatggcgctgctcagcgaagtgacctataagcagcttactgaccccgctacggcagacatgctgcatacgatcatggagcatagcgaggaagtgacgctcaaaacccgccgtcaggctgaggtgctgctggaaagctatgacgagctcacccgcattcccatggacgagtacgtggagttttcccggctgctcaacgacgcggacgcggtgtggcatcaggctaagctggacagcgactttgcctccttcgcaccttatctggaaaagctggtggactacacccgccgctttgccgcgtataaaaacgataaaaagcctgtctatgacgtgctgctgaatcagttcgagaagggcgcgtctatggatatgcttgatccctatttcaatgccctgcgcaagcagctcacgcccttgattctggcgattgccgaaaagcccgaaccccgcacggatttcctgcaccagtattatcccgtggaggctcagcggcatttctccgataagctgatggaaatgatgggcatcgaccgagcctattgcggcatcggcgaaacggagcatcccttcaccaacggcttcaaccgctgggacgtg

SEQ ID NO: 1536 - DNA, 1029 bp, Unknown
  Unknown gut bacteria
atgcaggacggcaaggtcgtggctattccggtcaacttctatggctggggcatggcggtcaacctgaacgtgctggaggatatgggcctgaccatggacgacatgcccacgaattatgtggagctgtgccagtttatcacgaagtggaacgacgaataccttgacgagtatcccgaatatctgcccatggagctgtatggcgacagcagcgtgaagcgcatcctgttcagcaatatggtttcggattacctgtactattgccaggcgaagaacgaggatgtgcgctttgatacgcccatcttccgcgaaatgatgcaggcgctgaacgacatgcgctgcgacgacatcgacagtctgctggaggaaatcggggacagcgattcctactgggaaaagcagtttgcgattaccaccggttatcccacggtcggttcctttgactattacgagggcagctccggctacaataatacccgcccgctgttcatgaagctgacggcggatgcggatcaaaccatcggcggcgacctgacggtgatgttccttaatccccgcagcaagaacctcgactatgcggcgaagctgctgcaatgcgagctggaagccatggaagtcggcgtgaagtatacgctggatacgaccatgaccgaacccgtggagcaggagaactttggcgaaatgctcaagacttggcaggataatctggattcgctgaaaaagagccgcgatgaagcgcccgaggatgaaaagcggaactacgacgaaaacattgactacatgcagaagctgatcgataatcaggaaacgtaccgctacgccatcagcgaaaaggcgctggcttacttcagggagaacgttgcgccgtatctgtatgtgcagcagcccaccttcctgaattccagcagcagcgacaagaacgcggagctgcagaccctgatggaccgctacacggcggggcagatcaacaccgagcagttcatcaaggaagcggacaagaagctgcgcatgatgcagatggaggattattga

SEQ ID NO: 1537 - DNA, 969 bp, Unknown
  Unknown gut bacteria
atgagcaaggaaaagaaacgcgacccgatcaaggtcatgcttcgatggacggtgattctggcggtggtggccgtggcggcgttgctgctcggcaacgcgatcaccagctaccgtgcgggcgtactgaaagctcgtcaggatgaagctgaaaagatcaacgcgaagcgagacgaggaatatgccgtggcgctggcggagtttgaggccgcgtctcagagcggcgcaaatctggcttggcccgcgcagaaaaccgagggctgggacgtggtcgatctgaccaattacccgctggaaaacgtttataccgtaacggtgaaccgttcggacatcatgaacggcggtatgctgctggtgaaccaatggcattcccgtccggatgatttcaacgagtcggagcttgtgagcatcatgagctatgtgggctcgcggaatctgctgtacggtctgcctggcagctccacgcagctgatgcccgtagcgatcaacgcgctgaacgagtgcattgcggacgcgaacgccatcggtctgacgaactacaccatcctggaaggctaccgttccatggacgagcagcagcagctcttcgataagcagatggagtcgctgtccagccgttacagcggtgatgcgctgatcgagcgcacgaagcagtacgtgaattatcccggcaccagcgagtatcaaacgggcttgagcttccgtatgcgcatttacaagaagggcgattcgcaggtgaacgatcaggccttctcgaccagcgagcagggcaagtggctggcggagaacagctggcgctacggcattgtgttccgtttcccgctgacggactatccgctgccctacacggcggacaagagctacaagacgggcatcagcacgcagatgaacctgtaccgctacgtgggcaagggcaatgcggcggtgatgcacacgctggatctgtgtcttgaggaatatgtggaatatctt

SEQ ID NO: 1538 - DNA, 1098 bp, Unknown
  Unknown gut bacteria
ggtgcattgcgcaatcaagatcctgctgtaacggcttcgcgtaagctggatgctttcttttatcagattggcactattgaaaacccgccctatgacagccaacccgcgatgctgcaattcctacgggataacggctttccggtaagtccttatctgggtgagccgaaaaatggcgaagagttgattgcctgtatccgtcatattgaggaagtccgcgatacgctggatttcctgattgacggcgttgtcattaaagttggcgattttgcgcttcgtgagcagatgggcttcacggacaagtttcctcgttgggcggtagcgtataaatttaaggccgaagaaagtgttacgatcttgaaaaaggtcacatgggagctcggccgaacgggcaagctcacaccgctggcacacttggaacccgtagatttctatggtgtgaccgtgcgaaaagctacgctgaataactggggagacattcagcgcaagcaggtggctattggcgcacctgtttggattcgcagaagcaacgatgtgatcccggaaattatgggacgtgtgggggagccggggcctgatgaacgccctattgagaagccgacgcattgtcccgcgtgtggtcatgagttggaagagcgcggagctcatctgttttgcatgaaccgtgtcagctgccgcccacaggcagttgcgcggctcagccattttgctagtcgcaatgcgatggatattgaaggcttttctgaaaagactgccggtcaggtctatgaccagatgaacgtccgtgatcctgctgacctttatagcttgaccatggatcaggcacttgcattggaaggctttaaggaaaagaaggccgggaatctgttggcggcgctcgaaaagagcaaggactgttcgctggatgcttttctgtttgcgttgggcattccaaatgtaggtcgcaaaactgcgcgtgatcttgcagcggcttttggcaccttggaaaagctggaaaaggcaacggaggaagagcttgtcgccattccggacgtaggcgacattgttgcccagagcattacggaattcttctctttcccagagaatatggaaatgattgat

SEQ ID NO: 1539 - DNA, 1689 bp, Unknown
  Unknown gut bacteria
atgctgccatatctggcgggaagcgcggcaaggcgggagatgcagcgggaatttcgcgggctgaaccggcgtgcgggcgctgcggaaaatgaatttgccgcgatggaaaacatgacggggagccagtatccgctgctggctccccgggatccgcggggaaaggcgcgggggttgaagaagctgaacgggatgctgggcggtgcggcgctgtgcctggtggatgggacgagttttctttatgacgggagcgtctacgggcaggtgacggatagcgagaagctgctggtgcggatgggtgcgaagatcttgatcttcccggacaagctgacctttgacacggagacgcggagcttttcggcgctggaaaatcacgtgacggtacccggggtgaaggtggcgccgctgctggcggacggcacggttttgggaacggtcacggaaagcgacgtgccgcccatggaggcggaggacggggccttctggctggacacgcgtgacaagcaactgaagcaatacagcacggcgcaggagcaatgggcagaggtcgcgggaacgaggctggcgctacaggctgtgggaattggcgtagggtttcaggcgggcgacggggtgcgcattcgcggcacgggccttgcggaattggatgatgtgtgtctgctggaaaaagttgcggacaatgaggtacaggtgacggggctgctcagccgggagaggtacatcgacgggaaggtgacactggatcgggacgtacctgatttggtattggcggcggagctgaacaatcgcgtgtggggtgtagaggcggacagtcaggagattcgtgcatgcaagctgggcgatccgacaaactggaacgtttacgcgggcgtggcgacggacagctatgcggtcagcgtaggctcggacggggtgttcacgggcatttgcagctttatggggtatgtgttgtttctcaaggaaggatggctgcacaagctctacggcacgaaaccggcggattttcagctgacggctacgctggcccgaggcgtggaggcaggagcatggcgaacgctgtgcccggtgggcgacacgctgtactataagggtacggatggggtatacgcctatgacggcagtctgccggtgcgggtcagctgggactgggatgagctggcgcgaaagggactttctgcggcggaggatcgcgggcggtacgtgatcgggctgaaggatgcgacgggtgcgggcgaggtgctggtctatgacccggcgcatggcatgtggcatcgggaggacggcatctgcgtccccggcatggcgcatgcggcgggggagacgtggatggcggacgagacgcatcgggtgctttggagccgaaacggcacgctgctggcagggcaggcggacagcgtgatggaggacgcggttcgttggcgggcagaaacggctgactggaatcagaagcgtccggacaaggtagcgctggtcaagctgatgcttcgcgcttatctggaagaagggacggagctgacggtggaggtacagtacgactctgacaaggtatggcacagggcggcgcaggtcatcggcacgggcaagggaaccatggagattcccgtatttccgcggcgatgcgaccatttcaggctggcgctttcaggcgtgggcggtgcggtgatttacagcattgcccgggaatatctgccg

SEQ ID NO: 1540 - DNA, 1029 bp, Unknown
  Unknown gut bacteria
atgctggaaaatctcggttccgcagaaggcgtgtatgatgctgtacagcgtcatggggataagccgctgaagaattgcggcctttcatctcgtcaatgcggcattctgctggaagaggctgagcgaaagcggatgcatgatcggctcgttctgctgcaaaagaacgagatcggcttattacagcaggaggatgaacgttttccggagctccttcgtcagttgaacgacccaccatggatgctctattggcggggtgagctaaattgtctgctggggcggcatctggccattgtgggcacgcgaaaaagctctgactacggtgtgaatgtgacacggcatattgcggaagatttgagtcgaagcggcgtctgcatcgtcagcggcatggctcccggcattgatactgcggcgcatgacggctgcatgatgggcacctcgccgaccattggtcttgccggatgcgggctggaacgtcccaaaccgcttggacgcgagggcttggatcaagacattatagagcatgggggactggtactgagcgagtatccgccgggagtcggcgcattgccgtatcattttcctacgcgcaatcgtttgatcagcggcctgagcgacgggcttctgttcatggagggacgcatacgcagcggagggatgattaccgttggctgtgcgctggatcagggaaaggatgtttttgcttttcccggttccgcgggccaggaaggctcggagggccccttgcagattatccgtgagggcgctacgctgattcgtgatgcagcggatattctggcagatatgggctgggaagacgcggcttcggcgcctaaggtgatggaatcgcttccgccgctggatcccgatcagcgtacggtgctgtcgcttttgacggtggaagagctttcctttgaccaattaaccttcaaaaccggcttagacgcttcaaagctgaatgctgcgctgacgctgctggagctatccggactcattatgcagagtcccggcagaatctatcgtaaggcataa

SEQ ID NO: 1541 - DNA, 678 bp, Unknown
  Unknown gut bacteria
cagacctacggtgctttgcgcaaggaggtctcaaatattgatctgtacagccttgcggaatatgaaagctatatttgggaaaacggcgtgacgacaaatgcggagcgccgtctggcagacttgcaggagatgaatcggcagctgaactggaagtatgcttccagcagtcagaccagcgacgcctatcgcaagatcctggaggaatacaacaatcagatggtttcctccgtgctgatccctacctatgattccaccggtgcgttttatatgtcccggaccaaggtgggcattgatgatttgacgctggaggccaacgagctgctttccacggccacggcttacagtaagagcattgcaacgaacgtctccaagatcaatgcaattcgacagggctgcacgaaggagcagcgggaaacggcaacgcgcatggcggagaacattgcggcgaagatgagcaaagttgtcagcgagatcgaacgggtggatacggaatattatgatcaacgcatcagcaattatctggtgttcacctcacagcagcggtcgctcagcgagcgaaccaatgccaaacaaagcttgatgattgcggcggcgctgtgtttgatgagctacgccttcagcctgtggcgtgcgtgccgcagggagcgcaaggcgtatttgatggacgcgaagagatga

SEQ ID NO: 1542 - DNA, 1008 bp, Unknown
  Unknown gut bacteria
atgccgcacgaatcgaaaagggtggtgccgaatatgaaaagcttccgcaaaattctatgtctgtcgctttgtctccttgctgcctgtctgctggcgcttccgtgcgcacaggcggacggagcgtgggggcagtatgcttcgctgaaaatgaaaatcgctacccgcaccggcccttccaccgattataccgaaccgggcaccttcttcccggatacgtggcggaatcagcaggtgcgcgtgctgacccgatgccagaccaacggtacatggtggctgcaaatcgagtttgagaacaagggctcccgctatcgtgcttatacgggactcaagcgggtgaacgtggatatttccaccgtacccgacgaatatcccatgggcacggcctatatcgccggggatatgtaccccatcggcttctacggccccggcacggactatgcccgcatcccgcaggacattcctccggcgctgtccggcacggtcatggacgcagagaacggcttcgtcctgttcgatttttatgaccccaatctgggacagcagcgccgggcatgggtggactatgagacgctgttcatcacctggaacgacggctccacctccgcctattacgtctatcccgaagaggatccccacgtaagctggacggattacagcagctctgcctatcccaacgccacccgcgtaccgaacagcacctacaccatggcgacgccggagacccgcgcccagttcgcccccggtcagatgttctataagacagataatcccaacacttggctggaaatgctggattacggacagcagggcaacctgacctatgtaaatctgtatctggacggaacggttcgctatgacgggctgagcatttacatgaccggcctgaacgacggcgtattcaccaccgaggacggcagctacggcgacgtgcattttgccacaggacagatcgacttcaatatctacctgcccaagtacaatgccagctgcgaaatgaccatgcggtaa

SEQ ID NO: 1543 - DNA, 1380 bp, Unknown
  Unknown gut bacteria
accatcgccagcgtgcagaaccctgaaatcacgcaggtctatcatgtgctggtggtgcagcccgtttccaaactgactgcttctgtggatgccgccaagctgttcattgggcagaccgcgcaggtctccgtagcttatacgcccgacaccgccacggtgaaggaagcgacctacgcctccaagaacccgaagatcgccgttgtggatgaaaatggcgtcgtgaccgcgttgagcaaaggtactgcgacgatcgaggtcaccgctgcggacggcagcgccaagaaaacgtccgttcgtgtggtcgtcaaacagcagcccgagggcatttcgctgaacaaaactgacctgaccatcaatgtcggcaagacggctcgtctgagcgcctcggtcacacccgccagcaccaatgacaagtccgtggtttggacctcctccgatgaatctatcgctaccgtgacctccaccggcacggtgaaggcattgacccccggcgtttgcacgattacttgtgccagccgtgatttcccgaccataacggcgaccgccaccgtgcaggtgcagcagcccgtcacccgcgtggccttcacagagaagagcatttccttcgacgtgaacactaccttccagtcctattatgagattgagccctccaccgccaccaatcagggtgtgaccttctccagcagcaatgagaagattgcgactgtagatcagaacggtgtgattaccggccacatgaagggcacctgcaccatcacggtcaagaccaccgacggcagcaaacgtaagggcacgatgaaggtgagcattctccagcctgtcacgggcgttcacatgtccaaggcggagtaccgcgttggcattgatgaaagcactcgcattcgagcgattctcgagccgaccaacgcctccaacacgaacatgagctggtcgattgcggacacgtccattgccaccgtgcgcggaggcagcaatcgcccgctgattacaggcaagagctggggcaccaccaccattaccggcaccaccgaggatggcggctacacgacctccgcgacgatccacgccggcaattatgataaggcagtggtcatcaccgatctctatgtttccgacaacaaaatcaagatcgtggcgaagaacaagagcgacatgaacatcacgaagttcttcttcaccgtgacctgctatgatatgctgggcaatcccgccgtctgcaacacggacggctccgccctcttcaccggctcctatcgctacacgctctacgagggtgacagcacgacccacggccgcttcacctttgacaactacgtggatcccgacgtagccctcggccgcgtcacgatcaccatcaccggctaccgcaccgacgacggc

SEQ ID NO: 1544 - DNA, 675 bp, Unknown
  Unknown gut bacteria
atgacgcagccgctgcgcaaaacaaagatcgtctgcacgatgggtcccaacctgtttgaaaaaggtctgattaagccgttaatgctcgcgggcatggacgttgcccggttcaatttctcccatgacacgcatgaaaaccacctgaagcgcttcaaggaggtctgccgcatccgtgatgaactgggtctgcccgtggcaaccatgctggacaccaagggccccgaaatccgcatcggcaccttcgcggagcaccgcgtaacgctggacgcaggccagctgttcaccttgaccaccgaggatgtggagggcgacgagacccgcgtcagcgtcacctataaagacctgccccgcgacgtgaagcccggctgcgccatcctgatcgatgacggcctcgtcggcatgaccgtggagcgcgtcaccgataccgacgtgtgctgcaaggtcaataacggcggcaccatttccgataagaagggcgtgaatatccccgacgcgcacctgtccatgccctttatcagccccaaggatcgtgaggatatcctcttcgccatcgagaacggctttgacttcatcgccgcctccttcacccgcaacgcggacgacattatgcagatccgccatatcatggccgagaagcattgcacctccatcaatatcatcgctaagatcgagaac

SEQ ID NO: 1545 - DNA, 1125 bp, Unknown
  Unknown gut bacteria
ttgctgctgtttcttccgttgtcctccgttgcagagggaaccgaggcaggggagctgatctataacggcagctttgaaatactggatgaagacggtatgccggacggatggtttacagatcagtataatcatcaggagggctatacgtccttttcagttgcgtctgatatagcggaggatggacaatacagcgcgtgcatcaacaacatgggcgataatgacgcacgctttgcgcagacggtcgatgtagaaccggaatcgctctattgcctgtctggctatattcgtgcgctcgacattccggacagtggcttaggtgcgaatctgtctatcgaaggtctgtatgtattcagcgaaagcgtttatgataccgacggtgactggcaatatgtggagctttacggcgaaaccggcccggaacaaacgagtgtaacggttttcgcacgcttgggcggttacagcggagaaagccgcgggaaagcttggttcgatcaggtttcgctcaagcaggtgcaggaggttcccggcgatgccgttgcgtcgctttggtacagagaggatacacccgtcatatccgcagatgatacagaggaggatacagaagcggatccggcatggccgcggttgctgctgttcgctgctgtgtacgctttgttggcgctttttgcttgcgataagctgatgcaccgcaatgagaagctctctgataacgaagagcaccatgcacctgcgtttctggtaattgcgctgatccttgccggggtatctcgcttggtagtcggctgcatggtcagcggctatcaggtggatgtaaactgcttccgggcatggtcggctactatggcgaactatgggccgagcggcttttataccgcctcccagttttgcgattatccgccggcttatctctatgtgctgtggctggatcaggggatcattcgacttctgacaggtttgccgtcagaaggcttcctgcattggtttagtgggctgggactcggcaattataccgatgttatttctattctggtcatcaaactagtgcctatttgctgtgatttaatcgccgcatggctgctgtattgtgtgggacggacgctgattggtcgtaagcccgcagcgctg

SEQ ID NO: 1546 - DNA, 612 bp, Unknown
  Unknown gut bacteria
ctttatgcgggccgccaccacggaaaggcgctggatcgcaccttttccggtgtggcctatacctttaacgccatgccctccttctggctgggcttgatgctgatcttgatctttgcttctacgctgaggctgctgcccacctccggcatggtgaacatccgcaagggctatacgggctgggcatatgtgcgggatgtggcgcagcacatggtgctgccctgcgcaacgttggttgcggtgcagattccctcttattttcgaattacccgttcctcggtcatgcaggtgatggcggaggactttgtgaccaccttccgtgtgacgggcatgagcgagcggaaaatcttcaataaatatattttgaagaacgccctgttgcccatcgtcacggtgttcggcatcaacctggcttatgtgatttctggctccacgctgatagagatcgttttctcctggcccggcatcggcgtattgatgtaccgcgccatttcccaacgtgactataacctgctgatgggcgtttacctgctgctgtctatctcggtggcggtgatgatgatcgtggtcgatctggtatacgcctggctggacccccgtatccgctatgattga

SEQ ID NO: 1547 - DNA, 981 bp, Unknown
  Unknown gut bacteria
atggacagcgtactctgcttggggctgatgctggtcgcgctgtatgcaatgcagcggaaatggcaggtcgtactgccgctttatgtgctgtgcattttgttaaagcctcaggcgcttatgctgggtttcctcggcttattggccatggtgctttgctggatcaagcacatagaagaccgtaagcttatgctcaagggcctcgggctttccgtagtaatggcgctggttattgtgctgccgttctcgatcggcaacggtcttagctgggactggctgattcagctgtacatccaaacgctggggtcttattcctacgccacggtcaatatggcgaatctgtattacctgttcagcgccaactgggtcgctacgtcccaatctgtaggctgggcacttccgctggtgtttggcgtgctgtgcgcgatctgggcggctgtaaccttctgccgtcagcgcaaatgcaacatgcctctgttctggctggaatctttggtcacgggatgctttgctgtctattatttcatcttaacgctagtgcagccctcttatacattgatcggcgtaccggccatggcgctgtgcattctgctgacgttaggcatgtatctgcgcggtaacgacttgaagcatttgccgttggcgggcggtatcttgtttgtgctgctgtgctgctttggcctgaagatgcacgagcggtatctgttcccggcgctgctgctgttgggattggcttttcttcagcgccgagatcgccgtatttttgccatactgatgattggaagcctaacgatgttcctcaatgcgggcattgtgcttgataattccttgcggttgggttccagcatggggcatttgaacaatgatacgcgttggctgaatctgctgatttccagcgcgaatctactgaatgcgctgctggcgctgtggactgggcagcgcgtcattgtggaaggacagtcggctgatgatagtctgcgtccg

SEQ ID NO: 1548 - DNA, 891 bp, Unknown
  Unknown gut bacteria
cgcacggacatcttcaacaacgagttgaagaagcagggcggcgacattaacttccccctgcgcaatgtacgggatattttgatggcggacgatctgacgctggtcaactttgagggcacgctgacggattccacttatgtacctaacaacaagaaggaaaaccagttccttttcagcgcaccgccggaatatgtttcgatcttggcggacaacggcattgaggcggttgcgctggaaaacaaccacgtgatggatcacggcgaagaggtctacttggagacgcagcagcatctgacggatgctggcattgtctggtccaatgcggagaacattggcgagtacacggtgaagggtgtacgcattgcgatgctgagctatcagaccttcaacctgtatgacaagctgtttacgcaggtgccgctggacatcgccgaagcgaaggagaagtacgatctggtgatcgtgagcttccattggggtgcggaaaaggattacgcgcccaatgcgaaccagcagaagatgggcaagctggccattgacgcgggggctgatctggtcgtcgggcatcacagccaccggatcaatcccattgaggaatacaagggcaagtatattgtgtattctctgggcaacttctgcttttccggcaacaagaaccccagcgacatgagcagctttatgtttcagatgcgctggcgtgtgaaggatggcgtggtaacgcaggatgcgtggcggatcatacccattcgcatttccagccgcaccgattacaacgacttcacgcccaccgtcctgacgaaggcaacgtccattgacagtctcctgctgaccctcaaggaaaacggcaaaaagctggacaacccggtagatgaatatccattggagtggtga

SEQ ID NO: 1549 - DNA, 855 bp, Unknown
  Unknown gut bacteria
gcaacgctggatgaacaaacggctacgatggcccagcagcagattacgctggacgaacaaactgcgcggctggacagtcagacagcccagctggcgcagcagcaggccgctttggaggctgcacaaacagacttgaagacggcacaggccagtcttgcccagcagcagacggatttagatacggccaatgcggcattagcaagtcgagaatctgaactgggtgatctgcaagcgcagctggcccagcagcagatcacattggatgcacaggcacaagtggtggcaagccagaaggaagccttggaagctcaaactgcaaagattgataatctggttggcgttcggacgcagattgtgtccgagttgagtagtgcgctggcagcttcaggactgaaagcaacggtagaccccaccagcggcgatattacgctggacagcacagtcttttttgaaacagcgtcttcgaccattaaagaagatggtaagaccatgctgaatcagtttattccggtgtacctcagtgtgctgctgcaagataagtacaaggattatctgggacagatcattattgagggccacacggatacctccggcagttacatcatgaaccttgaactgagccaaaaccgtgcgttaagcgtggtgaaatactgcttggagatgaacgggcttaccgatgcacagcgcgagatgcttcgctcaattttgacggcacagggaagaagttattctaacccgatttataacgcggacggtacggtaaacatgaaccagtctcgacgagtagagttcaagttcagtctgcgcgacgcggagatgattgcggaaatgaatcgactgctgaacggcaattaa

SEQ ID NO: 1550 - DNA, 933 bp, Unknown
  Unknown gut bacteria
atgctcgtgctgaccattgtgattggcggcggatgtctgacactgcttcctcggctgcaaggcaatacagaactgcatgtggacaccagccaaatgttgagtgatcttacgctgaacggctccatgccacagctttcactgagcgatatacctattactgtcacaacagccgatccggcaaaggctgctgcaacgcctattcccacaatgcagcccgaagtacagcagctgctttccacctccacgcccagcgtgcagacggccacccttacctttggcgggagcatcaacgtggaaagtggtattcgaaaatccggctacttcagcgaaacaaagacttacgatttcgatgatgtcatgagtctgctggccccagaaatgcaaacagacctgtgcgtggttccctttatgaacctgatagctaccaacggcaaatatacagatctattaacaacggaagctgctctaagcttgttcaccaccagcggggttgacgtggtgccgttgggctttcccaccgcattcgatcaaggcatggacgggcttaccgctaccttggatgctattcgcgcccgcgggctgacgccggtcggcgcaaatgcctccgcagaagaagcagcggctccacgaatacttactgtcggcgggcttcgaatcagtattctgcactatgtagatgcgctctccagcacaggccgcaagcgcatgaagaaggaagcggcagactatgcgcttcccgtagccgaggctgagaccattgccgctgatattgcccgtgctcgcagcgcaggagcgcaggttgttattgtatcgctgtcttggggcgacgtaggcaagacctcccccaccaaggatcagcagatgctcgctcaggcgattgccgatagcggcgctgatgtgatcgtcggcacaggcaccaaggtggtgggcaac

SEQ ID NO: 1551 - DNA, 2208 bp, Unknown
  Unknown gut bacteria
atggagcttgaactgacctttccggttcggcaggaaaaacacagcgtccgtcttttgaagccatcaggcatggaggtttttcttgattttcccgtatgggtttctcatttgaacggcagcacggacaaagtgcgctatgatcaggtagaagagcagaaagacggaacctgtctcgccaacgccttgattcgcgcacgaaatggcaacgaatatgaactatgcgacctgtggcgagtggaagaaaactgcgtgaccgtggaacgacgtttttccgtcattcgctgccgtcggccggctcagatacgggtctctacggattttgactgcgttgaaagaaatgccgtttcctttgacgattaccgtttcgtgattcccggcgccttctacggtcgcaacgatacggatgacgacggggtggaggattatcaggagaccttccagcaggattataaggacgatcgaaatcccgggctgtctgtactctgctatctccccgccggcaaggcctttctggcgcttctgcgcaacgataagcctgtgagggattgcagcattacgcgggaacaaattcaggccagacattttgttcacgacacggatattggctccatgggttttgcgccctccatgcaccgtggaaacggcgtatcgctgcatgtggattatcccttttgtgagcgaaattccttctgcctcaatatagacggctccggctggtctgcctaccgggaaatgaaggaaggagaatcgtttgcggtttcttattccctgctttttggcggcgcggatacgctgactgacgcctcgtggcaggtaacgtcctggcagatggaccgacttttgaacgatcgcgttccattgccctttaccttggaggaggcgcgcagggaacggcgtgaaatgattttcaacagcttccgtgaattccctgaccacacggggaatcccgccggattctttatccacttttctccccggcagcgctacggaacgcatcatttgctggagtatggcttttccggtgcgcagacgttaaactgctttgcaatgctttcagcagccgaggatggctgcggggaggaatacagaagccgcgctctgaagacgctggatttctttgtggactattgcatcgatcggtccggcctgccaaacggtatctacgatgtggatcatgagaagttcgtttactggtggaccggcgtattgcttccctatcaatacaccaattcccgcaaggagctggaggggtatctgggcgaacaggtggttggcgccctctcggctattgcggaaaagctgaaggagaatgacggcaattactgccgcaccatgtgcgaggcgatgcgctatcttctgctttgctatgaaaaggagaaaaaagcagggcacaatcattccaactggctgacggcggtaaaggtcttctgtgatcgattgctgacgcttcagaatgaaaatggctcatggtgccgcggctatacgatggcaggcaagccgttgacccagccgccggaatggtttggcggcagcgaaacggagattggctccggcgcgctgttcccggcggaggttttgatccccttttaccgtttgacgggcgataagcgttatctggaagcgtctgtccgcgccgcccgtttcattctcagacattatgtgccggaagtgcgctatgtaggcggtctgaacgatacgactcacaaaaagtctatcaagattgacgcggtaggcgtaatgtttgcaatgcgtacattgcttctggtatatgaggaaaccggggaagacgctttcctgatgggcgccagagacgccgcccggattctggcttcctggacctatatgtggaacattccttttgacgcaaaaacgctgctgggtcagtacgggtttcagaccaccggctggacgggctgcgatgtcatccctgcatgcagctatgtggatgatgagtttgtggaatttattccagatctgctgcggatcgcggagctttgcggagatcgtcgtctggctgtgcttggccggattgtgacaaggggaatgcaccatggactttccatgccgcaggtaacgtacggctatcccatgatgggcgtacagtgcgagggcttcctgacgtctctgtggctgagcgatacgaccagccgggaatttgcgggtgctacctgcaagaacaaaggggatgacaatgatacggtgaatggg

SEQ ID NO: 1552 - DNA, 2133 bp, Unknown
  Unknown gut bacteria
cccccccccgccgctgtcaccaaccgtcagcagctggtgggcgtgaagttcaatcatgacgcgcctgtggtaggcgatcgtctggagcctatcgtggagcccagcggcgctacctacacctgcctgtggcagctggacggcgtaaacgtcagcaccaacaactactatgaagtgcccgtgagcgcggttggcaagaccatcaagctgaccattaccggcacgggcgcgtacaacggcagctctctggcggcgatcgaaacgcagaaggtcgttaccgccggtgctgtgaccagcgccagcatcaccaacctgaccaccaaggatgcggctcccaacgtgggtgaccgtctgcaggcggtctatgagcccgcttccgccagcgtgaagctgacttggtacgcggtggacgatgcgggcaacaccacggtcatctccaacgcgcagacggtggacgttggttccggctgcatcggcaagatcatccgtctggtggtggaaggcaccggcagctacaccggcagccagcagaccgtgaacaccggcaaggtgaccaacattgccaacctgaccggcgtgaccatcgagggcgctgcgcagcctgtggtcaatgccaacgctacgaccctgcaggccaaggtacagcccaaggaagccgaaacgacggccctgacttatcagtggcttcgcgataaggcggagatccccggcgcgaccggtgccacttacaccgtcacggcggacgatcaggataaggccatctccgtggtggtgaaggcgcaggccagcaataccgcttatcgcggtgaggccaccagtgccgagactcagaaggtcatcgtggagcccggctccatcgccatcaccggcaacgagaacctgatgcaggacgtggatgcgtccatgacgctggcgatcaagtccggctctgcggtgaactggaatgtgaccatcacgcccagcaaccccggcctgaccattagcggcaacaccatcagcggcaagcccaacgcttccggcacctataccgtggaagcgaccgcgaccaatgcggcgggcagcagctacaacagctttgtgctgaacattgcggcgcagccctccgaggttcccgcagttcagcccaaggaagacggctcctttgagaaggacgctgcggtgaatgtgcagttcgaagctaccaatggcccgctgaccggttggaagttcgacggcaccattcccgatggcctgaagttcgatcccagcaccggcgttctcagcggttctacctccgcagtgggcacctacaccattcaggtgtacgcgcagaacaagaacggctggtccgctggcacgatctacagcttcaagatcaaggacagcaccgttcccaccgaacccctggccctgaacagcagcagcttcgaagtgacctccggcgaggccttcaccaagagcgtgctgaccgtgagcggcggcgaggcaccgtacttcttcgaatatacggcggatgctggcaagcttgatctgaacattaacgcttccaccggcgagttctccagcaatgggatcaccgtggacagcgaaaccacttatttgctgacagtcaaggtcacggatgccgccaacaattccgttaccggcaacctgaacctgacggtgaaacccgcttcgtccagcagcactaccacgaaagatggaaaaacggaagaccctgtgcagaaaacccctgcacaggagactcccgcacaggagcctgtgacgctggaagataacgccttcgtggagcctgtggtgatagaagaacccgctgcggagccggttgcagaaaacgtgacggttgccttggctaagcccgagcacgtgaagctggtgctgaaaaaggacggctcctggatgctgaagtgggatgctgtggagaatgcggcaggctaccggctggtgaaggccaacacggataacaagccttccgagctggaaaagcctcagtacgatttctccaaggaacccaaggcgggcgtccggtatgaaatctgggcggttgccgccgacggcagcgaaggggaacatgtggtgttcgaagtgacggaaaagcttctgaacgacctgctggccgcgcaggaagcggaagtccagtccgcaacgaacgaataa

SEQ ID NO: 1553 - DNA, 1551 bp, Unknown
  Unknown gut bacteria
atgccgcaaagcgatgattcagactttggcgggcgaaaaaaattcagtattttccggccaaggctttccaagcctaatctgttgatctccatctgtatcaacacgctgcggctgtttgcgctggtgatcgtgctgggtgggctggcactggccggagcggtgatggggattgctaagggctatatggaaacagccccgaatctggacttggcacttttgagcgatcaggataagacctccttcctgtacgacacggagggcaacgtcattaccgactataaaggcactgaaaaccgcgtaatggtcagcatttccgccatgccggagaatctctgcaatgccttcgtggctgtggaggacgctcgtttttatacccataacggcatcgacgtgaagcgaatcatcggttcttttgttaccaacttcactaccggctcccaacagggcggctccaccatcacccagcagttgatcaaaaacacagtgctgagcagtgagcagagctacaagcgtaaaattcaggaagcctatctggccatgcagctggaaagccgctataccaaggcgcaaattctggaatgctacctgaacaccatttacctcggcgagaactactacggcgtggaagtagccgcgcagggttacttcggcaaaagcctgagtgagctgacgctgcgcgaatgcgccatgctggccgggctgacgaacaacccctattattacaatccccgccggaacttctacgtccgtcagtccgagacgacggactaccgaaagctgaccaacaaccgcaccgactacgtgctgcgctgcatgtatgaaaacgagtttatcacgcaggcacagtatcaggaggcgctgaataccgccacggcgaatgtgttggagacttccactaccgagggcgacgggatgtatcagtatgcgcactacgtggaatatgcggtttccgacattatcgactgtttccttaagctgaacaatctggaaaacaccagcgagaaccgtgcaaagatggaaaacgagctgcgcacgggcggctaccgcgtcaccttggctattgacacggaaattcaggagatcgtcgaagatacgctggacacgtggaccaactggccctctttgcgcgaccccagcgacaaggtctatcgtacccggaacaatgacggtacctacacagagatcgagcagccgcaggccgccgctgtggtgctggattaccgcacaggcgaactgaaggcgatcgtgggcagccgccaccggcctacgcagcgcaagaccttgaaccgcgccgtcaacatgaagatgcccatcggctccaccatcaagcccatcgccgtgtatgccccggccattgaactgggcgcttctcctgccagcgtggtctacaatatgcccgttcccatcaagggatggaccggctccgacggcaaggacacgtggccgcgaaattacaacaccagcagctacgtcggtccggaaaccctgcgcaatgccatccgaaagagcaataacgtttccgctgcacagaccctgatgaccatggtaggc

SEQ ID NO: 1554 - DNA, 1404 bp, Unknown
  Unknown gut bacteria
atgcacacccgggaaaataatgaggaacattctcagggcgtaacgctcatgaccggcggctccgtccgccggcagatcgtgcgtttcgcccttcctgttttttggggaaacctgtttcagcagctttataacattgtggactctctggtcgtgggcaactttctgggcagcgacgcgctggccgcggtaggttcctccggccatatcattttcctgctggtcggcctgttcagcggcctgttcaccggcgcgagcgtggtcatttccggctacttcggcgcgcaggagcatcagaagatgcacaccgccatccacaccaccgtggccttcggcctgctggcgggcgtggtgctgtccgtggtgggcgtggccgtgtcccccaccctgcttcggtggatcggcacgccggaaagcgtctttgccaattcggcgctgtacttccgcatctatttctccggcgtggtgttcgttaccctgtacaacaccgccaccggcattctgcaggccgtgggcgacagcaagcatccgctgtattacctcattatttcctccgtcaccaacgtggtgctggaccttctgttcgtggccgtgttccacatgggcgtggacggcgcggcgctggcgacggtgatctctcaggcggtcagcgcggtgctgggcttcatccgtctgatccgctccaacgccatttaccgggtggagccgaaaaaagtccgcctgaacggccccatgctggcgaaagtgctgcatatgggcattccggcgggtctgcaaaattccattatttccattggcaatatttttgtgcagtccggcatcaacctgttcggtgcgacggctatcgcgggcgcgggcgcctaccccaagatcgagggcttcggcttcctgcccatcaacgcgttcgtgctggccctgaccaccttcgtcagccagaatctgggggcgaaggaatatggccgcgccaaggagggggcgcgcttcggtgtgatctcctgcatggtgatggccgagggcgtggcgctgctgatctacctgctggccccgcagcttctgtccctgttcggcggcgacccggacatgatcgccttcggcattcgatatgcccgcacggttacgccgttttacttcctgatggcgttctcccacgccgtggccagcgttctgcgcggtaccggcaaggccgtcgtccccatggtcgtgctcgccgtctgctggtgtctggtgcgggtgatctacatctccctgttctcggcgtcgttcaccgacctgcgccaggtggtcttcgtctacccaatcacctggttcctgagcacgctggtgttcgtgatcttccgctttacggtcggctggatcccgaagccgccggcttcttctccggccactgagccagcaaaatcccgataa

SEQ ID NO: 1555 - DNA, 1005 bp, Unknown
  Unknown gut bacteria
gtgaaggtcagagacgccgacgcgaacggaaacggcgacgccaatgatgagatcggtgtcaccagcaacggcttgagcaacgtgctgcgcgctttcaccggcgcgttcggcctcaacaaccgcggccgcgaagacctgagcgtggacgctgaccccagcgacccgaccaagattcgcttcgtctacacctgcgacagctaccgccagtatctcgcctatgtcgccaagctctatcaggaaggcctgatcgacccggaactgttcgaactgagcacggccaagatggtggccaagggaagtcaggacatgatcttctgcctgtcctacatcaactgtcaggccgccagcgtcaatgcggatgattatgtcggactggaagtcgccctgaaaggcccgaacggcgatcagcagtggaacaatatgaacaagggcgttggactgggcgcgttcgccatctcgcccacctgcaaggacccggcgacgctggtccgctggatcgacagcttctataccgacgagggcgcgaagatgttctacttcggcaaggagggcgaggacttctactacgacgaaaacggtctgcccgcttacaatcaggaaattctcgatcaggtttccgccgagaatccctacgacaaggtcatctccgccatttctccctacgcttccggcacactgccggttctcatcaaggacgagttcttctgcggagcggaatgccgcggcgtaaacctggaaaccgcgaaaaatttggaaccctatgtgaatcagatcacctggaagttcaacttcaccaccgaagagagcgaggaactcagccccctgacggcggatctgatcaccaactgccacgatgtttaccgcgccaagttcatcaagggcgagctggacgtgaacgacgatgcggcctggcagagctatgtggacgagatgcagtccctcggtctggaacgctatatcgagatctatcagggtgctctcgaccggatgcaggcccagaactaa

SEQ ID NO: 1556 - DNA, 1458 bp, Unknown
  Unknown gut bacteria
atgaccattctgttgaaaaatgccaaaatctacgacgggactgccgctccgccctttcagggcgacctgctgctgaaagatgaccgcatcgcccgcgttgcgccccggatcgacgctgcagcggacaaaatctatgacctgcaaggaaaatccgttgcccccggctttatcgacagtcattcccacaacgactggttcgccatccgtccaaactgcctgccctgcttcgaaccgttcatccggcagggcattacttcgtttgtcacaggcaactgcggcctgtccgccatcggttttgaaaaagaaacgccctataccgaccagataggcggcgggctgttcggctaccggggacagaccatcggcgtttacccggatgccaaaagcctgtttgaagccgtcgatggaaacatgccctgcaatatcgcggtgctggccggccattgcagcgcccgggccagcgttgcgggcggtgaaaaccgcaaactgaccccggaagaagagcaacagatgctggccattctggaagaaaacctgaaacagggcgcggcgggcatatcgctggggctgatgtactcgcccggtctttacgccgatgaagaagaactaaaaaaagtcgctgcgctgtgcgtgaaatacgaccggcccctgaccgtacacccccgggcggagtccaaggtctcgatggcctatccccagctgctgggccgttctcatctgctgagggcgctggacgagctggagcacattgccaaaggcacgaatctcaagctgcagtattcccattttattttcgtcggtcgcaacaccttttccgataggccaaaagctatggccatcatccaacggatgcggcgagagggcgttcaggttcagttcgatatttaccacgaaaccaaaggcgtgtccgtcatcacggtcattctgccggcatggtaccagggcatgagcgaggaagaacggtgcaaacccctgaaccggctgaaactccgcttgctggtgcgggcttccatcctgctgctgggttttgattttcgcgacattgagatcgcctacatcggccccggctacgaggaatacgagggcaaaaccgttcatcagctggcaaaggagcgtggtgtcagcgatctggacatgtacctgcgcctttgccgggagtctaactttcagggccgggtcaatatggggccctataccacggaagagatcattcacgcctttgaaaaggacgatctgtgcctgttcatgaccgacgcatgggtggaggatcacggcgttcaaaaccccgccatttacgactgttttcccaagtttctccgggacgcggcgcttggcgttggcgattccatggaaaaaacggttcgccggatgactggcgctgcggcggatcgtttccagctgcgggctcgcggctacctccgggagggctgctacgccgacgtgaccgtctttgacgag

SEQ ID NO: 1557 - DNA, 702 bp, Unknown
  Unknown gut bacteria
gaaagcatgttcagcggttttccggaggaaaccatacgattttttctggatattcggttccataacgaagtttctttctacaaagctcacgaggacgaataccagacctttgtgaaaaagcccttctacagcttgatcgaggagctgggggagacgatgctttccatatctgatgatttggaggtgcgcccggcaaaatgcctggcgcgccttcgtcgagatacgcgctttacgaaggataagtccccctatcgggatcacctttggctgattttccaccgtgccggagaagcaaaggattcatcggtcgtgtactggtttgagctgtcccccgaaactgtggaatggggtttagggttcggggggatgaaccggcctgccatgaacgtgcttcgccagcggatggttgagaaaccgaaagaggtgcagcgggcgcttcgcttgagccgtattccttcgcaggagctgcagattttgggcgatcgttaccaacggctccgggcacctgccgggatgccgttggaactagcaatgctgtacccctgtaaggatctgtacatcaagcgggtcaacgtgcctttcaaaacctgctatcagccggaacttgcagaactggtgcagcaggattttctcaggctgaaacctatgtacaccctgctgcgctcggtagcggacgaagcgatggcgcagctggacggatga

SEQ ID NO: 1558 - DNA, 1095 bp, Unknown
  Unknown gut bacteria
ccggaggaaaacgtgtatttgcagcaatatgtgctggacaagctgtttgacagcaacgggatcgttcccgacggcgtgctggcggagctgcacctgacgccctcctcccccgccgcgctgctggctgcgccggtagtttccagcgaagccgacctgcaatggttccagcaggtgcatgaagccattcagccgcttttgcagacgggctgcgccctgtttcagggccggaagcggcagatgtgcctgagcctgtgtatctttcccgatcagtcccagtatactgccatgggcggtctgctgccggggaactccgcgcaggttttttcccccatgtttcttctgccccacgcgccggagcagctttctgtatgccagacgctgctggaacgccgcttcttcgacctgcccggtgaggacggcccggagacctatccctattccacgctgatctccgatctgacggacgcgatctgccgcctgcaggtcgaaagctaccatcagacgctgctgcttctgctgcgccgggcctgcgcccagtatcccccggtggattcccttcgtcagcttctctgcggcatgatctacgccaccctgcagggaaactcttccttcgtggcggtgttcagccagatggagctgacggcggacgacatcatctgcgccattcagcagacccattccgccgaagcgctctaccgcagcatgacccgcatcatcgacctgcagatcagccgcattcagggacagatcaccaccagcgacgagacccacgtcaagcgcgcctgcgaatacattcaggcccattttgccgaggatttcactctgaccgatctggccgggtatctggagctccatcccaactacgtcagcaccattttccgcaaggtctgcggcacgtccttcagccgttaccgcaagcatctgcgcatggaggaagcctgccgcctgatccgggagaccaacgacaagttctacctcatcggcagcaaggtgggctacccggacgcagtcagctttgcccgggtctttaaggaagaaatgggctgcacccccagcgaataccgttccatgcacgcctccggcgaggaatcgtga

SEQ ID NO: 1559 - DNA, 894 bp, Unknown
  Unknown gut bacteria
atgaccgccatcaatccatcccggctggatcgcaaacaccggctgacgcgatttgctgttcgggagcacggaggaaacatcctattcatgcttcctgctttcgcattgtttgctttcgtcgttctgatcccctttcttcagtctatccccacgtcctttaccgataagaaggccattttcgccaaggaatggaatttcgtcggctttgaaaactacgggaagctgctcaaaagcgcgtccttccgggacagcttcttacacaccttccagtttaccattgtgtatatcatcggcgcgaatatgctgggtctggcgctggcgctgctgctatggaagtccggccccttcaataacgtgatgcgcacgctgctgttcatgccctttacggtgtcactggtggcctctaccaaggtgtggagctacgtttacaccgacgtgctctccccgctgaccggcgcgcccagtccgctgggcatttcctcgcaggtcatttacggtctggccgccatcgccatctggcgggatatgggctactgtatgctcatttacattgccgccctgcagtccatttcgctggaatactacgaggcggcccgggtggaaggcgcgaatgtgttccacgaatttatccacatcaccctgcccatgatcgtgcccgccatcacctccaacgtgacgctgctgctttcctggggcctgcgctgcttcgactattctcaaatggtcatcaacatgaaaacggccaaaaccaccgctgtgttcgtatatgaatacatcttcggcaattcccgtgccggtctgggacaggcgggcgcgatcatcctgacgctggtgctggtgatcctgaccaatctggtcaccaccatcctgcgcaaaaaggaggttgagctctga

SEQ ID NO: 1560 - DNA, 1002 bp, Unknown
  Unknown gut bacteria
gtcgtttccgccatgctgccgccaatggcgatcttctttccgttatttacgatcttagaagattcgggctatctgccgcgaatcgcctacaatctggatcgtcccttccaatgctgccatgcctgcggcaaacaggcgctgtgtatctgtatgggccttgggtgcaccgccgccggggtagtcgggtgtcgaattatcgattcgccgcgtgaacggctcattgccattctaactaactgctttaccccctgcaacggacgctttccaactctgctgttgatactggggatattctttgtccctgtgacgaacagtgctctttcaggcattgtttcggctttcgggttgatttgcctgctatgcgtcagtctggccgtaacgttcggcacatcccgtctgctttccgggacgttgctgaaaggtgtcccttcgtccttcacgttggaaatgccaccctatcggcggccgcagcttggcaaggttttagtgcgttccctcgtcgaacgaacgctggtcgtgctgggcagagcagcggcagtggcagcgcccgccggactgcttttatgggcattgcaaacgcttcttctaccgaatggaacctctctgctgattgggttgacccgctgtttagacggtctgggccgtctgatggggctggacggcattctgctgacagcctttctattgggctttcctgcgaatgaaatcgtgctgcccatcgcactgatgctctatctttcgcaggggaatctgactgaacttggaaatacgctggaattaaaacagattcttctttctcacggttggacgctgaaaactgccctgtgcatgttatggttcacgctgtttcactggccctgctccacgacgctgcttaccattcgcaaggagaccggcagtctgcgctggacagcactggccgtgctcctgccaaccctgatcggcatactgggatgtatgttgatctccctgcttgggcgactgacggggtggctattctga

SEQ ID NO: 1561 - DNA, 1128 bp, Unknown
  Unknown gut bacteria
ttggggatcctactgacagcgggaatcgtctacgcggaagaaaatatttctttcccttacgtttcctttcctgctttacgagagcaggctctccaaggctggcaggaaagctttacagtggatggacgagaagtcgtcgtaaacgccgtgatcccgtggatgccggagactgacgtctgccccatccccgagatcaccttaggagagatcaatcagaatgagacgctgatcgcacactatgccgggaaaggcaacgtcgtagacatcagcaccaaacgtccctatgtggacgtgaatatcgatatcaacggcaaaacatggttcacagataaaaagttcttttatggtgctggttcggggtatcatacccaaacagaacgcactgagtaccgctaccagcagccgcccgccgggacgccggagggactggacatgacttttgaggaattttatgcctttgcagacgaacctgtacgtgcctttactggcttatcgctggacgattactattggagcggagaccagtgcaatattctctggcaggtaaaggagaaaaaagatggtcagcgcatccccgtagaaccgatgacccgaagcggcagctgggccatctggggctggcagatgttccacggtattccaacgctgccttacggtgacggcccttatccccggatggttttcaattatcacaacgagaactgctataacttcaccgtggtgccttatcaggaaatcggtctgctggccggggatgttcccctgctttccttcgaagccatcaaacaggcgctgaccaaacaaattctttccggtcatttatggagcattgacgaaatggaattttgctacattggcaccgccgctccggaaatggacggcaaccattttcttttgcagcccgtttggcgcatcaagggcggatataccgacgatccccatacagacaaggccgttctgccctatctgccttccaatacaaaggaaggtcgtttgatgatcccggaaccctacggcgattattactttcatgcgcagaccggcgaaatgtttcccaagcccacgcaggccgacaacggccacgccatgccagccatggagattctccgctgggaagacgtgccataa

SEQ ID NO: 1562 - DNA, 852 bp, Unknown
  Unknown gut bacteria
atgaaacccacgatcattcgccgtacccgggcggacaagcttttcgacaccctgaatgtgatcctgatggccattgtgctggtcatcacgctttaccccctgtattttgtgctgatcgcctccgtgtccgacgcctacgaggtggccaagggcaatgtgtttctctggcctaagggcttcacggcggagtcctacctgaatgtgtttaaggaaaaccgggtgtggctggggtatcgcaacaccatcttctacactctgacgggtacctttttcagcctgatcctgaccatccccagcgcctacgccctcagcaagaaaagcctgccggggcggcggctcatcaacgtgtttttcctcattcccatgtacttcaacggcggcctgatccccacctatctggtgatgaagaagatcggcatggtgaatacgtggtattcgctgatcttcatcgcggcctccagcgtgtacaacatgatcgtgacccgggcctacttccagtccaatgtgccggaggaactgtacgaatccgcccggatcgacggggccagcgagctgaaaacgttcttccgtatcgcactgccgctggtcaagcccattctggcggtgatgatcctgttcttcgccgtggcccggtggaacgactacttcaacgccctgatctacaccaccaagaacgactacctgcccctgcagatggtgctgcgctccatcctgcttaacagccagacagccatgcagaagatcgatacctcggccatggataccgaggccatcaagaacgccgcccggctggcctatatggccgaggccatgaagtacgccctgatcgtggtttcctccgcgccgctgctg

SEQ ID NO: 1563 - DNA, 1617 bp, Unknown
  Unknown gut bacteria
aatggcctgagccgctggaagatcgtgctgaagctgctctgttctctggaaaacgccctgcgagtactgctgctgttctgtctggcggcgcaggggaccgccgggcttttctgggcggtgctgctggtgcctgatctgccggggctgtttcccctaagcggcgtttccctagcggcgtttgtgacccggttgatggtattgccgctgaacgccgccatggagctggacgcgatcgggcgaacgctataccggctgttcgtctcccgacagaatttgcttcaatgggacagcgccgcccagcttcaaaaaccttccgacaagccgcccatgctctattttatcttatgtatgctggcttccggcggcatggcggcgttttccgtttttctgcacggtttctttctgccggggctgattgccgctctctgctgggcggcgctgcccttcctgctgtttctgctggaagcaccgcgagacgtatcgtcccggcccacggagtatatgcgggaggtgctgacccgcttggcagccggaaccatgctgtactttgagaccgccgtcaccgacgaagcccacggtctgcccgccgacaatgtgcagatcgaacccaacaaaggcatttctcaccgcacctcgcccaccagtatcgggctgtatctgatttccctgctggcagcagaaaaactgcgtctgctcccagctgcggaagcggcccgtcgaattggcgagaccatctccacgctggaaatgctgcccaaatggcaggggcacctgtacagctggtacgatacccgcactttggaaccgctgccgccgccctttgtttcctcggcggacagcggtcagctggcggtgtgtctgaccgcctgtgcacaggggcttcgggcactgctgcccattttgccggaaacgcttcacgatctccccgcccgggcggacgcgttggccaagggtatggatttttctgtcctgtttgatgaagaagcggagcttttctgggtcgaggttcgcccagaccaaccgaacgaaagccgcagccatcatgacctgttggccagtgaagcgcggctgctcagtttttacgccgtcatgaccgaacaggtccctctgcgccactggtaccggctgggccgtatccctgtgcgcatacgccggggacaaagtttactctcccgtaacggttccttgtccgagtacatgacgcccctgctgtttcagccgccaattccgggcacgctgctgacctccgctctgaaagccgccctgcggcagcagcagtcgcaccggccgggcggcgtttacggggtcagcaaaagcggttgtcatacctttgacacggagctttattatcaatacaaggccttcggccttccgccgctggcgcagcgttccgacccgccgaacaacgttgttgcgccctatgcgtcgattttggccctgccgttggatctgcggcgcggctttcaaaacctgcttcggctgcaaaacatgggcatggaaggccccatgggcttcttcgaagcagccgatttttccgaaaaacagcatggattccaaatcgtccgcagccacatgagcagccatcaggggatgatcctcgctacgctgtgcaacgtg

SEQ ID NO: 1564 - DNA, 843 bp, Unknown
  Unknown gut bacteria
atggcggcattggagcataagatcgactttttggcactggtatctgtgacaaaagcaaatgggaatggcgacccgctgaacggaaatcgcccaagagtggattataacggcatcggggaaatttctgacgtatgcatcaagcgaaaaatacgcaaccgaatgcaggatatggggtatgcgatctttgtacagtcggacgaccgctgcgacgatggtttcagaagcctgagcgagcgcgcagctgcggcgacggcagggatcaaagatagagaagcctatgcgcagcttgcctgtgaaaagtggatggacgtgcgtagctttggacaggtgtttgcgtttaagaaagaaaagaacggcgtttccgttggcgttcgtggcccggtttccatccatcaggcgctcagcctgtccccggttgaggtggagtcgcttcagatcaccaagagcgtcaacggagaaccgggtgagaagcgcgcctctgatacgatgggcatgaagcatttcgtgcgctttgggttgtacgagatcaaaggctccatcaatgtccaattggcggaaaagacgggtttttctcaggaagacgcgcaggtcgtgaaggagtgcctacggacgctgtttgtaaacgatgcttcttcagcgcgtcccgaaggctcgatggaggtcgtgaaactttattggtgggagcataattgcaaggacggccagtattcttctgcaaaggtgcaccgcagtgttcatgtgactgcgaaggatattgccgcgcttccgaacagtgtggaggactatacgatcacgcttgacgaactgcccggtctgatgccagagatcattgagggagtgtaa

SEQ ID NO: 1565 - DNA, 1854 bp, Unknown
  Unknown gut bacteria
gaagcgctggaaatccgccgaagcgctcaagcggccatcagcgaaaaaaccggcgcactggaagaagaactgaaccgtcatcaggcggaatggatggagcgcatgaaccgtatgcagtccatgcgaaccaatcaggcgcgtcagtccgccatgcagcagcaaatggagcagcgcaaggcggaactggaatcccagaggaataccgaacaggggcgtgaagccgagttgaacgctgccatggaagaagccaaggccagtctgcaaagcgaggaacaacgcctgaacgagctgcgccagagcgccgaaacgctggatcagtcttccaagcagcttttgcaggacatcctgacccggcagcgccagatgcaggaggatgcacagaacgcccgtgcggccgatacccgtctgcgtaccttgaaggaattgcaggatgggtacgagggctatcagtattccgtcaagaacgcattgagttatgccaaaaagcagcagctttcgggcgtgcggggcgtggtagccatgctgctgcgggtgcccaaggagtatgaaaccgccatggatatggcgttaggcggcgcgatgcagaacattgtgaccgagactgaacaggacgccaagcgcctgatcgaatacctgcggcaaaaccggctgggacgcgccacttttttgcccttgagcacggttcacgggcggacgctgaatccgaacgaacgacgggtactgaatatgcccggctgcgttggcgtggccagtgaactgtgcggctacgatcccgaataccggggcatcgtggagagcctgttgggccgcacggtcgtcgccaaagacctggacagcggtatcgctatcatgcgggcgggaaatcaggccttccgtctggtgacgctgcagggcgatgtgatgcactccggtggcagcatgaccggcggcagcattcagcagaaagcacagaacctgctgggccgggaacgggaaatgcaggagctgcaggaggcgctgaagcgctataatcagagtgtacagcaggctcaggcggaaattaccgagatggaaaaccgccgaggcggcgaaaaagagcgccgggaggcggctcaaaacgaggtgcaccagcaggagatcgctgtggtgcgggacaccgagcatctgaaagccgcacagtccgaatgggataagcaccgccagcgaatggaggaattgaccggagccattggccagctggaggaaagcctgacggaaattcgagaagaactccaaaagatggagaagctttccacccagcaggacggcggcatggaagaaatgaaccgccgcaccgaagaactgacccggcagctggatacggcccggcgggaacgggaagcggcacaggaagccctgaccgacgcgatgctgacattgcagaacgccgaacacgactgcgaccgtttgcagcgggatcagaagcgtctgacgggcgaccgagacgattgtcaacgggaatggcaggaactttcgcagaaacgcgataacgcactggcagaaatggaacgtgcagccgccgaacagactcaggcagaagaaagcgcggccaaagcggaaagcaacgttgaaagcgcgaagcagaacgtggagaccgctcagctgaggcaggagcagcagcaaaaagcactgcgggagctgcaaggcgagatcgacggggcgcagcagatggtcagccatgaaaacgagcgcctacaccgtcaggaaatcgctcagaatcggatcaaaacagaccttagccagctgtgcgaccgtttgtgggacatctacgagttgagctacgcgggcgcacaggaattgggacagaactatcccgaagcgccgttcaaggaaagc

SEQ ID NO: 1566 - DNA, 1776 bp, Unknown
  Unknown gut bacteria
atgaagaaatttcttcgttggaacgcgctgctgctggcgctgtgctgctgcctgaccgccttcgcactggcggaggatgagccggtggtcatcaccaccagcgtggataccctgacggtagcggtgggccgcattgtggactacgagctgtccatttcgccccggagcgccaaaaaaggctatacctttaccatcagcgacgagaccgtggcggaggtgctgcgggatggacgggtgaagggacgcaagcagggaacctgcaccctgaccatcggcagcaaggtcgatcccacggccaccaaggtattggacgtgatcgtggtgcagccggccaaaagcgtgaaggcccagctggatcaggagaccctctccgtggggcagacggcgcagatcaccgcttcgttaagcccggaagacgcgaccctgcagggcgtgacctacgaaagccgcaagcccgaggtggccacggtggatgaaaatggcgtggtcacgggcgtgagccggggcagcgccaccatccgggtgaagtccgaggacggctatgtccagacaagcgtgaccgtacaggtgcgtcagccggcggaagaaattcagctggaactggccaaggccacgctgcccgaaggcaaaacggcgaccgtaaaggccactgtgctccccaaggacaccaacaacaagaaactgacgtggagctcttcggacgagagcatcgccacggtgaaccgggagggccgcgtgaagggcattcagcccggaacggtcaccatcaccgccgccagcgccgaggtgccggaggtaacgggctccatcgacgtgcaggtggttcggctggccaagtccgtggcctttgagcaaaaggaatacgacgtgatcctggggcagacggcgcagctggccgttacggtcggcccggaggataccaccgataagtcggtgacgtacaagtccaacaatccgaagaaggtttccgtggacgagaacggcgtggtcacggcgctggctgcgggcaaggccactattacggccaccacggcgggcggctcccgccgtcaggccacgacggtggttcgtgtgatcgttcccgtgacgggcgtacactttgaccaggcggacgcgcgagtgggcgtggactactatcggacgctgaacgccgtgatggaacccaaggacgcgaccaaccacaacatgacgtggacttcctccgatgaaagcattgccaccatcaccggtaccaccaacaagccccgggtggtgggcaagcgctggggacgctgcgtcgtcaccgggacgacggaggacggcggatatacctgtagcctgaacatcaacgtgggttctctgcgtcacgccgttaagatcgtcaagctggagctgcgcaaccatcagccctatctgcggctgaaaaacgtgagcaacctgaacctgaccggcatcagctttgccgtgacaggcacggacgaatacgacacgcctatcaccatgagctaccgcaccggcaataccctgtacgccgagtatcttgcggagctggccccggatgagtacacgtccagtgaaggcttcacgtggtatcagccggcggatctccgtcatctggaaaacctgtccatagccattaccggctttaccacggatacgggctattacggcagcgacggtacgctctattatacctataacgtgccgcaggatcagtgggattgggtcagcgtgcagaccgatctgtaccgcgccacgccccgcaccccggcggcgaccgaggaaccgacgaaataa

SEQ ID NO: 1567 - DNA, 936 bp, Unknown
  Unknown gut bacteria
atgatgaagaagcagaaggccccggagatgaaaaagcaccgcaaggtttgctccaaaggcgatatcgcgttcaatattgtcaactacactgtatttttcctgatcacactggcctgcgtgttcccgttttactacctgttcatcaacaccatttcctccaacgagctggtgcgtctgggcaagattcagctttacccgcaggagatccacttcgagaactatgtgcaggtcatgaagatcgagggcatcgcggacgcgctgctggtgtccgtggcccgtaccgtgctgggcaccctgtggacggtgggcggatgcgcctttctgggctatctggtcaccaagcaggaaatgtggctgcgcaaggtctggtatcggatgatcgttattacgatgtatttcagcgccggcctgatcccgtggtacatgaacctgcggatgctgggctttctggacaacttctgggtgtacgtcattcccggactggtgtcgccctacaacgtgattctggtcaagaccttcatcgagggtctgccacccgcgctggaggaaagcgccacgctggacggcgctggctatttccactgctttgtgtccgtggtgatgccgctgatcacgcccattctggcgacgctgtgcatcttctccgccgtgggtcagtggaacagcttcaccgatacgatgatgctcatgccctccggcaagtactacaccctgcagttcctgctgtataagtatcagcacgaggcccagtcgctggccgcactggtgcgcaccacgcaggacagcggcgcgatggccaatctgtccgtcaaacagaccgccctgtccgtgcagatgaccgtggccatggtggtcacgctgcccatcctgctggtgtacccctacttccagcgctatttcgtcaaaggcatcatgatcggcgctgtgaagggctga

SEQ ID NO: 1568 - DNA, 1542 bp, Unknown
  Unknown gut bacteria
gaatataaaggcaccctgaccctgaccatttccgtgcccaacagcaccgtggtctactacaccacggacggttccatcccaacggaggaaaacgccacccgctacaacgagggcgacgcctttgagatcaacagcaccgtggtgctgcgggcgcgtgcattcgaccccaccgggcttttgcagcccagtgaggtcatcaccagcacttatcttatgaacctgtaccacgccttccccatcgtcagtctggtggccgacccagacgttctgtggaactcggatcacggtatgctgaccatcggcgacaacgtggacaaatcgaatggcatccccttcaagaacaccgtctaccgcgccgtaaaagagcagctgggcgcacagcccggccacgtggagtattacgacaaggagaacaaccagctgctgaatcaggacatggagtttaagctgcaggggcagtacagtctggacatgccgcagaaatccttcaagttccgctccaagtccaaatacggcgaaaagtatttcaacgcgaagctgttcccggatcgggaatacacccagtacaagggcttcgtgttgcggaactccggtaacgactccgtctggacgcggctgaacgacggtctgcaaagccgcttgatcgaccgtttcaacgagcagacggacaatccctccacagtcattcatcaggcgtggaacccggtagtggtctacctgaacggcgcgtactggggccattacaacatgcgcgaacgcgtcgaccgcttcttcgttgcccagcacgaaggactatcgctggacgaagccgaccagatggatattctggagagcagtggtacccgttccagccagattttctacggcagcaacaaagaatacaaggcgctggtggagcgtgtggagaaatcctctcccggcaccaacccggacgatctgcagtacattttggacaatgtagacgtggacaactacttcgactatatggcctttgaaatgttcttcggcacctccgaccccggcaacatccgcttttacaagctgaagcaggaaggctccaagtggcgctggatcttctacgacgcggactacggcctgttcaattccggctttgacagccctaccagctacttgaaggaatcaggcgccggccagcagaagattcgaaacacgctgatccgaaagctgctggaaaacgacgaaatgaaggacaagttcctgacgcgtcttggggaaatttaccagttcatgaccaccgaaaccatgaccaacgagctaaataccatggccgccattctggagcctgaaatgaccatgcatttcaaccgttgggcggaagaaaacgacaaggccatcaactttgactctcccaccacgcccgagggtgcgctgcgctactggaacacccgtctgaacttcacccgcaacgtgctcaagaagcgtcccacctacttctacgaaatggtgcaggagcgcttcaacctgagtgacgaacagatgctgaactacttcggcgaaaagccggagctgcccagcgacgcc

SEQ ID NO: 1569 - DNA, 1323 bp, Unknown
  Unknown gut bacteria
atggacgagatggaaaaggatgaactgaaaaaagacgaactgaaaacgtccgaagcgcccgagaacgcctcccacgagaagcattcggacgacgaccatgacagcgccgcggcccagcatcccgactactgtcaggaactggccaccatcgttcggggaacgatcacccccaaggcgctgaaagaaaaagttgaaaattatcacgaaaacgatattgccgacgtgctctccattttgaaccgggccgagcgcgaaaagctctatcatgtgctggacgcccagaccctgtccaccgtgctggaatacgcggaggacgtggaagtctacctgaacgagctggggctccggcagcgtattcaggtactttcccacatggagaccgacaaggtggtagagtacctgaaaacgctggacaaaaccgagcgcaacaatctgatggacctcttcgacgaggacacccgtcacgacgtgaacctgctctggtcctttgatgaggacgagatcggcagcgtcatgaccacgaactacatcgaagtgaccgaaggcatcagcgtccgggaggccatgaaggagctgatcgatcaggcggcggagaacgacaacatctccaccatttacgtcatcgacaaagaccgtactttttacggcgctatcgacctgaaggaactgatcatcgcccgggaaaatacgccgctgaactctcttgtcatcacttcctacccctacgtatacgcgcaggagcgcatcgaggactgcgtcaacgccatacgcgattactccgaggactccattcccgttctggacaatcagaacaagctgctgggcgtcatcaccgcgcaggacttcctgcaggtcgtagacgacgaaatgggcgacgactacgccaagttagccggtttgacttccgaggaagacctgaaggagcccatcggcgaaagcctgcgcaagcgtcttccgtggctgctgatcctgttgggtctgggtctggtggtttccagcgtggtgggcgttttcgaagccgtcgtcgcccagctgacgttggtggtctgcttccagtcgttgattctggacatggccggtaacgtaggtacgcagtcgctggccgtcaccattcgtgtattgatggacgagaacctgagcggcaaggaaaagctggcgctggtctggaaagaagcccgcatcggtctgctgaacggcgtgatcctgggcagtgcgtcctttatcgccatcggcctatacatccacttcttcaaggcggaaagctggggctttgcctttggtgtttcaggctgtctgggagcggcgatgatcctggccatgttc

SEQ ID NO: 1570 - DNA, 1659 bp, Unknown
  Unknown gut bacteria
gttgttgatctggatgtctggcagggaatgatgacggcccgggagatcattttttcactggtgcccatgctctgctgtttctttgccgcccgggttcttctgcattattttcaactggaaagctaccagtttcccggctatttccgtaccctgaaccgaaatcgaaaacatgcgtttctaccgggcatttgctccgcagctgtgtgtctgattttgtttacgctgcaaaatggatggtatactcatgcccttcagtccccggaaacgccgccttctgcggtaatgatctggttgatcacgctggggctgctggccgtggcagtgctggccggtatcggaattggcaaagttttcagcgaaaagcacgccaaaaaggcctttgtcttcactggacgcatgaggcggctgatggtgatgctggcgcttgtgcttgcggctttgggctggcttttccagcgcaccgttgtcgtttggaatctgttgttcctctggccgctgtttctgccgctggtggttgccttggccggtctgctggcatggcccatcgaaaaggctatcagtgaattgtacttccgggacgcacggcgaaagctcctgtccattccggggcttattcgtatcggcatcaccggcagctacggaaaaacctctgtcaagcacattttgggaacgatcctcagtgaaaagtatacgacgctaattactcccgccagctttaatacgcccatgggtgtgacccgtaccattcgggaaaagctgactcccagttatcaggtctttgtgggggagatgggtgcccgccatgtgggcgatatcaaggagatgtgccgtctggtgcatcctaccatcggcattattacgtctgttggaccgcagcatctggaaactttcaagtctatcgagcgtattgccaaaaccaagtatgagctgatcgacgcgcttcccacgacggattctcatagttatttttacaacgacggcagctattgtctgcaaatgtaccagaaaacggagaagcccaaaaccctttgcggctccgatgaaagcgcagacgtttacgcgacggactgccgtgtttccggggaggggagtattttcaccctgcatgtaaaaggaaaaggcagcattgagtgccacactcgtctgctgggcgcgcatagtatccagaacattctgctggctgcggctgtcgcctccgatttgggcttgagtctgaagcagatcgcccacggcgttgaaaagcttcagcccgtcaagaatcgtctggagctcatgaactcgccggggagcttcaccatcatcaacgatgcgttcaactccaatcccgttggggcgaaggccgcgctggaagtgctgcgccaatttccgcagcggcgcatcattatcacgcccggcatggtagagcttggcgaaaaagaagcggaatataaccgggagtttggccgtcagatggccggatgcgtcgacatcgccatcatcgtgggcaaaggacgggccacgcccattctggatggcctgaaagaagcgggtttcccggatgaaaacgcttaccgcgtcgatagtctggaggaatccacccgtctgctgcacacgctggtcaaaccgaccgatacggtattgtacgaaaacgatctgcccgatcattatcaggaagcctga

SEQ ID NO: 1571 - DNA, 1326 bp, Unknown
  Unknown gut bacteria
atgaaaccatgggaaatcgcttccgttcccgaagaagccggtgtttcttccaaggggctgctgcggtatttggacgaagtggccgcttccgggctggaacatcattctattctggtgtggaaggacggcaagctggcttgtaagctgaattacgccccttacgatgaccagactccgcatgtgctgttttcactgagcaagtccttcacctctgctgcggcgggtttcgctgtcggcgaaggactgctccgctgggactcgaaggtgctggatgtactggcagacaaggcaccggaacaaccttccgaatggctgaagcaggtcacgctggcgcatctgctgaccatgggctccgggctgaaaccggagtcggacgagatcgaccagctgctgattcccgatgaagggccgacggcgaagcctctggcgggcggcctggattgggcgaaggcagtgctggcctgtgattgcgaccatcagcccggaacccattttcactataacagccacggcacctatctggtcagtgccatggtgcagcgggtgacgggtcagaatattcgcgattatctaatgcctcgtctgtttacgccgctgggcatcccgaagcctgattgggactgctgcccgcagggcgtttgctgcggcggatgggggctgcatctttcttctgacagcattttgcgtttcggcgtttgcctgattcagggcggcgtatggcaaggccgtcaggtgctgccggcggaatggcttaagctggctacggcgaagcagatcgacaattccaacggcaagcctgaacccgaaaacgaatggcatcaagggtacgggtatcagttctggcgcacccgggagaaccgttaccgcggcgatggtatgttcggtcagctgtgcatggtctccccggacgatcatatggtggtggccgttacggcgggcattgacgatatgggcagggaaatgaagctgctccatgattttcttttcacggcaggacggatggaacccggtacggcagaagaacagaaagcgtttctggatcgggcggcgcatctggcttacccatggccttcggacgacggctccggcactgttcagccaggcgagtatgtctgtgacgaactgacactgacagtaggcgaagtgcaagacggcgtgctgccggtgaaagtcgttacggcagacggaaatacgctttccttctgcttcggcatgggggaaatcgcagcctatacgcgcccctgttttgtcccgggtgcgcctgacctgcattgcatgggcgcctgcggctggcggcagggaaccctgatcctgaccgaccgcacg

SEQ ID NO: 1572 - DNA, 1278 bp, Unknown
  Unknown gut bacteria
ctggttcgggacattctcacctttcccgcttttgccgacgcgaccatcgctttggtagacatcaaccccgaagggctggaatacgcgcgccgtgcggtgcagcacatcattgacgcagggcattaccccgccaagctgatctgcaccaccgatcgcacggaggtgcttcccggggcggacggcgtgctgagtatgctgatggcccagccgttggaggtttttcggcgtgatctggaaatctgcgaaaagtacggtgttaagatcaatgtgggcgacacccggaaccctgcgggcattttccgttttctgcgcaccgttcccgtcatgctggacgtgctgaaggacgttcagcgctactgccccaacgcggtctttctgaactacaccaaccccatggccatgctctgccgcgccatgcaggaggccgcgcccgaggtactgaccaccggcctgtgccacagcgtacagcacggtattgaaaaattcagcaaaattctgaatatccctgtgaatgaaatcgaatacacctgcgccggcatcaatcatctggcctattatctgaagctgacccacaacggagaaaacctgtacccggctctgcggcagcgcacgctggacgatccggcggtgtatgacgaggacatcgttcgcaacgaggtctttctggcgctggggtattatgtgaccgaatccagcggacatttttccgagtacagcccgtggttccgcaaacgggacgacctgctggaaaaatactgctaccgaggcaccagctggaacacgggccgcaccaacttcaccatcgaagtccgggaaaaacggaaagcagactactacaccgatttggaaaaatttctcaacgaaccggccgacctccagcgcggcaacgagtacgccgccagcattttcaacgccctcttcggggacggccagctgtactccttcaacggcaacgtgcgcaactacggcctgatcgacaatctgccggcgggagcctgcgtggaagtgcccgttctggccagccgcaacggcctgcagcccattcacgtggggccgatccccgacgaactcctccccctgatgcatctttccagccagatcgaggaaatggcggttcgcgcctgcttcgagggcgaccgcgaactgatttacaaggcgatctgctacgacccgctcacctccgccgtgctggatctgcgggagattcgtcagctggtagacgaactgttcgctttcagcgagccctggctcccggcagggatgcgccgcaagaattga

SEQ ID NO: 1573 - DNA, 1281 bp, Unknown
  Unknown gut bacteria
acggcggctgattatgaaatgtgcaccacgccctccatgtatatggcgattctgacggggggcttccagccggacgcctccatcatgattactgccagccatcatccatggcagctgaacggcctgaagttttttacgaaggagggaggcttgggcttccatgagctggatgaagtgctggaaatcgcacagcatctggaacccgcagaatcggacgaacgccccggaaaagtgctgcatacgcctttcctgcctacctatcagaaacatttggaagaactgattatctccggcgttgacccggaggtgcaaaagccgcttctgggtctccatgtcgtggtggacgctggaaatggcgcgggtggtttctatgcgaatatgctggaggaattaggcgcttgggtggaaggcagtcagtttctggagccggatggtcacttcccgaatcatattcccaacccggaaaacgcggatgctatggcctctatttcggcagctgtgcacaaatacgacgcagatctgggcgtaatttttgatgcagactgcgaccgtgcggcaatcgtagatcatactggccgggagatcaaccgaaaccggctgatcgctttgatcagcgctattctgctggaggaaatgcccggcgcgaccattgttacggattccgtgacttcttcgggtttggcggatttcattcaggagtggggcggcgttcattatcgctataagcggggctaccgcaacgtgattgacgaggcgatccggctgaacgaagcgggcgtaaactgcccgctggctattgagaccagcggccatgctgcgctgcgcagcaatcactttctggatgacggcatgtatttggtcacggtgctgctgatcaaggccatgcagctcaagcagcagggcgaagaactgagcaagctgctggacggcttgaaggagccggtggagagccgtgaaattcgtctgaatgtgattgcagaggattttgcccctgcggcccgtcaactgattgagcgcctgatggaatacgctaccgagcacgaggaatggcatatcgctccggataatcgggagggcgttcggatttccttcgatattgacagccatttgaacgcagcgtggttcctgctgcggctcagcgttcatgacccggtcatgccgctgaacgcggagagcgatgtgcccggcggagtacgatatgttttgcaaaaactatatgaggccattcaggacgaaacagacgtagtcgatctttccccgcttcgcgcggcgctgcagtaa

SEQ ID NO: 1574 - DNA, 759 bp, Unknown
  Unknown gut bacteria
tctacccatttttttgccgatctggcgcaagccttcgccgatctgggcatcgctacgctgcgctatgacaaacgtacctatttgtacggcgaatccgcatcaatgacggtggaggaagaagtcatcgacgatgcggtgctggcgggaaagtacctctccgataatctgctggtcgattcctccatgatcgtggttgtgggacatggtttcggcggaacactggctcatcgcattgccaaagcctccgacggtgtattcagcgcggtcatcatggtcggctctacagcgctctcctacgaagattatctgctggggcacagcaacctgagcagccacacggctgacgagttgaaagcctatcaggatacgctggacaagctctctaaaatgaaggagcagacagcgctggaaaacacggaaaccgttttggggcatagcgtgtactatttctgggaactgcagaagatcaataattatgagttgatccgcaagttgcgtctgcctacgtatatcgtgcagggaaagaaggatccactggtgcccgaaaatgagggatggcggcagtacaacaacaagatcggagaaggcgtgaagtatgtgacttaccgttcttttcccggtctgaatcacgtgctgatgagcgattcttccacggatgcctatggcctgcctcaatatacggaaaacgcaacgctggacatcagcgcgggccgcagcattggtcaatggattttgagcctgaaatcgactgcagaataa

SEQ ID NO: 1575 - DNA, 1335 bp, Unknown
  Unknown gut bacteria
ttggacaagcagatctggtttgcaaaaaaggccctgaaaaaacttcaggcggcaaaagagctgagaatgagcgtctatctctacggcgctacgggttttggcaaaacaagcgtcgcggagcaggtttttgaccgtacttccacgcgctggatcagcgggacggagccggaagaagtgctgatggaaaagctttcgcactgcaccgccgatgaatataccatattggatgaccttcatggtgtggagggcgataccctgccccaaaagctcgttccaatgatcggcaaggagggctgccgaatggttctgatcggccgcgcttctttgcccgcatgggcttcttctctggcgcttcaggccaaaatcatggtgatcccggaggacgatctgcgcgttaccgccgacgaattagcggagttctgcccttctgtgggcctgaagctttccccggaacggatccggctatggctggaggcaactgaaggaaatatcatggcgctgaatctttttcttcgccggatccagcagggagccgccgacggaaatgctctggaagccgacatcaaaagagttttcatggattatctccaatcggacgtcatcagccattggaaggaggatatccgaagctttctgatgcaagtcagcgttgtagacgcttttacgctggagctggcggaagccatcaccggagaggacgacgccgcttcgctgcttcatcgcgcggaacaggccggcaatatcctccaatgcgacggcggagaatggcacattcgtccggtactgctggaagcgctgcgggagcaggctctggtggttttcgggcacaaatgcatctatcagctgatgtacaatgcgggacgatactgtgaaaccagcggtcagacgatgcgtgcgctcaggctctatcagcgctgcggcgacgcggacagcatccgttcccttttgctccgggaagcgcggaagcatccgggcgtcggcagctactgggcgctgaggcaatactatcaggcgctttcagaggaggacgtccaaaacgaaccggttctgatgagcgcgctgagcgtcctatattccgtgctgatgaacacggaaaaaagcgaatactggtaccagcgcctgaaagaatatgccgctgcctcccggggcaatgcccgcagcgaggccaatgggcaggttttttatcttgatatcgtccttccgcacaggggttcgcgagaaattgcccgcatcctgcccaccctcttcagcgcactgcacggcggcgggaatgttctccggcccgtatccctgaccaacaatcagcccagcctcatgaacggcggcaaggatttc

SEQ ID NO: 1576 - DNA, 1254 bp, Unknown
  Unknown gut bacteria
atgggtttagagtatactgatattactaaagcggagaaagagaagcaatggctccgcagtgatcgaatcaaattaaagaaggaggatcatcccatgaaacgtacgctcgctatcctgctggctctagtgctggcgctgtccgtgtgcagctttgctgcagcagaggacgagatcaccctgaccgtgttccattacatggcgcagacgaccaagcaggccggtctgaacgctatcgaggcggccttcaccgagcttcatcccaatgtgaagtttaataacatctactacaatcagggcaccgactacttcccccagctgtccaccgccctgtccagcggtgaccagcctaacatcatcatgggcaaccccggtctgtatccggatctggtgacggagggcttcgttatggatctgagcgataacgaggtcatcaagagcctgaatctgccctccggcgatttgggcgacgtgtccgccgacggaaaaatttacggcttccccatcgactttaagacttggggcatcttctacaataagaccatcttcgaacagaacggtctggaagttcccaccaccctgacccagctcaacgagctgcaggataagctgatcgccgccgggatcgacccctacgtgcgcagctttgctgatgctgtctacggcgacatcgaagcccgcaacaccgtctggacccgcgcgctggaagccggcgacaaggacgtgtttgaaaagctgatgagcggcgaaaagaagttcgcggattacccctatttcgccgaagcattggaaaactggaaggcccgtctggtggctccccgcaccgacgacatgagcaacacgcaggatatggcgctggaaatgttcgccgccggaaacgccgccatgcggtatgacggatcctggaatatcggcgatatgctggccaaaaatcctgatttcgagattggcttcttcgtggctcccattgacgataacggatccgctaagatgaacgtgcaggtggatcagagctttatggtcaatccgcaggcagaaaatgcagacatggcgctggcttttatggaatactggatgagccagggcatcgcctggtccgaagcgtcccagaatcctctgtgctccggtgctgtcagcgataagctgcagcctatggtgcagaccatggccgaagtgaaggcctccggtaatatcgcccactacggcgacttcaccaagcccctgtcctccgctttcaccaccgcgtggcgtaccgaa

SEQ ID NO: 1577 - DNA, 1083 bp, Unknown
  Unknown gut bacteria
atgcagaaagcaagggaaagtttgcggaaaaagggcgtgatatggagcctgctgttttcgctgactgtgctggccgctgccgccggaatttgcctgctgctctctcaggtggacgacgacaacaatccctttgccatggcggtgtttattttggccgtggtggtgatcgccagccatacggacggctactggtatggaattttttcggccatcgccggggttctttgcgccaattatgcatttaccaagcctttttttcagtttgaatggtctatcgccggttatccgctgacctttaccgccatgctgctggtgtccctgatcgtttccaccctgaccacccagatcaaaaagcaggaacagcttcgtttcgatgtggaaaccgaaaaaatgcgcgtcaacctgcttctctcccttccccacgatctgcgcacgccgctggcgtccattttgggggccagctccgttttgctggagcagaagaacctttccctggaggaacgggacgagctggcgcaggatattcagaaggaagcccactggctgagccgcgtaacggagaacatcctttccgtgaccaaattcagcggctccggcgtggcgctgaaaaaagaggaggaggtgctggaggaaattgtatccagcgccatcgtgaagttccgccggcatcacccggaggtcgccgtgacggtggagcggccggaaaacattctgctggctcccatggacgcgacgctgatcgagcaggtgctgacgaatctgtttgaaaacgccgccatccacggaaagaacgccaccgctatccgggtcacgatcagtcaggaacccggacgggcggcagtcacggtggaggataacggcgcgggcttttcgccggaagcgctggaacacattttcgacggcctgcagcccgccagcgtgacccattcggacaatcgacgcaatatggggatcggcctgaacgtgtgccgctccatcattcgggcccacgggggagatattgctgccgaaaaccggcagggaggcggcgcggtgattcggttctggctgccgagagaagaggaggaagaacatggcgaatag

SEQ ID NO: 1578 - DNA, 753 bp, Unknown
  Unknown gut bacteria
atcacaacctatggccttttctgcctgccgggttttatcgcgtactgcgttttcttgatttttcccatcctgatgggcatttattacagcttcatggactggaacggcatcagcaagggctataacttcatcggttttgccaactatgcaaaactgttcaccgataagaaattcggcgaggcgcttctgttcaacttccgctataccatcatgctgatcgtcggcgtcgtcgtcatcagcgtggttctggcgctgctcctgaacaaggagttcaagggccgctccttcttccgcacgctgtacttcctgcccgccgtgctgagcatgatcaccgtcagcctggtgttcaaacaggtgttcttctatgtgctgcccgccatcggcaaggcgctgggcatcgaggcgctgtccaccaacattctggcaagcaagcagaacgcgatctacggcgttttgttcgtccatctgtggcagggcgtcgcccttcccacccttctgttcctggccggtctgcagaccatccccacggagctgtatgaggcggccgctatcgacggcgccaacggctggcagcagttcaagcacatcactgtggcctacctgatccccaccctgagcgtggtgctggtgctgctggtcaagcagggcctgatggtgttcgactacgtcaagtccatgactgccggcggcccgggcaccgcgacccagaccatcgcccttttgatctataacaacggcttcgagcgcaaccgc

SEQ ID NO: 1579 - DNA, 792 bp, Unknown
  Unknown gut bacteria
atggaggaacgagggatggaaggttatcgaattctgatcgtggaagatcacgtgcagtcacgcacaacgatggcggagtacctgcgcaggcaagagggcgtcgcgctggtacgggaggccggaaacggcgcagaagccctcaaactgctgagcgaagaaccgtttgagatcatgatcaccgacatcatcatgcctcaaatggatggctacgcgctgctggaagaaatgcgccgcagggaacttccgtccaaaccccagaccattgtggtgtccgcgctgggacgggatgatttcgtcacccgggctattgagctgggagcgaccttctacatggtcaagcccttcgatatgcgccatctgatgagccacatccgcgatttgtccggcggaaggatcagaccggcggatgccgcacccactccgagagagacacaccgggtgcaaacgctggacgagcggttgggcagcctgttcctcaccattggcattcccgcccatatcaaaggctaccaattcctgcgtcaggccgtcaaaatggtggtggacgagccggatatgatcaaccgcatcaccaaggaactctaccccggcattgcccggcacttcggcacgtctgccagcaaagtggagcgggccatccgccacgccatcgaagtggcgtggaaccggggccggatcgagaccctgaacaccgcctttggctgcaaggtctgcaccccggaggacaagcccaccaacggcgaattcatcgccatgatcgcggataaactctctatggagcgcagcgcgtaa

SEQ ID NO: 1580 - DNA, 1314 bp, Unknown
  Unknown gut bacteria
gccgccgaaatgaccgaggccgaaaagctggctgaaatggtagccaacgtcgtgctgcctacgccggagctcccgctggtggatgaacccatgaccatcaccgtcaagtaccccaagacctcgaaccatggtgattttgacaactgcttctatctgaaagccgtcgaaaagctgaccaatatcaagctggacgttcagggcatcgacgccaacggctgggatgaaaagctggcgttggactttgtctccggcgactacagcgagatctatctcaacggcgtttccttcaacgacgcggctgtgtacggtcaggccgggatgctgcgcccgctggaggacctgctggagcagtacgcccccaacgccgtggagatcctgaacctgctgcctgaaacccgccgcaacgtcaccgcctccgacggacacatctacatgatggccgcttacgacggaacgccccgcgacatgctgatgaacggcacttacaatcaggaagtcaacggcgactggctggccaaggctggtctgaccgagacccccagcacgctggacggtttctatgacatgctggtctccttccgggacggcgacgccaacggcaatggagaagcggacgagattccctacagcttcgtttatgacggagacggctacaacatgcccctgggcgcgtttggcttcgtcaacctgcggcacgacgtgatcgacggtcagtacgtctacgttcccgctcaggagaatttccgtcactatctggagttcatgcataagctctacaccgagggcctgctggattcgaagattttcacccagaccaccgaagaatacaacgccaagatgtccaccggcgtgatcggcgtgatgcccaactccggcgcggcgatcatcggtctggacgaatacctcaagaccacgtccctgaagcccatgaccagcgaatacaacgaaacgcccatccatcccggccgtgcgcaggaagtggacaagttcggtatggtcatcaccgataagtgcagcgaggaaaaggccattgccgccatcaagctgctggactacttctacagccaggaaggcaccttcctcatcaagtgcggcccggaatacggtgcttggggcgacatgatcgacggcggctacgtccgtcacgagaatgaagacggcaccgtttcttacgagctgatctacgatcatgagaagtatcaggacagctactatcagttccgcgtcaagaacggcctgatgaacatgcccttcttctacaccggcgctcatgctgccgttatcatcggcggggccggttactccggatacagt

SEQ ID NO: 1581 - DNA, 1521 bp, Unknown
  Unknown gut bacteria
atgaaaaaaacgctggcactgctgctttttttgctggtggctctggctcccctttggggaatcgcagaagaaaatctgctgtccaacggagggtttgagcagttggacgaattgggggatccagaggggtggtataccaatacctaccgtaacgaggcgggatattcccggctgcagatcaccgatgaaaaggcacacagcggcagctacagcgctttgattcaaaatgccagtctgaacgacgcacgatacatcaccaccgtgcgggtagagcccaatagctattaccgcctttccggctatgtgctggtagaaagcatgggggacgagggcaacggagcgaattttggcatcgaggatctgtatacttcttctaccgggctttacgatacagatggtcagtggcaatatctggagtggtacggcaaaaccgggccggatcagaaagaaatcacgctgggcgttcggctgggcggctacagtgccgaaagtatcggcaaggcttactttgacgatatcgaactggtgaaggtggaagcttctgctatcccggatgaagtttccccttccttgtggtactcggtggcttcctccgctgcctcaaaaacggaaacggaaactgaatctgtccctcaaaagagcaccacgctgttttgtctgctggcggcggcgttcctgctgctttgtctgctgctgcggccatggctttccagcacggaaaagaggttttccgtgctggcgatgatcgttattgctctgctggccgcggggctgcgggtctttctggccctgcgggtcgccgggtattccgtggacgtgaactgctttacggcgtggagtcagcagatggtcgctcttggcccggcaaaattttacctgaacatcggcttctgcgattatccgccgggatatatgctgctttgctggattaccggcggcttgatgaatgctttcggcacttataatacagctgtcggccagccgggactgctgctggtgaaactgtggccgatcctgtttgatctggcgggagccgcgcttttgtacctttatgccaaaaagcgtctcgggactttcccggcgctgtttctggcggttctgtatgcgctaaatccggctgtgctggtcaatggagcggcatggggacaggcggacagcgtactgactttcttcctgctggtttgctgcattttcgctatggaacgcaagtggcagttcgcactccctgtgtatgtgacggcggtgctgctgaaaccccaggcgcttctgttcgggccggttctgctgatctggcttctacgggtgcttttctcccagaaggaaaaacgcaacctgcgcgggctggcgatcggcttcggcgcttcgatcgtggtcgctgcagcgattatccttcccttctccgtggaacaggaacaccccattggatggattatcaagctgtactccgatacgctttcttcctacgcctatgcgacgttgaatactgccaactggtattatctgctgtcggccaactgggcg

SEQ ID NO: 1582 - DNA, 1137 bp, Unknown
  Unknown gut bacteria
atgaacctttccatgcgtggaatcgtgaagtcctttggcgcaaacgatgtgctgaaatccgttgatttttcccttaaagggggagaagtctgcgcgctgctgggcgaaaacggcgccggaaaaagcaccctgatgaatattctgggcggcgtgctgcaggcggacgccggaaccatcgagttggacggccagcccgttcaattccatacgcctcatcagtccctcgaagcggggatcgcctttatccatcaggaattgaacctgatcaacgatcttcccgtttacgaaaatatgttcattggccgggaactgaagaaaaaaagcggccttctggatcataaggaaatgatccgtcagactcagcagctctttgacgaaatggggctggatatttcgccccgggccatggtgtcctcgttggacgcctcctacaaacagattgtcgaaatctcccgcgcgctgatgatgaaggcgtccctcatcatcatggacgaacccactacctccctgacggacccggagatcgagcgcgttttcgatatgcttcgtaccctgaaagcccagcaggtgggcgtggtctttatctcccacaagctgcgggaagtgatggaaatctgcgatcggtacaccgtcctgcgggacggcgtggtggtggcggacggccgggtagaggataccaccatcagccagctggcctgcgatatggtgggccatgcggtcaagacggaatccattcgccgggatgcggcccgcggggccgaagtgcttcggctggaaaacctgacgctggagccctactaccgcggcgtgaacctttccgttcatgcgggggaggtcgtcggcgtgacgggccttctgggggacggccgcagcgagctgttccgcacggtcttcggcgatatgggcaggtatgcagggcagatttacctgaatgaaaagcccgtgacggtttcctccacgatgcaggcgttggggctgggcatcggctatttgccccgcaaccgcaaggaaaacggcattatcaaagatatgtccattctggaaaatggctccatcgtcacatggccccggctgacccatttggggctcatcgatcggaaaaaacagctggcggagtttgaaaagcagcggcaggag

SEQ ID NO: 1583 - DNA, 564 bp, Unknown
  Unknown gut bacteria
atgatgcttgcccttctgctgtgcctgacctccgttgccgcgctggcggagagcgttcccagcaagacgacggccgatctgcggtggattgaggcggaccccgagaaagacccggaagattccggcttctacatccgcattgtcacggcggatgagacgaacaatcaggaacgtgtggaaatctgtacggaagagattgccaagctggctgcggcggaaagcgtcgaagcctacttcggagaagaactggatttgaagtctatcgttggcgctgacgaactgaacgtgttcgaatatgtgcccatcattgccggtggttacgacattgcctatggaaccgtgacgaccaaaatctggcttgctacgccctatgaagtggacgaaaaagtggccgtaatgatcggcatggtaacggaaaacgcggacggaaccaacacggtctcctggaaagcgtttgagggcgtcggcattgcgcccgagtcggaagaagcggttgccggtattcagacggaactggatcccgaaaccgtgctggccattcaggaaggcgttgcgttgctcgca

SEQ ID NO: 1584 - DNA, 693 bp, Unknown
  Unknown gut bacteria
gacagttctttttggtcgtcactaaggatcaccctgtattttacggtggtttccgtactgcttcagctggtgattggctccatgatcgccatgctgctgaatcaggagttcaggggacgttggttggtgcgaaccctggctatgctcccatgggcggtgccaacggtggtcaacgccaacctgtggaaatggattttgaacgccaattatggcgtacttaataagattttgatggctatggggatcattcagcaggatgttctttggctgaacgacccgaagctggccttgaacctggtagtgctggtggacacgtggcggatgcttccgctggtctttctgatgctgctcgctgctctgcaaacagtatctcagacgctggtggaagcggctcgcgtagatggcgcaggagcgttcaagcgtttctttcatgtctatcttcccgggatgaagcccatgattctggtagtgctggtgctgcgtaccattcaggccttcaaggtgtttgacgtcatctatacgatgaccaagggcggccccaacaacggcaccatgaccatcagcttttttacctactacgaaatttacaagtatttgaattacggcaagggcgctgccatttctctgatcattttggtgattatgctggcctttacggcactgtataagcggctgctgcgcacagacgattaa

SEQ ID NO: 1585 - DNA, 1224 bp, Unknown
  Unknown gut bacteria
gcgatggaatttgtttccgtccgggccacggcggagcgctggggcgtttccgtgcgcaacgtgcagcggcttttgaaggaggaacgcatccatggcgcgtacaagtgcagcggctgctggatgatcccggcggacgcgcccaagccggacgatccgcgccgggaacgcaaaaaggcccgggaagcgaaagcggcggatgctgcggctccggcggcggaaacggaaacgcttcggccccggcggctggggtatggccttttgtccgtcatcatccccatgccccggcgcgacgcggacgcagtgctgcccctgctgaaggaaaccgccctgcggcgcgaatacgaaatggagctggcctacctgcggggcaactacgagctggccgcccgccgcttcggcgaaacgcagcccgaggagccgacccggttctgcgccgccatgctgacgatgctggcctgcatccatatcaataacggggatctgtatgcccgagtagcccatgagatggaacaggaaatgctcatcggggacaaggactccgcccatatggcggaggtggcgctgacctatccgtccctgagcatgaaggatatgggccgggtatcgcaatgggtgcagaagggcgacttttcccggctgctgccggaagcccggcccatgggcatgtacctgagcctgaaaaatctgcagggtcagcggcgctacgccgagctgctgtgcgcctgcaaggcggcgatcgccctttgggaacgggaggacaccttcaccattctggatatttatctgcggatgctctgcgccacggcctgctacgagctggaccgggtggatgaatgcgacgatcatttgctggaggccatgaagatcgccctgcccaacgggttcgtcacgccgtttgtccagtcctggatgaccacgggctgcgagatcgagcatctgctggagcagcgttatccccagtggagagacccggtggaacgggtcagcatggccacatggaaaaactggatcgctttccacaaccgctacacccgggagaatatcactacgctgcttacccagcgggaataccgggtggcgcagatgatcgtggccggaagcacctaccagaatgtggcggacgaattgtatttgtccgtcggcacggtgaaaaagctggtttcatccctttatgacaagctgatgatccactcccgggcggaattagccgatatgatcatgtaa

SEQ ID NO: 1586 - DNA, 1995 bp, Unknown
  Unknown gut bacteria
atgaaggacatcaacggtacagtaacacttgcatacgtcgaggaagacaataaacagcgggttatttttcgtgtcgtcccgctttgtacccgcgagggcgtttcttttcatgacgcctcggaggatttccccgatgaaggaagcctgagaatcgttcccgacaaaagagaacagagcacgttcaaggaacggatgcgcgacatcagcggcctttgcgcgattcatctggtgaatgatggcgcgaaggagcttattaaggtgcgccaaaatcgaaactatgcccccgacgccggagaaaaaaacaaactggccatctattccgacgtggtatgcgaatttgcggaggatggctgctttgaagtagtccagcccgggcaggacgcatcgggagccctgacccgcaaggtgattatccaaaaggataaggtactctacggccctgtattaaaggaagaagcagcttcggtctctttggattctctgcatccctttggaaatgatcgtttcctgctgcagaatatccagaatgatcttctgggaagccgcatgatctattgggaccccgaagcgatcatcaactggagacagcgccgcaacgccatgcgccgcaaggaaagagcggaggaaaaagctgaactggacgcggctatgctgacggcttccgctcctgcggtcgaagaaacacagcctgacacgaaaccacagcagacagttgtccgtgaaaagacggtcgagcctcgcaagagagcggaaaaaaacgaaaaagcagaaaaaaaagaaactcctgataaaacggaaaagactgaaaaagatcgcgtaacggagaatacggcccttcctatcggaacgaagctggatattctggatcagcagctgacgttcgatcagcagatctcccggctggatcagggcatcggtagcacagcaaaccggctgacgatggacgaaactccctcggaagaggaagaaccggagatcatttcccattttaatggaacgccgctggtgccaagcgccaagcctattaccaagagcgctgcccggcctgagtccatgcatcatgtggtggaacagcagcttttccagaataacgagggagaaaaccgcagcatttaccgtatggtggaaaaccccatcgacagtctgaatcgctgtctggattatgtatggcagaacgccgatatgcgcagtcaggcgatcgaaaaattgagcgaaaatgagactttcatgcgggatatgctgcagattttccgccgcaggggtctgaacacgcaggcatccgccgctgctcaggagcagctggctgaaattgaagcggagcgtctgagcctgctgatgcagctggactccgccaagcagaacgccaagcagtaccgggaagaagccattgcttcgctgtctcaaaaactgcgggctgaatcggaaaaactcaagaatgaaattcagtcgctggaaaagaccaaaaagaagctaacggacgaaacacaggtgctcagccagcagaacgcccgccagaccattgacttcttctctcagaatatgcagtgtatgtccggggcgggagaggaacgcatcatgctttccccggtgatcggctgccactatgaggcctccgaattggcggaaaagctgcgcgttcacatgaacgagagcggctacggcatcaacgaggacgatgctatgggtctgctgatctatttctccgtgaacgacacgctgtgtctttgcgcggccacggaagccgatgcggcccgttttgcacaggtcatgctggagagcttcggtctgcaaagcgtttccggcacgatcctgccagagtcctatgtagaagtcgtcagcattctgccggaggacggccagcgcacgcctaccgtgacgattcagtccctcggcacggagagcatgtccatttacggccataaaacgctgtatctggcgacctctcaccaaatcgaaaattattccaccgccggtctgcccgcccatcccattgtc

SEQ ID NO: 1587 - DNA, 837 bp, Unknown
  Unknown gut bacteria
tttcccagccactcctttttttcaccgaatcagtcttctatttacgcgctgtatgtggaagagaccggcattcagcgctgcttcgccgggcagcaatgggggccggaatcgcgggaatattttatccttttacaggttctttccggaaagggaaggatccaaattggccagaaaacttatccagccgtcccaaacgacgtatttcttttttaccccggagaccacgtctgctattattccgatcagagcgctccgctggagtatacctgggtcggattcaagggcggcgacgcgcaaatgctgctggctcagaccgaattttcacacctgaagccgatgctccattttccgggggacgttcccttttcaaatgatctgcaggagctgtacacctatcacggctctcgtgcggtggactctgtacgtatgatcgcctgcctgtatcgttttttcggagatctgcttgagggagcgcaaaagaataaaatcaaaacggattctactcaagtggttttggaaaccgccattgactatattacccaaaactacgctcagccgcttacgctgcaggaattagccgatgcagtctgcgtcagtccaagctggctataccgcagctttatccgttatctgcacatttcccccatgcgttatttaagcgagtatcggatcgaacagtctatgattcttttgcgtgacccatccctcagcatcagctctgtcgcttatgcaacaggcttccgggatcccttttacttttcgaaggtgttcaaatcgatgaaaaactgttcccctaccgccttccgcgatcaaaaccggaagccggaagacgattga

SEQ ID NO: 1588 - DNA, 834 bp, Unknown
  Unknown gut bacteria
tgccgcaccggcatggggattaagatgaagaaaaaaatctgtgcccttctggtgttgacgcttgcactctgctggagtctggccgcctttgcggcggttcggatgccggaaaatcgcggcgcattgacggacgacgcgaatgtgcttggaacgctgacggccaaggatgttatggcctatgcctcccgggtggaggaagaaaccggcgtgaagctgcacgtggcgctggtgaatttcctggatggcatggaggtcaagacctatgcccgccaactgttccaacgctgggagttgggcggggacgatctgcttctgctgggcgctgcgggcgaggacagctttgcggcggtgatgggcagcaatgtggaaaagaagctgggagccagcaatgccgaaaatctgctgtacacttcgtcttcttttgccactctgtttcaaagccagcagtacgacgcggcgttcgccagcttttctaaggctttgaacgacctgctggaacggcagtataacgccgatatcagcctgaacggtctgttccagacggaagaaacggccacttcgaaaaagtcctccactggttctgaactgtgggagcaggtcattggctccatcacggaaaataccgccgattatcagcagtatcacgagacccacgagcaggacgaaggcgggttaagcgctcggggctggctggttctggccattctggtgatgatcgtgttcagccagagcgacccggcgcgaaaggcgcgtcgaaatcgtcgcggcaacgggaaaagaatgggcctgatcggctggatcctgacccttatcggagccggaaccgtcgtaaac

SEQ ID NO: 1589 - DNA, 1107 bp, Unknown
  Unknown gut bacteria
atggctaagaatgcgaacaataaagtgagcatttggcaatcccttcacaatgcatggaaggtgcaggacattcgcaagaaactgatctacaccttcttcatgctgattctcttccggctggtaggcgtgatccccgctcccggcgttgactacgttcgcgttaagtccgccatgagcgggagcaacctgcccctgctggacctcgttaacatgatgaccggtagtaacttctccaacatgaccatcatggccatgggtattactccgtacatcaactcctcgattatcatgcagcttctgaccatcgccatccccgctctggaacgtctgtccaagagcggccccgacggccagaagaagatcgcctccatcacccgctatgtgacggtcgtgctggctgtgattcaggccatcggtctggtgtacagcatgggctacatcaagagcggctggttcaacaccgttctggtgggcgtgagcatggccgccggtacggcgctggccatgtggatcggcgaacggatcaccgcgaatggtctcggaaacggtgtgtctctgctgattttcgctggtatcatttccaacctgttcaacggcttcaccagcctgatcgccaacgctttcagcgctacctcgctgactccctggctgaccctgctggcggtgctgctgttcgctctggtgatgatcgtagtcgtgaccttcgtggacatgggcgtccgccgcattcaggtgcagtatgccaagcgtgtgaccggccggaaaatgtacggcggccagagtagcatcctgccgctgaaggtttgcagcgttggcgttatgcccctgatcttcgcgtactccttcatggctttcccctccactctgattcagctcttcggcggcagcgaaagcggcttgggcctctggtggagccggtacatgaactactacagccccctgtacatgatcgtgaccgcgctgctcatcatcgcgttcacctacttctacacctccatttccttccagcctgatgaaatggcaaagaacattcagcagcagggcggtgtgattccgcacgtgcgtcccggcaagcccaccgcggatttcctggcgcgcaccaacaat

SEQ ID NO: 1590 - DNA, 918 bp, Unknown
  Unknown gut bacteria
ggcgggtcgctggtgcagtatgcgtcccgcgatgggcttcattgggagatgaaaggcatttttctggatgggttcgaccagatgctggaatgccctgatttagttgtgcgggacggacgggcactgctgcttttaagcgtcatggacatgccgatggatggaagaaaatatccgcatacgaatccgtctatcgtgctttgggggacagtggatgaaaaggccgcgcatttctacgaagaaggccgggctgcgctggacaatggctgggattattacgcgccgcagatgacggaaagccgggacggacggcttctgatggcgggctggatgcagagctggctccatcagatgccgacggacaagctcggtcatggctggaacggctgtatggcgctggtgcgggaattgacttgggaaaatggacggctgatgcaacggcctgtgcgggaaatcgaaagataccacggggaaaaaacggaaaagaaaggctgtttgactccgaagagtgcatgggagttttcaactagggaatgcgcggagatgcttttccgtttccaaaacgtggggaaacagacggtgcgactgtcgctgctgaaggatgcagaacaggaattctgcatcgaatatgacggaggagaacaggtgcttcgtgtcgacgcgacccggagcggcttctctaccgcaggtgaaaaggcgacggggagtcaaatgacggcagaagccgatgtgccgctgtgggatggtcagttggagttgaggatttttgtggatcgttgttccgtggaaatctttattcagaacggcgaaaaggttatgagcacccgcgttttcccgagaaaatcgggcaggggcgttacgctgtccaccgatggaaagggatgcgaagcggaagcgattctgtatgagctgaacgtgtaa

SEQ ID NO: 1591 - DNA, 891 bp, Unknown
  Unknown gut bacteria
ggagatcgggtcttcgtctgggtcaattacgcgctgctgattttgatcaccatcgtgaccctttacccgctgctgttcgtcatcagcgcgtccatcagcgaccccaaggccgtagccagcgggaaaatgatcctgttgcctatcgaccccacgttggaggcctaccgctttattttcaactatcaggagatctggacgggctatgccaacaccattttctacaccttttttggaacgctcatcaatctggcgttgacggttcccgcggcctacgccctttcccggagagactgcccctgcaagggcttcatcatgacgctgttcatgatcaccatgtatttcggtggagggctgatccccggctatctgaacatccgacagctgggactgctgaacagccgggcagtactgctgatctgcggcgcggtctccacctacaacctgatcgtggcgcgtaccttctttgccaataccattccctgggagctgcatgaagcggcgtttctggacggatgcagcgatttcggcattctgcggcggatcgttctgcccctgtcctcgcccatcatcgtggtgctgatcctttactacggtgtaacccattggaacagctatttcaacgccctgatctacctgaccagccgggaaaaatacccgctgcaggtgttcctgcgggagatcctgacgctgggacagtttgtcagcgaccagctgatgaacgccgacaacctgtccccggacgccatgcaggagctgatcaagcaggcggacacggccaatatgatcaagtacgccgttattatcgtttccaccgtgcccatgatggtgatctatccgtgggtgcagaagtactttgccaaggggatcatgatcggctctgtcaagggctga

SEQ ID NO: 1592 - DNA, 624 bp, Unknown
  Unknown gut bacteria
atgctggacatcaaacgcatccgacagaatccccaggaattgatcgacgcgctgaaggcgcgcaataaggacatctctctggacactttcctcaaggaagacgaagaacgccgcgccctgatggccgaggtggaggagaagaaagccctgcgcaatcagacctccaagaagatcggtctggccaagaagaacggcgccagcgaagaagagaccgccgccatcatgcgggaaatgcgcgaactgggcgacgtgatcgacgcgctggatgaaaaaatcaacgaactagacgcgaaaatgcagcagttcctgatgagcgtgcccaacatccccaacccccgcgtgccgatcggcaaggacgacagcgaaaacgtggaagtgcgccgttggggcacgccccgtcagttcggctgggagcccaaggcccactgggacatcggcaccgatctgaagattctggactttgacaccgccgccaagatctccggcgcgcgtttcaccatctaccgcgggctgggttcccggctggagcgctccatcatcaacttcttcctgaacacccacgtggacgcgggctacgacgaggtctatccgccctacatggtcacccgcgccaccatgaccggc

SEQ ID NO: 1593 - DNA, 972 bp, Unknown
  Unknown gut bacteria
atggtcaagagtactgtacgcggatatgatatttacattctgaccgacgtgggagcctacaacaaaacctatcagatgtacggcaaggaggtgcccatgtctcccgacgatcattttcaggatctcaagcgcatcatcggcgctatcggcggccgcgccaagcgcatcaacgtcatcatgccctacctgtacgagggccgacagcaccgccgctccacccgggaaagtctggactgcgctcaggcgctgcaggatctgcaaaatttgggcgtgagcaacttcatcaccttcgacgctcacgacccccgcattcagaacgccgtgcccctgatgggctttgacagcgtccgtcccagctatcagattttgaaggctctgttccgcaaggataaggatctgcagctggatcgggagcacatgatgatcgtcagccccgacgaaggcgcgctggatcggaacatcttcttctcctccgtgctggggctggatatgggtatgttctacaagcgccgcgattacacccgcatcgtcaatggccgcaaccccatcgtggctcacgaatatctgggagacgatgtggagggcaaggacattctggtgtcggacgatattatttcctccggcgacagcattctggatctggcccacgagctgaagaagcgcaaggccaaccgcattttcgcttccgccactttcgccctgttcaccaacggtctggacgccttcaacaaggcctacgaggaaggctacatcagccgcgtgatctccaccaacctgacctaccgcaccgacgaattgaagaacgccccgtggttcatcgaggcggacatgagcaagtatatttcctacatcattgccagcctgaaccacgaccgcagcctgagccgcctgctgaatccctacagccgcatcaagaacctgatcgagcggtatcacgagcagcagaccgccgccgggttccgtctggtgtga

SEQ ID NO: 1594 - DNA, 1671 bp, Unknown
  Unknown gut bacteria
ctgcgggcgggcaacgagcgcctgacggacgattttctccgttcgcagggctttgacggcacggaggagcagctgcgttctttccgccgggacctgctgacctacgctgtcgaccccatgcccgatgtgttttccgctttttcttctgaaaaaatgacggacagcttctatgcgctgggttcgcctctgatgaatcagatggagcgcttcgccggggacggcggcgcactgttggaaaatccgggccgggtggagcagatgagcaaggcgctgcaggacttcattgcggctttccatcaaaagaaacaggaaccgcccgccgaatacagcgccgtggagaaggacgacgattcgccgctgttctacgccctgcaaaatctggacacgtcccggctgtcggtcatcacctgcgacccggcggcgctgcgccgccttactggcacagacgtcagcggcgcgccggtggattatctggaaaaaattctgcaggaacgcggcgtattcgatcagggcctcatggtgggactgtacgtgatgcagctggattacatggggcaaatgaccagcttcggcgcggcggactttgcggagccgctgctctggggacggcccgactatgcggaaaaccgaaccactcagggggctatgcccatgccccggcttctgtatctgctggccgtgggccagcctgaacaggtacgtgcctatacggaaaaattgaatgcgctgctggatgcggacacgtctttgcagggaacccgcggcccggaaaaggggcagctttgctacgcggcccatggagaaacagtgacgcaggagccgttttcgttcttctatgaatacacggaaattcagcgcccctcggcggggctgtacacgcagctggcggacggcttcatcgtggagacggagcaaggtacggtcagccgggaaaatggcctgtacaccgtgcgactgacaggccgggcaggcagcgaagggatcacgctccattggccccttcaggcagtcgagggcgcggaaacgctggatttgtcccaactgacggggacgagcgtccgggcgatcgattcgctgttgctggattccgttctgcccaacaccccggaaacggcggaggacagccgggaggatcgtcaggttttgaccctgcgggataaacgatacgttttcgttcggcaggacgatcccttcgccgatggaaaggaagaaaatccctttacattgacagatattcactggaatgaagaaaacggacagctggaagtaaatcttcaggtggatcatgcaaagctaaaaagcggatattatcgccttgaggtggagacaatcctatctaataagcagattctatggccgagagtggaatggatcgaccaactgggcacggagatcaccaacagtcagatcagtacgtgggaagccttcgcccagcatttgtaccgctgcggcagacggttgaaaaacgtgcccaagcagtttgaccacgcgtggggcccggccacctccaagccttatcaggacgtggaaattcccgacttcccaccggtgtaccgggcgctgcatctgcaaagtctggtgcagcagcttcgggaaggggccaatgtggaaaacgttccgctgatccgctgcgtttttgacgtattcgtggccgatatgcccgaaccgtaa

SEQ ID NO: 1595 - DNA, 768 bp, Unknown
  Unknown gut bacteria
atgattgcaagcgtaagcacctggagcgcacatcagcagctgctgagcggaaagctgagtgcggaagcctttttgcgcctgatccgcgaggaaggggcagaaggagtcgaaatcgttgattttgactttgaaaatcccacggcggaaacgtaccagaatttttacgatcaggcggaaaaacagggcgtcgaggtaacgtgcctttccatcgagcacagcctgtgccgcatgactgaaaagcgtcggctggaggatgtggaaaaagtcagggaatggatgagactggctaaatcgctgggcgtacgaaatgtccggatctttacggggtggatggaaaacgaagcgccctaccacacacagctcgaatgggtttatgaaggaatgcgccttctgaccgatgaggcagaaaagctggatgtggatctggtgctggaaaaccacaacaacgtctgccttgctgcggaggaaattatcaggctcatgacgcagcttcgttctccacgcttgtttacctgcccggatgtgttcaattacaaaaccttcctgaatgatatgactccagtcattggcgacgacgcctttgctgaaatcgaaccgctgatccccttcgccaaaaatgcccatgtcaaaatctgcgaagcggtggacggtgagacgcaggatcggtatttggatattccccgcctgatgaacctgtttgaaaagcatcactatgacggtcctgtggctttggagcttatgtggccttacctttcccctcaaaaggac

SEQ ID NO: 1596 - DNA, 1248 bp, Unknown
  Unknown gut bacteria
atggctgtttccaatcgttgtttttatcccggtcaattgctgctgccccgggagggcacgaacctgaccgcatgggcctgtgtggcctgcgatcagttcacttctcagcccgcctactgggaggaagtggagcgtctggtgggcaatcagccctccgcattccgcatgatcctgccggaatgctggctgaacgagacggacgcacgggtccccggcatctgccgcaccatggagcagtacctgcgggatggcacgctggtccccgccgtgcagcagggctttatcctgatggagcggatcgccccctccggcgcgcgggtggggcttgtcggcatgatcgatctggaatgctatgatttccatcccgatgcgaaaagccttgtccgcgccagcgagggcaccattgccgagcgcatcccgccccgggtgcgcatccgggaaaaagcgccgctggagacctctcatgtgatgctgttgatggacgaccccatgcagtcggtggtggagccgctgtttcagaagcgccgccagctgcgcaagctctacgattttccgctgatgatgaacggcggccagctggtaggctacgccgtggaggacgcggcggacatcgacggggtctacgcggcgctggaacgactgcggcagggcgacgatcccatgctgttcgccgtgggcgacggcaaccacagtcttgccacggccaaggccatctgggacaaagtcaagcccggcctgaccccggaggagaccatgacccatcccgcccggttcgccatggtggagatcgagaatatttatgacgacgcgctgcgcttcgaacccattcaccgggtgctgttcggcgtggacggcgacgatctgctggacgagctggaagcctatgcggtgcgccggggcgaagacctgatcgacccggacgcgacgcaggatatccgcgtggtgtacgagggcaaggaagtgacggtctccattcccacgccccaccggctggcggtaggcgacctgcagaccttcctggacgaatggttgctcgcccatcccggcgcgaagctggattacgtccacggcgaacaggccgtccgggatctggtgaagggcgaaggagctgtgggcttcctgctgcccgcaccggataagagccggttcttcgagcaggtgcgggaactgggcgtgctgccccgaaagaccttctccatgggagaggccaatgaaaagcggtattatatggagtgccgcagaaaataa

SEQ ID NO: 1597 - DNA, 984 bp, Unknown
  Unknown gut bacteria
ggctatggcgcgggaacaccgcccaaggaagcggagccgtatgcgtttcgcattggaaattccttggaacggaagtcctgcagtcaactgcgcaagctgctggacttcgagggccgtggctgctatttcggcaccagaacgctggtggaggaactggaacgctttcagcccgatttggtgcattttcataacctgcatggatgctatctgcatttgccgaccctgtgccattatttggcgcacaagaacatccccatcgtatggacactgcatgattgctggccctttaccgggcactgtgcctattttgattatgcccagtgtgagaaatggaaaaaaggctgcgagcattgcccgcagcagcgcagttatcctacctgcgtagggctcgaccgttcccggcagaattacgaaatgaaaaaaagcctgtttacctcgctgccgaatttgacgatggtcgtcccctgcgagtggatgaaggaaccgctgggacagtcttttttggcaaacaggcccgttcggcgcatttacaacggcattgatcggaacaccttccatccgacagagagcaatctgcgccagaagtacggcttatcgggaaaaaaagtggtgctcgccgtggcatcggattgggatgaacgaaagggcttgcactatttgctgaaaactgcccaaaggcttggaaatgactatcgaatcgttgccgtggggctgacgaaagagcagatcaacgcccttccgccttcggtgatgggaattggacataccagcagtgcaatcgaacttgctcaatggtacacgacagcggattgccttgtgaatccgaccttagaggacaacatgccgatggtgaatctggaagcgctggcctgtggcacgcctgtggcggtatttcgcaccggcggctgcccggaggcagtggatgaaacctgcggcatcgtggtggaacagggcgacacagaggaactttgcagcgccgtccgc

SEQ ID NO: 1598 - DNA, 930 bp, Unknown
  Unknown gut bacteria
gtggatttatcgcagattatcagtcctgacgacattcgaaaccttagctacgaagaatgcgaagatctggcggacgacatccgcaccaaaatcattcagaccgtttccaaaaacggcggccatctctcatcgaatttggggatcgtagagatcacattggcacttcaccgtgtgtttcatatgcccgaggacaagatcatttttgacgtgggccaccagacctatacgcataagctgctgacaggccgatataacgaatttcatacgctgcgtacctatggcgggctttccgggtttcccaagcgttccgaaagcccctatgactgctttgaagccggccacgcctctacggctatttcggctgcggtcggcatggcgcgcgccagagatgcccggggcgaaaagcatcatgtgatcgcagtcgtgggagacggtgcgctgacgggcggtatgtgctacgaagccctgaacgactgcggcaataccaaaacccgactgatcgtgcttctaaacgataatgaaatgtccattgctcaaaacgtgggcgcattgagccaacatttatccagtctgcgggccagccatgggtggaacacgaccaagtcgcacgttaaaaaagtacttggcaaaattccgctggtaggaaagccggtgtatcgctgtatgcacgggctaagtaccatgatcaagagcgtcacgatcagcgagggcttctttcctgcgctgggcttccgttatctggggccgatcaacggcaacgatcaggagtcggtagagggcattttgcgtcaggcggaacggctggacgaacctgtggtcatccactgtatcaccaaaaaggggtatggtttcaaccgcgccgaaaaaaacgccgaacgtttccacggaacgcctcctttctatctggatgaagaaagaccctctgcctta

SEQ ID NO: 1599 - DNA, 894 bp, Unknown
  Unknown gut bacteria
atggcggagtttggtgttcggatgcagaatacctccaacttcggcaaacaggcgggtcgcagccgcacccggatcttctggggcaataccctgcgggtgctgtttattttggccgttgtggtcgtggtactgattcctttctatatcagctttctatattccatcaagacccattcggacatcagcctgaaccggctggcatggccccaacaccccacgctggaaaattacgcccgtgtgatccgggaaaacaagtatgtggcgatcggttttaaaaacagcatcctgaccactgtaccctgcacgctgatcctgctgttcaccacctccatggcctcctacgtgttggctcggaaccattccaagttctataaggtgctctattccctgttcatcagcggcattctggtgcccttccagtgcatcatgcttcctctgtatatgaatatctataatctgggactggtcagcaccaatctgggcttcattctggcccgaaccggctttcaggtctccatcagcgtcctgaccatcaccggcttcgtaaagggcatcccccgggatctggaagaagccgccggtatcgacggctgcggcaaattccgcaccttctggcagatcattttccctctgatgacccccatcaatgttactcagatggtgcttaacaccctgttcgtctggaatgactattccaccgctgtggtgttgctgcgcacagatgagagccgcacgctgccgctggcccagatcatctatttcggtgagaacatgactgaactgaatctggccttcgccttcttcatgctggccatgctgcccattctggttttgtacctgagcacccagcgcttcatcgtgtccggtattatgtccggcgctgtgaagggataa

SEQ ID NO: 1600 - DNA, 981 bp, Unknown
  Unknown gut bacteria
aaaaaagtaccgcctacctggcaggagggcggacagaccgtgtacaagatcgaaagcgccacggcggaagagttctaccaaatgaccgacgaaaacgtccgggtcatggaacccgaagcgttcaaaaaggccatattgtccgtctgctatcagggtttcccacaaaacggatcaggcctgatggaaaaatacggtctaacccgtgccaccttccgctgcattacgcagctggcggtctggtattatacggactcgctggatatttcccagcattaccagcagtatcagccgtttgatacctatcccggggcgtgggcagcttatcaggagctgattacgcccttggataccctgccgctcggttatcagctggatctgtaccgcaaccgcaatgaacagtatcagcatgtgctgtgtacccgtctggcggaaatgcccgtgcaaacgtccatccagctgaagggaatcaagctgctggagggccgcgccctgctggccaacgagttccattttatcgtcacggacgaacaaggcacggaggtctcccggggcgtcaatcacgcggatggcagcatcgccttcaactatatcgagtaccgtcacgaggacgtggggctgcaccgctataccatccgagaggtacagggcgatctgtcgaatgttacgtatgacggcgcgtcttatacggtggaggtattggtcgaatacgtagacggccagctgacggccacggcgcagggagaaccaaaactggttttccgcaatgtgtacgacgcttctcctacggcaacgccaagtccaagtccgaccgcgaccccaggcgtaactccgtctccaaccccggcccagaccccggttccgggcacgcctcctgccactggcgacgaaagtcatcctgtgttatgggccctgttggcactggccgcgctgagtctgctcggcgtacaggcagtcctgagccgaaaagcccgtaagaaatga

SEQ ID NO: 1601 - DNA, 822 bp, Unknown
  Unknown gut bacteria
gtggtatactataggcaacgcggagaaaccgaatcattcgcggaggagggaagaaacaggatgggaaagatcatatccttcgtaaaccagaagggcggggtagggaagacgacgtcggcggtcaacgttgcggcgtgcctgggcgtactgggatgccgcacgctgctgatcgatctggatccgcaggggaatgcgacgacgggcgtaaagatcgccaagaagaatctgaaatacacggtatgcgacctgctgacgggcaacatcaatgcggcggatgccgtaatacagacagaatacgacaaattatgggtaatgccggcaaacgggcggctggcaaacacggaatttgagctgtacaacggggaggagccggttttcgtcatgcgcaaggcgctggaatcgctcaagaccgtgtttgactacattatagtggactgcccgccctcgctgggaatgctgacggtcaactcgctgacggcgagtgacggcgtggtggtgccgatgcaatgcgaattttacgcgctggaggggttgtcccagctgagcaagaccatccggacggtgcacgacaactacaacagcaccctgaacatcaccggcattctgctgaccatgtacacaaagcgtctgctcctgacgcagcaggtggagcgacagatcgaaaaacactacggcggcaagctgttttccacgcccatcacgcggagcgtcaagctatccgaggcgcccggatacggcgcaccgttctattattacgacaaatccggcaagggaacaaaggaatacctgagcgttgcgaacgagctggcatcgcgcatctga

SEQ ID NO: 1602 - DNA, 1026 bp, Unknown
  Unknown gut bacteria
atgatcagcatcgtgattcctgcgtacaatgccgcggcaacagtcggacgctgtcttgactctctgctggcacagacataccgcgactttgaattgattgtcgtggacgacggttcaacggacagtacggcacagattatttccgcctatgcggagcgtgacagccggatccgcttgatcaggcaggagaatgccggagtcagtgcggcacgcaatgtggggcttgacgccgcacgcggcgacctcatcggctttaccgacagcgacgatgccgtatcgccggaatttcttgaagcactgctgtcactgtatgcgcccggcgtcctgccggttgccgatatagagcggagcgacggcgacggttcggtgctggcttcccttccgcccgcgatcacgctggatcccacgcgattgccggaggattacttctgcggcacgctcggacaggggattgccttttcctcctgtaacaagctgttttcggcgacactcctgcgggatgcctgcctccgttttgcggaggagctgactgtcggggaggatatgctgttcgtattccgctacctgcgccgttgccgggaggtacgccttacgcgccgcgccgtgtatcggtacaacattgcggaaaactccgcgatgcagtcccgccgcgactataccggagcgtatgagactgtcctgcgcacactgcgccgaccggacggagactttccgccggttgcggaggaagtgctggcaatgtgggctttggagtcctgcgttttcattctaaccaatcctgcggtttcggaacagccctacgccgcattttccgcatggtgggaaggcttcacgcgcaccggactgtaccgggctgccgcgcaggcgaccgacctgccggacatccgtatcagccgtgcgcgacgcgttctgttccggctgatgcgaggcaatcgcacgcgatccttgcacaccctgctccgtgctttccgaaaaagccggacgttcaaacatacacgccccccgcgcaaaggagatgccccatga

SEQ ID NO: 1603 - DNA, 1449 bp, Unknown
  Unknown gut bacteria
atgaaagatatttcccgcaacctgaccatgctctgtgacttttacgagctgaccatggcagggggctacttccgttccggcattggcgaccggatcgcctactttgacctgttctaccgggacaacccggacggcggcggatatgccgtggtcgcaggactggagcagatcgtggactacatccggaacctgcatttcaccgaggaggacatcgcctttctgcgcggcaagggctgcttcgacgagccgttcctcgattacctgcgcagctttcgttttaccggcgatatgtgggcggtgccggagggaaccttcgtattccccggtgaaccgctgattacggttcgcgctcctgcgatacaggcgcagttcattgagacctaccttttgatgatcgtcaaccatgagtcgctgatcgctaccaaggcggcacgcatcacccgcgccgcaaaaggacgggcggtcagtgaattcggttcccgccgtgcgcagggggcggacgccgccattctgggtgcccgcgccgccttcatcggcgggtgccttcccaccgcctgcactctgtcggacgaggtgttcggcgtcccggcgggcggcaccatggcgcattcgtgggtgcagatgttcgacagcgagctggacgccttccgcacctactgcgaaatatacccgcacaatgcgaccctgctcatcgacacctacaacgtgctggactccggtctgccccatgccatcgcggcgttcgacgaagtactgcgcccgcgcggcatcacgtcctgtgcaatccgcatcgactccggcgacatcacctacctgactcagaagatccgcgcccggctggacgaggctggctggcagacctgcaaaattgtggtttccaactccatggatgagtacatcatccgcgagctgatccggcagggtgcctgcatcgacgccttcggcgtgggtgaacggctgatcactgccaagagcgatccggtgttcggcggcgtctacaagctgtgcgccgtggaagcgccggacgggacgattattcccaagatcaagatcagcgaaaacgtttccaagattaccacgccgcacttcaagaaagtctatcgcctgcgcggacgggataccggcaaggcggaggcggatctcatctgcctgcatgacgagaccgtggacgattcccagccgctggaaatattcgacccgcagaacacgtggaagcgcaaggttttgacagactttacggcggaggaactgcttgtgccggtcttccggggcggcgagctggtatacagtctgcccacactgcccgagatccgcgcccgctttgaggcggagtgcgacgggatgtgggaggaggtacgccgcttcaccaacccgcacaactactacgtggatctgtcccagaagctctgggatatcaagcaggtcatgctcaacagccggacacactga

SEQ ID NO: 1604 - DNA, 588 bp, Unknown
  Unknown gut bacteria
atgaatcttaaagagctgtacctggagatctaccggagccgcccggaaagcattctgcggttcatgctggtcagtctgtttgtctggacactcctcactctgctgttcgggagcctgcgcgcgacgcgacgcggctggatgtggttcaaccgcatccttgccggatgcgcggtgctgggtatcctgggtataacggtgttttaccggtttatcggcggcggcggcgaggtcggcatcaatctggtgccgttccgcgtgccggaggaggcgtggcgggcggaggaatactaccggatgctgctgatgaatgcattcctcttctttccgctggggctgtcgctgggtaacgcgtggcgcccggagcgccgcatcctgcgccgctttggacttacggttctgtgcggactggcgctgagcctcttctgcgagacgatgcaaggtcttttcatgctgggaacggcggagaccgacgacctgctgatgaatacggcaggcgttgcgctgggcgcggtcagtgcgcttgcggcgggggtactgtcactgccgatccggtggttgcgcaagagcggggagactttccgaaaatga

SEQ ID NO: 1605 - DNA, 1023 bp, Unknown
  Unknown gut bacteria
atgtataattattcacgcagaaaggaatatttcatgattgaactgcggaatctgaataagaccttccacacgcaggacggggcgctgacagcactggatgacatcaacctgacggtgcaggacggcgagatattcggcatcatcgggttgtccggcgcaggaaagtccacgctggtgcgatgtatgaacctgctggaacgaccgacgcacggcgaggtgctggtggacgggcaggatctgatgaagctctcccccgccggcttgcgggaggtgcgccgcaacatcggcatgattttccagagctacaacctgctggagcaacgcacggtactgcgcaacgtgctgtacccgctggagctgacgcacgaggacaggcggacggcgcgcacccgcgccatgcagctgctggagctggtgggacttgccgacagggcgtccgcctacccggcacagctgtacggcgggcagaagcagcgggtggcaatcgcgcgggcacttgccaccaacccgcactacctgctgtgcgacgaggcaacctccgcgctggatccgaccacgacggactccattctggcgcttctgcaaaccatcaaccgcacgctgggcgtgaccgttgtggtcatcacgcacgagatggcggtggtggatcgcatctgccaccgggtggcggtgatagacaacagccgcatcgtggaaatgggcgcggtggatgcgatattcgccaacccgcgttccgccattgcgcgggagctgatcctgccgcacgtcaaggtggcggcgaccgtccggggcggggcgcacgtccggctcgccttcaacggggagtctacctacaagccgctggtgtcggcgctgatcctggaaaccggcgtcccggtcagcatcctgtttgcggacacgcgtgacatcggcggcaagacctacgggcagatcctgctggagcttcccggcgaggatcgccttgcccagcgcgtgaccgcgtggctggacgccaatttcccgtcttacagtctggaggtgtga

SEQ ID NO: 1606 - DNA, 1200 bp, Unknown
  Unknown gut bacteria
atgatattcacgaccgacaggaccggacggcacgccttcccggtctatcttgataacgccgccaccagctttcccaagcctccctccgtccttcgggcggtggaggcttgcctggaacgttacggtggcaatccaggcagaggctcgcacagacttgcgctgcgcgccgccgaggaggtatatgcctgccgtgtcgcggcggcggatatgttcgggctgagcgatccggcacgtgttattttcacgcaaaataccaccgccgcactcaatcttgccatcaagggcattttgcgacgcggcgagcgggctgtctgctcggacatggaacacaacgctgtctttcgtcccctgttccggctggcaggtgagggaggaatttcctttgacagatttcagaccttttctgctgtcccggagcggacagacgcgatgctcctgtcatcactggagcatgccctttcccgtccaacgcggctcgtcgtgtgcgcgcatgcctccaacatctgccccgcaacgcttccgcttgccgccatcggcaggctgtgccatgcgcacggtgcgctgtttgtggtagatgcggcacagtcagccggcgtactggatatcaacatggaggagatgcagatcgacgcgcttgctgttcccggtcacaaaggattgtacggtcccatgggggtcggtatgctcctgctcggcaagggaatccgaccggacaccttgcttgagggcgggaatggattggactccctgtccgggggcatgggagacgatctgccggagcggtacgagcctggcaccctgcctctgcctgccattgccgggttgcgcgcgggcattgaattcgtgcgcagggtgacaccggaagcaatccgcgaaaaggaaacggcactgggcgtttttctacgggatgcgttaacggaagtgccgggtgtacacgtggcggtgcctcatctggccgggggaaccgtgctgtttcgggcagacggcgtatcctccgaggacatcgccgcccgattggatgctgctggctccggcatctgtgtgcgccccgggtttcattgtgccgcgctggcacaccggacgttgggaactccggagggtggtgctgtccgtgcttctttcggctggttcaacacccgccgcgatgcggagcaactgatccagtcgctgcgcggtggcttacccgggcgaaacgggtaa

SEQ ID NO: 1607 - DNA, 789 bp, Unknown
  Unknown gut bacteria
atgaaaaagctgtttgcggttctgcttgcagccctggcggcgctgacgctgttcggttgccagaacacggagaaggatcccacggggagtgattctgcgactgtcggtgagacgactgccgataccgtgaaggtgatgacctacgctgagttcctcgctgccgaggcggatagcaaggtaacggttgaggcgtatgtgcaggcaaagcagtcctggtggaaggacgacaagggcgttggcaaggctaccctgtacacgcaggatcaggatggcgcgtatttcatctacgaactgcctatggaggaggatcagtacaacaagctgaccaccggcaccaagattcgcgttaccggcagcaaggcggtgtgggaaggcgaaatcgaaatcatgaacggtacgctggataaggtgctggagggcaattatgttgctcccgctgtcgatgtgaccgctaagctgggcaccgatgatctggctacttacatgaaccgttttgtttccttcaagggcatgactgtggctgccaagaaggacgccaacggcaacgatgttgcgttcctgtacaagtggaacggcgccggtcaggagggcgatgacctgtacttcgacgtgacgctggacggcaagacctatacctttacggttgagtcctacctgtgcggcaaggacagcgaggtctacaaggcggtcaaggcgctgaaggtcggtgacaagatcgacatggagggcttcctgtactggtacaacggagccaatccgcacatcacatccgtgaaggctgcgaagtaa

SEQ ID NO: 1608 - DNA, 513 bp, Unknown
  Unknown gut bacteria
atgaagaagctgattctcatggggcgcgtggcggctggcaagactaccctgacgcaggcactcaagggcgagcagctgcactactgcaagacccagtatatcaattactacgacaccatcattgacacccccggtgagtataccgaggttcatgcgctgggggcggcgcttgccgtctactcctatgaggcggacgtggtcggcatcgtcatcagcgcaaacgagccgttctgcgtttttcctcccggctgtgccgccatggtcaaccgggatgtgatcggcattgtcaccggaatcgacaagccggatgccaacgtgccgcaggcaacccgctggctggagctgtgcgggtgccaccggatattctacatcagctcctacaccggtcaggggctgtcggacatcatggattatctccgggagccgggagacgcgccggcacagctgcagacggcatccccggaggacagtgcatcccgtaatataccgaaaggacaggaacgccatgcgtga

SEQ ID NO: 1609 - DNA, 687 bp, Unknown
  Unknown gut bacteria
atgacatacgtagtatccgatctgaacggacatcttgatgtattccgcgacctgctgaagaagatcagcttcagcgaaaagcgggatgtgatgtatgtgctgggggacatcgtggactatggtccgcaacccatggaactggtgcaggatctgagcacccgcatcaacgtctacccgattgcaggcgaccgcgactacactgccgcccgcctgctgacggcatacgagaaaatgctgaaaaccggggagagaccggcggattttgcggaggagatggcagactggatccgcgacggcggtcgcaccactatggaggagtaccgccagctggatgatgacgaccgcgagggcgtgctggattatctgacggatatgccgctgtatgaagaagtgacggttggcgggcgggactacctgctgctgcatcgcggcatatacgattttacgcccaatctggatctggacgaactggcaccggaggacttcttctccgagtcgccggatcctgccgacacgtattttacggacagaatcacggtcgtggggcatatgcccaccgccgagacgcaaaataccgagccgcgcatttaccgcgggaacggcattattttcattaactgcggactggcgcagggcggcagactcggctgcctgcggttggaggacggagcagaattctatgtctga

SEQ ID NO: 1610 - DNA, 1821 bp, Unknown
  Unknown gut bacteria
atgatccggcattccacagacagacagttttctctcggcgccggctgcgtccggctggacggtccggcggacagcaagatccgtcttgtgtgcgagggcacgctcaaaaggattgatatgcgggcgttggcggattatttccgcaacaccgccgaccagttcgccaccggcgagttctggggcaagctgatgcgtgccgcgtgcatgctgtgcgcctacaccggcgatgctgacctgcggcgcatcgtggacgattctgccgctgacatgatgggcattcagcgaccggacggatgtctctccaccgttccggatgcactccagccgcagggaacgcacggctccgacctgtgggagcgcaagtatgcactgatggggttgctctcctactatgagctgtccggctctgcggcggcgctggatgcctgcgtccggctggtgcgctacaccaatacgcaggtcggtgacccgccccggacacccatcaccgaaacgggatgggcattctgcggcattgaatcctcctccatcctggagcctgtcatgcgggtataccacgcgaccggggaaccggcggcgctggagctggctacgcacatcgtccggagcggctgctgcgggcgcgagaatatttttgaggcaatccgggcaggaaaatcgccctaccggatcggggacaacgggaatccgcgcgagagtatcgcaaaggcatacgagatgatgtcctgctttgaaggtctgtgcgaattttaccgggcgacgcgtgatgcgcgcgacctggaaacggtcaggctgttctgggacaaggtcagggaggaggagatcacactgctcggctccggcggggcggatgcgcccttcaatctcggtcccggaaccggggaacagtggaatcggacccgtctggagcagaccaaccctgccattgatttgatgatggaaacctgcgtgacggtgtactggatgcggctgtgccaccagctcctgcggctgacgggggaagtccggtacgcggacgccatggaggtcagtctgtataacgccattttcggtgcgctccgcccggacggcgccttctttgaatacttcccgcgcttcaacggagcacggaacccgcgcgtcaattattccttcaacatcaaaggctttgacctgtcctgctgtaccgccaacggtccgaccgggctggcgttggcacctgatatcgcctttgcgggcacgccggacggcgttgccgtcaacctgtacatgacgggatgcgcccgcgttccggttccgggcgggcaggtggtgctgtccatgcagtccgagtttccgcgcgtcgggtacgcccggctgacaatcgaagcaggcgacctgcccgccgggacgccgcttgcgctggatctgcgcgtgcccggctatgcggagcatttcgccgtcctgccgggcggcaatcccacacggatgctgaccggcgtgccgggcacatacctgcgcatagccaataccgtgtccgacggggatgagttcattatttcgctggactactccccgatccggcacgccgccccgcacggcagtgaccgcgcgggtgacggattcgttgcctttacctacggtcccattctgctggcgcgcgacagccgcgattgtgccgatccgcttgcgccggttccggatgccgggatcggggactggcgcgtggagctgccggagcgtccggggcttttgaccgcgcacctgcaggtcggcggcgaaacgctcacgttggtggactatatgtccgccggctccgcttgggacgacggtagttttgcaagctggctgccgatacggtaa

SEQ ID NO: 1611 - DNA, 1413 bp, Unknown
  Unknown gut bacteria
ttgtatgatatactatatgtgatcgtgagcccctaccgccgcaacagtcttgtcagaaagagagaggaggcactcatgtcccggtttatcagaaagcacccctatcagaaggttcctgcaatcccgccattcttgcgcaatcacctctggcaaccgctcaaggcattgcttgcctccttagagctgtggcttctgatccccattacgctgcacagcccggacggtgtccgctccatgttcacagtggcgtacggcacctgggcagacggaatgatccttgccgtccagctggtttttctgtatattctgactcacttttttgattcggttgacgacatcaccttcgtggactactgcaagtcgccggttcccctcctgcggcgctactcgtggtggctgtcggtgggactgtgcacggtcggatgcgccccgtcgctggcggtggggatcaatctggttctgcggaacacggcggcggcgaaggcggcggcaccgctctacacgctgtttgtatacctgcttgccgggctggtcgtatgcggcatccggctgttccagatatggctgctgcatcggaagtggagccgtcagcggctggtggaggacggctccacctattggccgagactgcaaacccgcatctttcaggcaatcgtcctgcctctttcgctgttcctgttcgtgcggctgcttctgaagacaggctacctgtacattatcccgaatctcatctgggcagtgctcgtgctggtcaggcgggagcgtgccgcactgccgatcctgctggcggcagtcagcttgtgcctgctgattgtaggcatacgtctgctctgtgcgtggcgcaagcggaaacagctcctcgatcagttggaagagctggcacacagcggacttctgagctatcgcctcgtggggcaccccttcctgtcgcttttgtcgcagcggttcctgttcgggctgttcgtcgtagacacacgcggaaaccgctggcgcgtcggcattgcctcctgccggcacaggtcgcggccggcggtcgcctgtgaggggcatctgctccggttccgacacacgttccggttccggatggcgcccatcatgaacgcctacggagcctatatgcatcagggcgagcagatgggcgtccggtacaccaactaccccgtgcttttccctgtcggcactttcccggatgacctgcccgctccagccaaacagcgccggggcaccggcagacggcagtatgagccgaccgaatccgaaatcatgctgctgtcaccgccgcccgcacagctatatgtcagggcgccgcaaggcttggcagagctggacaacggcagcgaggtatacggctatcaggtctggagcggcggtgcgttcttccgctttctggagcgtatgtacaccggggactga

SEQ ID NO: 1612 - DNA, 720 bp, Unknown
  Unknown gut bacteria
atgggcttcggattgttggtggcggggtactttaccctgaccttcctgtcgttcgcggtgggggattacgctttcgctttctatgcagtcggcggcgctgtgagctttatagccgccggaaagctgtacgagtacaagcaccgtttcggtataaccgtggcaacctcgctcgggtggatcgcactgggcgtgtacggtgctgttgcgtttctcggcgaggtgttcctgtgggagctgcctttgccggggatggacgcgaccgttccgaaccttgtgctgttcctccttcagctggtgcatacggcgggactgctgtccgcgacggactgccttgcgcgccaggttggcgcggagaaagtgaagagtgccatcccgtgggacgccgggatactggggacgtgggcggtcggacaggtcatcctgcttctgtttccggcggtcgccgcctttgagggtcagaccgtgaccaaaatcgtcctgctgatccagcttatcggctatctcatggtctgcctgacgttgctgcgtgcctaccgcctgatctgtccggcaggtgaggaggaaaacgcgccgcgcaagcgctcccgctttgctctgatcaaccgcatcaacgacaagttggaggagcgttccaagcgggcattggaggaaagcatggagtaccgccgtcagcgggaggaatcccgccgcacgcgccggaacggaaaaagaaaaaagtag

SEQ ID NO: 1613 - DNA, 1839 bp, Unknown
  Unknown gut bacteria
ttggagtataatagtgaactgcttaacgattttgagaatggcaccgcctaccgtgcgcggtgcggaaaggaatcactcatgttttttcggcttctgagaagcgtccgggaatacaagcgtcctgccatcctgacactgatcctgatggtgggcgaggcggtcattgaaacggctctcccttacattaccgccacttacctcataaaccggattcaggaaaagggtgcggagctgagcctgacaggagacattcttcccgtcgggcttctcatggtggggcttgcactggtttcgcttatctgtgcggggctgggcggctttacctgcgcgcgtgcctcctccggctttgccaagaatctgcggcacgacatttttcaaaaggtgcagacctttacgtttgccaacattgacaaattctcctcctcctcgctggtcacgcggatgaccaccgatgtcgccaatgtgcagatggctttcatgatgctgatccgcacggcggtgcgcagtccgctgatgctgattttttcggttgtcatggcgactgtcatgggcggttggctggctttgacatttgctgttgtcattccgttgctggcgctgggattcctgctcatcagccgcaaggcgatgcccgccttccaccgtgtgttccggaagtacgacgccctgaacgaatccattgaggaaaatgtccgcgggatgcgcgtggtcaagggcttctcccgcgaagagtacgagaagaaaaagttcgcgggcgcggcggatgccattaccgaggactttaccaaagcggagcgtatcgtggcgttcaataccccgctgatgaacttctgcatgtacttcaacatggtgttcatcctgctgatcggttcgcttctggcaatcaagcatcccgaaacaggcatcaacatcgggcagatatcggcactcctgaactacgggatggcagtgctgatgtccctgatgatgctctccatgatttacgtcatgctcaccatatccgccgagtccatgcgccgcatcgtggaggtgctggatgaggtgccggatatgaaagcggcggctgacccggttgataaaatcccggacggatcggtcgatttcgagaacgtcagcttcaagtattccgcgtcggctgaagcatatgccctggcggacgtgaacctgcacattccgtccggcgcgacagtcggaattatcggcggcaccggatcctccaagtccacgctggttcagcttattccgcgtctgtatgatgtgagcgaagggacaatccgcgtaggcggcgtggatgtgcgggactacgatctgaacgtcctgcgcgacggcgtagccatggttctgcagaagaacctgctgtttgcgggaaccatccgggaaaacctgcgctggggtaatccggatgcgaccgatgcagagcttgaggaagcgtgccgcctggcgcaggcggatgagtttgtccgagccttcccggacgggtatgacacgcatatcgagcagggcggcaccaacgtgtccggtggtcagaagcaacgactgtgcatcgcgcgggcgttgctccgcaagcccaaaatactcattctggacgactccacctcggctgtggatacccggacggacgccatgatacgggcgggttttgcctcctacattccggcgacgaccaagatcatcattgcccagcggatcgcatcggtcgagaatgccgacatgatccttgtcatggacaacgggcgcgtggtggatatcggcaggcacgccgaactgctggagcgcagtccgatatacagggaagtttacgagcagcagtcgagaggaggtgagcaggatgaagcataa

SEQ ID NO: 1614 - DNA, 1986 bp, Unknown
  Unknown gut bacteria
atgacacgcgccgcgcgaagcaacgggcggtcccccgcgccgtactcgctcgccgccaaaacagccgccgttctcctgctgaccgtgacggctttccttaccgccgtctccggcgtgggcatcgggctgtcggctgtgtatggcatttacgacggcgtatcgccggagcagctgctcgccgaccttaccgaaagctaccttgaccgcgccatgcatgacggaacgaactactacctgtccgatccggacggaatggacagctggatacgcgcatggagcggactgtactaccaggtcaaggacggggacggaaacgtgctttcgggcaactatcagggcgagacgggactgtcccatctggaatggagacttacggtgccggattcgaacaaccctgccgtgaccaaagacgttaccctgcacctctgggcagattccggcgccatgcacacatggtatcgcggaatgtaccggagcctgctcttcctgagccgctaccgcgttacgaacgtagcggtgtgccttgccggccttgccgcctccatatgcctcctggtctttctgctgagcgcggcaggcaggcatccgggcgaggacggcgtgcgcgagggtgcgatagatcgcgtcccctttgatctgttcacctttttcgtcggtctgctggaggcggtgatgctgctgctgttgctgaccgcactgccgacggtcggcggcagtatgttctcggcatccgcagtgctgattattgccgtttacatccctgccatgctgctactcatcgggtatgccatgagtctggcggtacgcatcaaagcgggaacggtattccggcatacgcttgtctggatatgcctgcgggctgtcgggcaatcgcttcgctggctgttccgccgcacgcgcgccgccttgcaggcaatcccccctgtccggcgggcgttcgtactcctgctcgtcctgctggcactcaatctgtcggtgggctatgcgctgatggtaggcgggtacgccgggatctttcttctgctggttcttctggagctggtggtgctgggcgcgtgcgcgctccgctacgcgctgggactgcgccgtctgcaggacggtgccgcccatctggcaaagggagagtttgagtaccgcgtgagcaccgccggactgccggatgactgccgggtctcggcagagaacctcaaccgcatcgggcaggggcttgccgacgcggtcgagcagcgcatgaaaagcgagcatttccgcaccgagcttatcaccaacgtgtcccacgatatcaaaaccccgctgacctccatcgtgaactacgtggagcttatccggcaactctcccccacggacgaaaccctgtgtacctacattgatgtgctggacaggcagagcacccggctcaaaaagctgattgatgacctgctggaggcatccaaggcgtcctccggcgtgctgaatgtgattcctgccccgtgtgaggtgggcgtattgctggagcaggtgcagggggagtacgccgaacgtctgcacgcgcacgacctgaatctcatcgtgcagacaccggacaagacgttgaccgtgctggcagacggcaggcacctcgggcgcatttttgacaacctgatgaacaacatcatcaagtatgcccagccgggcacccgcgtgtacctcgacgcccgggcagggctggatcctgccgctccgggcgggaggcgaccggtcgcggtcattaccttccgcaacgtatccgccgagccgctcaacatccccgccgaggaactgctggagcggttcgtccggggggacgcctcccgacacacggaaggctccgggctggggcttgccattgtgcaaagcctgaccgagctgcagggcgggagcctgcagcttgccatcgacggcgacctgttcaaggtgcgccttaccttccccctgtacacgccggcggatgccgcccaggcggcttcatccgggaaggaaaccccgtaa

SEQ ID NO: 1615 - DNA, 924 bp, Unknown
  Unknown gut bacteria
atggaaaaccggaaacgggaaaaaggcgcgccttttattgagatcaaggatctttcctatgcctaccccggtgaggagggacgcggacagcaggtactgtcacacatcaatctgacgatccgggaaggcgagtacaccgtgattctcgggcataacggatcgggtaaatccacgcttgccaagctcatcaacctggtcatcgacgattacacgtatgcggaagggcagatactggtcggcgggtgggacgttatggcggacgacctgaccgaggaagacctgctggagctgcgcagacaggttggcatggtgttccagaacccggacaatcagctggtcgcgaccattgtcgaggaggacgttgctttcggaccggagaatctcggcatacccaatccggagttgcgggagcgggtggatgccgcgctggcgacggtcggtatgagcgagtatgcgcaccatgagccgcaccggctgtccggcgggcagaaacagcgcgttgccatcgcgggcattatcgccatgaaaccgcgctgtatgatcttcgatgagtcaaccgccatgctggatccgttggggcggcgcgaagtgctcgccacgatggaaaagctcaaccgtgaggaggggataactgtgctgtccatcacgcactatatggatgaggcggcgcgggcggatcgcgttatcgtgctgtcggacgggcagattctgctggatggcacgccgggcgaggtgtttgcacatgcggacacgttgcggacggcaggattggatgtgccgcaatgtaccgccgccgtgcagtatctgcaggcgcgcggcgtgcgcatccggggggatctgaacacaccggagcagtgcgccgccgcactgctggatgcatggcgtacgcgcggaggcgcaggcaggacacaggcaggaaagtaa

SEQ ID NO: 1616 - DNA, 1284 bp, Unknown
  Unknown gut bacteria
atgaagatcatggatattcaaaaactgcttgggcagaatcgggaaatcagcggattccggatcgtatcgaccaagaccgactcctacgagctgttctttgtgcaccggaggctggaaacggttcgtgctaccgacacggacaccgtcagcgtaaccgtttatgtcaatcacgacggcaaggtcggcgattcgaccttctcggtttacggttccatgggtgaagcggaagtcgcggatcgaatcgccgctgccgccgagcgtgcccgtttggtgttcaacgagccttacgagctgccggagggcggcgtgcttgaggcggagttgccctccaacctccgggacgccgagccgcgtgcgcttgctgccgggattgcggacgctgtgttcgccgccgactgcgtggagggtggttccatcaatgcaaccgaaatctttctgtaccgcgacacggtacgggtcgtcaacagtcgcggcgttgacaagacgcaggtcaaataccgcgccatgatcgaagcaatcccgactttcacagagggggaggattccgtcgagctgtacgaagcgtaccgctttaccgattttgacccggctcgcgtcacgtcggagattgccgaaaaaatgcgggaggtttccctgcgtcgccgggcgcaaaagcctgccacgcccatgaccgcccgcgtcgtactacgcagcaaggaaatcggcgagctgatgtccgagctggcaggcgacctgaattatgccaacgtgtacgcgcaaggtaatcttcacaaaaaaggggaagccttacagggggatacgccctccggcgacccactcacgctgacgctttgcgggcaggtacgcggtagcggaaactctgccttctttgacggagacggcgtcgcgctgaccgatacaacggttattcggaacggaatcgtttctgcgtactacggcacgcaccggtttgcctcctacctcggcgaaccggaaaccggcgacctgccctgcctgcggctggcgcccggcagtctgaccgcggacgagctgaacgcagagccatggatcgagtgcgtttccctgtccggattgcaggtcgatctgtacaacgattacatcggcggcgagatacgactggcatatctccaccgggacggcgaatccctcccgctgaccggcatcaccatgagtgccaaactgtctgacgtgctgggtagcctgcgcctgtccgatacgacatctgtcaacgacaactacgaaggtcccgacagaatgctcctgcgcggcatggcaattctgtaa

SEQ ID NO: 1617 - DNA, 663 bp, Unknown
  Unknown gut bacteria
gtgcagctgtttccccaaagccccatactgaaaggagtctatcccatgcccgagatcaatccgcaggaactgaaggtggcagagaaccgccgccgcttcaccgagatttaccggagcaccgtcacgcgcgagggcgccgaccggctgttcgcctacctggagagcacggatttcttttccgcgcccgcctcaacccgctaccacggcaactacgagggcggactgtgccagcacagcctgaacgtgtatgactgcctctgcgacattctggcgcgtccccgtatgcaggaggtgtacggcatccgctactccgacgagagcatcgccattgccgcgctcctgcacgacctgtgcaaggtcaacttttacaagaccagcttccgcaacgccaagaacgagcagggcaagtgggagcaggtgccgtactacaccattgaggacaacctgccctacgggcacggggagaaatcggtgtacatcatttccgcctatatgcgcctgacgcgcgacgaggcgttcgccatccgctaccacatgggcttctccgccaacgatgaccccggcaacgtgggcaaggcgctggagatgttcccgctggcgtatgcgctgtgcgccgcggatatggaggcggcgtacttctgcgagggatcgccgaaaaagtaa

SEQ ID NO: 1618 - DNA, 1053 bp, Unknown
  Unknown gut bacteria
atggcgatggacggaaccgcaggaacagacggcgggattgccggagttgcggagtggctgacgcagcgggaggaacagctgctcggtccctacgccgcgcgcagcgcggattcacgcggacgggcgcgtccgcaggcaccgtccccgatgaggacggagtatcagcgcgaccgggaccgtatcattcactgtcaggcgttccggcgtcttatgaacaaaacgcaggtgttccttgctccggcaggcgaccattaccgtacccggctgacgcatacgctggaggtttcgcagattgcgcgtaccatggcacgtgccctgcggctcaatgaggatctgaccgaggcggcggcgctggggcacgatctgggacatactcccttcgggcacgcgggcgaggcggcactgcgtgcgtgctacgacagccgctttgcccattacgagcagtcgctgcgcgtggtggacagactggaaaacgacggacgcgggctgaatctgacctttgaagtgcgggatgccattgtcaaccacaccggtgagcacatggcagccacgctggagggcgttctcatcaagtatgcggaccgcatcgcatacatcaaccacgacatagacgatgcctgccgcgccggattacttgaccccggcgatatacccgccgatatctgccgggtgctgggggacagccacagcagccgcatcaataccatggtgtcctcggtcgtgcgggcaagtatggatcgggacagcatttccatggagccggaggtgcaggaggctactatgcagctccgggaattcctgtttgagcaggtctatctcaacccgagggcaaagggacaggaaagcaaggcgcaggagctggtcaagacgctgttcggctactatgcgacgcatcccgaccggatgccggaactgtaccgccgccttgctgccgagggggaaccggtggagcgatgcgtgtgcgatttcatttccggcatgaccgatcggtacgcgattgagacatacgaggagctgtttgttccccgcgtctggagaggactgcacgaatga

SEQ ID NO: 1619 - DNA, 1224 bp, Unknown
  Unknown gut bacteria
atgcagaatcgggaggaatctggcatgaaaaaggttagactcggtatcataggcatgggtaacatgggaacaggacatctggatcacacgctgacgggacgtacgcccgaaattgaggttacggctgtggcggataccaatcctgcccgtctggaggcaacgagggcgttgctgaacaagcggcgggcggattatcccgacctgcagcagccggatatcgcgctgttcggaacggcggaggagatgctgaactccgggctgattgatgcggtggagattgccgttccgcactacgatcacccccggtacgcgattgaggcgatgcgcgcgggcattcacgtcatgtgcgagaagcctgcgggtgtatacaccctgcaggtgcgggagatgatggaggaagcggacaggcatcccgacattgtgttcggtatgatgttcaatcagcggacaaatcacgtctaccgcaaaatgaaggagatcatggattccggcgcgctggggccgatccggcgcaccagctggattattaccaactggtaccggaaccaggcgtactatgattcgggtgcgtggcgtgccacgtggtcgggcgagggtggcggcgttctgctcaatcagtgcccgcataacctggacctgtggcagtggatttgcggtatgccgcgccttgtcgatgtccggatgcactttggcaaatggcacgacatcgaggtggaggatgacgtgacagcgtacgtggagtacccgaacggcgcgaccggaacctttattacctcgaccggggatacgcccggcacgaaccgttttgaaatcgtgtgcgatggcggcacactgaccacggacggcggcacactgcatttgaccaagttggaggtgccggagtcggtgttcacgcgggagaataaaacgccctttgccagcccgaaagcggcttcctgcaacgtggaaacggacggcaaaaacgagcaacacgtcggcgttatgaacgcctttgccggggctattcttcgcggagagcctctggtggcagacggcagggaaggcatccggggactgactatttccaatgccatgcatctgtccgcgtggacgggcaagccggttgaactgccgctggatgagcatctgttcctcaatctccttctggagcacgtcaagacgtcccgccgtaaagagggcattgagtcggtcttcgcgtctaccgagggaacctacaacgcgtaa

SEQ ID NO: 1620 - DNA, 789 bp, Unknown
  Unknown gut bacteria
atgaaacgcattctttctgttgccctgattctgctgctttccgcctcaacgctggcatcctgtaacccggataccggctcggaatccggcacgactgccgtaaccgatgcgaccggcggatccgtgacggagaccgcgaccgaaacgcagaccgaaatgcccaccgagaccgtcacggagcccgggacggacgcgcccacggagcctccgaccgaggcttccgccgagccgtccgataccgaggcgcccgacccgctcgagacgcccgtgcgcgtcggaaccggctatgacggcaagacagcctgctatgacggcagactgcgccatatgtatgagtccttctcgaccagctacggcggaacctttgattcggtgcaggaagcgatggacagccttgccggaatgggcggcgctatcagtgcggcttttaacggtgacatcgggctttgcctgtctgtcaaggttccggatgacggcaagaagtacatcctgtactacaacttcaacaactgcgatttcgtgttcaacttcggctgtacgtttgacgacgggaacggcggctatgcgtactactcctcactcaatattctggacgatatggcagaggatctggacggctgtcatgtgtacgtctggagcgaggaggaaggtctggagcccggttactacctcatgacatgggtcggaaacgggaagggaaccgtcggtcgcaactaccgctacgataaggagggcgaccttgccgagacgtgggagggtctgcccaaaggcgagtcatactttgactga

SEQ ID NO: 1621 - DNA, 801 bp, Unknown
  Unknown gut bacteria
atgacgcaacgtaatacgactacagaaacctccgatctgtcggttcatgccggacaccgccagcgcctgcgggagcggttcctgcgcggcggacccgatgacctcgccgcacacgaattgctggagcttctgctggggtacgccatgccgcgcgtggatgtcaacccattggcacaccgcctgatcgagcggttcggctcactgtccggcgttacggaagcatccgtggaagagctgatgtcggtttccggcgtcggcgaatataccgcgtgcctgatacgcctgctgcctgccgttgtgcgccggtgtgccatcgaccgggtggagtcgccccgcgtatacgacacggtgggaaagctggtcgaatttctgcgcccccgctttaccggactgacgaccgagcgcgtctatctcatcctgctggacaacgggatgcacatgatcgactgccgcgtcatctccgagggctccgtcaacagttccgccgtcaccgtccgccggattgccgagttgtgcctgtatatgcacgccgcctgcgccgtgctggcgcacaatcatcccaaagggatcgcggttccgtcgagtgcagacctggacgtgacgcgccagattgaaagcgcgctggagcttatcggcgttccgttgctggagcatctcatcatcacggagttttcggaagcgccgatcctccgtccccggcggggcatgacacgcctctcgccgacatccggcaaggttgacgccgccttttaccgctttttctacggcgtcccggaagaggaaggagagcagaagccgtga

SEQ ID NO: 1622 - DNA, 579 bp, Unknown
  Unknown gut bacteria
atgaatcgggaggtattcttcatgaaaaaagctgtcctgcttggtgactccatacgcctgctggggtacggtacgcgcgtgcctgctctgcttgctccggatattgccgtttggcagtccgaggataacgggcgtttcacatcctatacactgcgtacctgctttgattataaggcggagcttgaaacggcagatgttgtccattggaacaatggactgtgggatatgtgtgacctgttcggagacggaccgtttacgccgctccccctttataccgatgcattggtgcgcattgcccgcatcctgcaaggctactgcccgcgcgtcatttttgccaccaccacgcccccgcgacctgaaatgtgggggcatgatatagaacgtgtccgggcgtacaacgccgccgccgtcgcagtcctgcacccgctgggggtacagatcaatgacctgtacagtctcatagaacctgatatgcagcacctgatccgcgacgatgatctcatccatctgacggatgcgggcattgaactgaccgccgcacaggttgcccgttccgtgcgggacgccttggcggagtag

SEQ ID NO: 1623 - DNA, 1698 bp, Unknown
  Unknown gut bacteria
atgagcaactcctggactctgcaaagagacaccgccgtccgcgttctgcgcccggaaggtgccgtgtatgagactgccgccgcacagcttctgcactatctgaacgcactctgcggcatcaccgaggcgcggagccagtccgcacccgcgatcatcctgcggactgacccctctatgccgccggatgccttccggctggttgtgcggggcaacgacctgcaccttgtcgggcagaacggacgcggggtgctgtacgccgtgttcgcccttgcagagcgtttcggctgccgcttcttcgcccatgacaccgaggtgatcccccacccggcggagctgtctctgcctgacgggttggatgtgaccgaggcatccccgtttgcctaccgcgacctgtactggatcggcaccaccgatccgctgaccgccgtcaagctgcgcatcaacggaacgggactgaaatcaggtcagcacatccgccatctgacagccgaagtcggcggcggcatcggctacgccggaccgcacttcgtgcataccttcgacctgctgctcccgcctgaaaagtatttcgccgaacaccccgaatactacgcgctgatcgacggcaaacggaccgcaaaacacctgtacagtcagccctgcctgtccaaccccgatgtcctgcgcattatgatcgagggcatccgctcgtggctccgtgacaatccggaggcgcggctggtgtcggtctcgcagaatgacagcttcgtcatcggctcctactgcacctgccctgcctgcagggcggtcaacgaggaggaaggcgcgccttccggctcgctgatccgcttcgtcaacgctgttgcggaggcactggagccggaattcccggaagtcaccttcgacacgctggcgtatcagtactcgactcagccgcccaagctgacgcatccccggcacaatgtcgccatccggatgtgtaccggcggttgctcctcgcacccgatctccgactgcgccaacaacgccggttcggcggatgccatccgcggctggtcgcagatatgccgtcagctgtatatctgggattataccacggactttgcccaatacctcaacccgtacccgaacttccagacgttgcaggacaacatccgcttcttccgcgaccacaacgtctgcggcgtgttcgagcagggcaactataacgaaggtctgtccggcgagttcggcgagttgcgtgcctacctgcttgccaatctgctctggaatcccgaatttgacgtagagtccggcacagagtccttcctgaacgcctactacggcggcggtgcgccatatgtacggcagtatctgaccttcatccgggacaaggtacgggatgttcatttcaatctggtcatcagcgccgccgctctctggaacgatctcatttcggacgaagagcttaccatgctggatcgcctgtgggcagatgcctaccgtgccgcgcgcgaaggcggcgatgtcccggacggcatttcctccgccctgtgcgcctcccatgtggagcgcagcgggctgtgccaccgctggttcaagctggacgccaaacggggtgaattctcctatcctgcccgctttgatgccctctgcgacctcttttaccgtgactgccaccgcctcggcgtcacccgcctgaccgaaggcgcgaacgtgccgtgggttgaggcgcagtaa

SEQ ID NO: 1624 - DNA, 1185 bp, Unknown
  Unknown gut bacteria
aactggggcgacgagggcaaggggcgcgtggcggatctgctctcccgcgacatggatatcgtgtgccgttgtcagggcacaagcgaggcgcgccacacggtagtgaacgagcgcggcagctttatgctgaatcagctcccttccggcattctgtacggcggtgtatgttgcatcatgggagacggaatgtatatccagccagaccgcctggacgatgaaataacacgcctgcgcgatgccggggtagacatctcgccggaaaacctgaaaatcagccgccgtgccgcgctggttctgcccggtctgactgcgacgcagatgcgtcttctgctggaaacgcgcgaccgtctgtgcatgggcgacctgacggatgtcgaaatgctggctgagcatctgaatgcattggcggatgcgttccgccgttacggcggaaaaccgaatatgtcggcttggtctgcgtgctgtcgccgctatacggcactgttcggcgactatattgccgacacgggcgcctatctgtacgacgcggagcacgccggaaagcgtattctgctggaatcccagtcgggcgctctgcgtgacaaggatttcggcgtgttcccttacggctcgccgacaaactgtctggcagcctacacgcccatcggtgccggtatgcccggcgtgcggctctcccgcgtggttggcgttatgaaagcgtactccgcctgccatggggacggtccgttcccggctgaaatcacgggtgaggaggcaacctacttccgtgaactgggacaggaggacgaggacggcgccacgccccgccgtgtcggcggttttgacgcggtcgcgtcccgctacggcgtccgccttcagggcgttgatgccattgcactgaccaagctggatgcggtatccttcctgccgcagatccccatctgtgtcgcctacgaagtggacgggaagcgtgtcacggatttcccgacaccgtccgccctgcggcgcgcaaagccgatatatgaatacgtggacggctggaactgtgacatctccggttgccgggcattcgcagatctgcctgttcaagccatcatctacatcaggtacctggaagagttggtcggcgcgcccatcacctatgtgtcggttggcgccgaacgggatgcctacatccgggacagtgtaaaagcggaaattcagtaa

SEQ ID NO: 1625 - DNA, 906 bp, Unknown
  Unknown gut bacteria
atgacggatttcatgaaagccatggcggatgaggtcgccgtccagggcggcgagggatgctattacacggttgtaacgctggagccgccgcaggagggtgacaccctgtaccatatggaaaaggtggatttccgccccggcaacccggcacatgactgctactcggtagccaagagtgtggcggtcacggcggcaggtctgctgtatgaccggggactgctccgtccggaggacacgctggacagattcctgtccgcctacctgaccgggaaaactgacccgcgctggggcaggctgacggtggatcagctgctgcgccaccggacaggcgccgcctccggcgtagattttgacctgaccaatgcgcatctgtgggaggatccggagtggctgcataccctgttcgcggctcccatcacgcagacgccgggcgaggaatttgtatactcggacgggaactattatattttggggcgcatcgtggaggagctgctcggcgaggacatggagaagctgttgctgcgcgaggtctttgtgccgctgggattccatgccaatgcgtggagccgggacgtgaacgggcacaccgtcggcggcacggggctgtacctgcgcacggaggacatggcgaagatcggctggctgtacctgaaccggggcgcgtggggcgaccgccgcatcttctcggaggcgtgggcggatatcttcctgcatccgccggtagacagggtgcggtacggctacgccctgacggagacgaccgccgacctgtatctggcgggcgggatgtacaaccagggtttggactttgacctgcgcacgcggcgtgtggtggcgtggcacgcctttgacgaggcgggcagcttcccggggctttcgcaggcgttcgtgcggtactgccgctga

SEQ ID NO: 1626 - DNA, 2004 bp, Unknown
  Unknown gut bacteria
atgacaaagcccacattttatttgaccaccgccatcgcgtacgcctccggcaagccgcacttcggcaacacctacgaggcgattatgtcggatgccgttgcccgcttcaagcgggagatgggctacgatgtgtttttctgcaccggcaccgatgagcacgggcagaagatcgagaacaaggcggcggcggctggcgtgacaccgcaggcgttcgtggacaacaccgccggcgggatcaaggctctgtgggacaggatgaacgtttcctacgaccgttttatccgcacgaccgacagctgccatgttgccaccgtgcagaagctgttcaagcgcttttatgaccagggcgacatctataaatcccgctacgagggctggtactgcgagccgtgcgaatctttcttcaccgatacgcaggcggcggacggcagatgccccgactgcggcagacccgtccagcgcgccagcgaggaggcgtacttcttccgcatgagccggtacgccgacagactcatgacctactttgatgagcatccggactttatcgagccggagagccgcaagaaggaaatggtcaacaatttcctcaaggcaggattgcaggatctgtgcgtgtcccgtacctcctttacgtggggaattcccgtgacctttgacccccgccacgtgacctacgtctggctggatgcgctggtcaactatatcaccgccatcgggtatgatcccgacaagacgtacggggagcagagcgaggagttccgcagactgtggcccgccgatgtgcatatcatcggcaaggacatcctgcggttccattccatttactggccgattttcctcatggcgctggatatgcccctgcccaagaagatttttgcccacccgtggttcaacttcggtacggacaagatgtccaagtcgcgtgggaacgtcatctatgccgacgagctggcggagaaatttaccgtggacggcgtgcgctactacgcgctgtccgagatgccgtacagcgcggacggctccattacctacgagtcggtcatcagccgcttcaacaccgacctggtgaacaacctcggcaatctggtcaagcgcacactggatatgcagaagaagtatttcgaccgcgtggtcgccgcgccggttccggcagataccgaggcggagcgcgcgctggatgccgagcttgccgccgcctgtgccgccgcctatgacggcatggtggcaaacatggaaacctaccatgtggcggatgcagttgcctgcgtttttgccctgctcagccgtaccaataagtatatcgacgagactgccccgtgggcgctggcgaaggacgaaagccgccgcgaccggctggggacggtcctgtacaatctgctggaagctatccggcagggcgccgtcctgctcaagcccttcatccccgccacggcggaggagattctggatcgcctgcatacagacgcgcgcggctttgatacggtcgggcgtagcttcggcggcatgaagcagggcgtgcaggtggaggaatcccgcgtgctgtttgcccgcgtggacgagaaagccatgctggcgcagttggaggcggagcgtgcggatgcagccgccgcgcccgcacccgagactgctcccgatgcggctgagccgaccgcacaggctgctccggagcgcccggagggcgtcgcgcagatcggttacgaggacttcatgaaggtggagctgcgcacagccgctgtgcttgcctgcgagccggtgaaaaaggcaaaaaaactgctgaagctccggttggatctgggctatgagcagcggcaggtggtctccggcatcgccaagtggtacaagccggaggatctgctgggcaaaaaggtcatcgtggttgccaatctggcacccgctaccctgtgcggtgtggagtccgagggcatgatcctggcatccggcgaggacaccgtgcgcgtgatcttccttgaccccgaaacgccgcttggcgagcgggtcagatga

SEQ ID NO: 1627 - DNA, 2343 bp, Unknown
  Unknown gut bacteria
atgttcgacttcatccataaagtcaactatcaccagaacccccacaccctgcacatcgggtgcgaagccccccgcgcgtactttgtcccctttcacagcgagacggcggcgctgggcggaaaccgtgccgccagccacgactttctgaccttgtgcggggactgggactttaccttttacccctccctgcgcgacgtgcccgatattaccgccccgggctttgtccccggacgaaccgacagaatcgaggtgccgcgctcctggcagacctacctggatcgggattacgacacgccgcagtatgtcaatgtgctgtatcccgtgactgtggatcccccctttgtgccggacgccaacccctgcggactgtacagccgcaccgtcaccctgcccgccgcccggctgagcaagaccgtctacctcaattttgaaggcgtggactcctgcttctacctgtttgtcaaccgccggttcgtggggtacagccaggtcagccacatgaccagtgaatttgacctttccgcatacctgcacgagggagagaatctcattcaggtactggtgctcaagtggtgcgacggcacctatctggaggatcaggacaagttccgctggtcgggcattttccgggaggtgtacctcctgttccgcgatccggttcacattctggattttgaggcgcatcccgcactttcggaaaactatgcccgcggcgcctgccccactacggtacggctgaatgggcgcgcattggtagaataccgcctgctccgtcccaacgggatgcagatcgaatccggctcactggagatcgacggcgagggaacctttgacttcctcgttgacgcgccggagctgtggagcgacgaggagccgttgctgtacacgctgatcctgcactgcggcagtgagtacatcgtgcagaagctgggcttccgggacatccgcatccgggacggcgtgctgtacttcaacgggtgcgccatcaagctcaagggcgtcaaccgtcacgacagccaccccctcctcggctccgcaacgccgctggatcacatgatccgcgacctgaccatcatgaaacagcacaatgtcaatgctgtccgcaccagtcactacccgaacgatccccgcttccccggtctgtgcgatgagctcggcttctacctcattgacgagaccgacctggagtgccacggcatggcatccatcggcaactgggatcggctgaccgatgacccggaatgggaggatgcctacctggatcgcgtccggcggatgtatgagcgggacaagaaccatgccgcagtgctgatgtggtcgctgggcaacgagtccggtatcgggtgcaacaagaacaaaatggcgaattatctccccagccgcaaccggcacaatctcgtccactgcgaggacatatcccgccggaatgccggtcggttgcgcggcgacatgaagggaaaatccgacggggagatcggcggtgccctgcggagtccgcatattgacgtcgaaagcagaatgtacccctcgccggaggagattcaggcaacctatctcgaccggacggtgtttgacaagcctctgttcctgtgtgaatactcgcacgccatgggcaacggtcccggatgccttaaggactactgggatctgatctattcgcacgacaacctcatgggcggttgcgtctgggagttcatcgaccactcggtggcaaccggcaaagcccccctgtccgacccgcactacacctacggcggcgacttcggcgaggtgccgcacgacggcaatttctgcgtggacggactggtctatccggatcgccgcccccacacgggactgatggaatacaagcaggtcatcaagcccttccggctggagtccttcgaccgggtgagcggcgaggcagtcattcgcaacctgcgctacttcaccgatctgtcggatctggactttgactggacactggagcaggacggcacggtctttgcctgcggacgcgcctgcctgcctgtcgagccgcaggaaactgcacggctgaccgtaccgaccgacgcaatccccgccgccggggacgtatacctgacgctgaccgcccggcagaacctgccgacgccgtgggcgcccatcggatacgaggtcggctttacgcagatcaggctggatcttcccgccggggaaaagcagtccctgcgcgatgcgatgtctccctttgcgaccattgccgccgaggaaacagccgacgccgtgaccgtgcggacagccgatacggaataccgtgtctgccgcacctgcgggctgattacctccatgcggcacgagggacacgagctgctggcagccccc

SEQ ID NO: 1628 - DNA, 606 bp, Unknown
  Unknown gut bacteria
gtgatccccgtgacagatacgtatacaccagccgatacatccgccggaacagcgttggacagcctgcgcgggcgttgtgcggactgccgggcgtgtcccctgtgggaaacacgcaccaaatccgtgttcggcgtgggtgactcccgtgcgcgccttatgttcgtaggcgaggcgcccggcggcgaggaggacaagaccggcattccgtttgtgggtgcggcgggaaaactgctggaccgatacctgtacgcggtgggcattgcgcgcgagtcggtgtacattgccaacattctcaagtgccgcccgccgcataaccgtgacccgttgcccgccgaggaggatgcctgcatcggttatctgcgtgagcaggtcagactgattgatcccgcactgatcgtgtgcctggggcgcattgcagccatgcggctgatccgaccggatttccgcatcacgcgggagcatgggatattcgttcagcggggaaagtattgcatgaccgccgtgtaccatccggcggcactgctgcgcgatgcctcaaaaaaggaggatatgctggcggatatggaacgcgtccgggaaaaactggacgaactgggcggggcgtga

SEQ ID NO: 1629 - DNA, 1458 bp, Unknown
  Unknown gut bacteria
atggatatgatcaaatacatcgtcaagcgactgcttctgtcggtgctcatcctgttcggtgtctccgtcatcatctactcgcttgcccgcatgatgcctacggactacgtggataaccagtattcatccgccgtctcgcagggaaccatgcggcaggaggacgtggatcggatcaaggagctgtacggactttccatgccggatgcctacctgcgcatgaagatcggtacgggcagctccttcgccggggacaccttttccaagaacaccaaacaggcaacgtatgacgaggacgtttccctgggactcatgacatgggaggcatggtatgagggctcctatgacggaccgcacaatacccgcctggtcatcaatgccgacggcaccttttccatcggcacggtcgagtcccgcggtctgcacgtggaggcggaatcctctgccgcggagacttccggcggggagacggagtcctctgcttccggttccctgattacgctggacgagaaatacacgcccgtggagagcggtacataccggctggtcgccggggagggcggagacgcttcctccatccggcaggtggtctgcacactgtccgacgggaccgagctgaccatcgcggcagagtaccgtctggatggcttctgggataaggcgggcgctgtcctcagcggctacttcagctggctgttcaatgtcgtccggggcgacctcggtatgtccttcaagtacaagaagccggtcaaggacgtcatcttccagaacatgggcatttcctttgccatcgcgtttgtagcgactcttctgcagttcctgatctccattccgcttggcatcaaggcggcaacgcatcagtacggcttcgtggattacagcgtgacggtgttctccatgaccggcagcagcctgccgaccttcttccttgcggcactggtcatccgtatttttgcggtggatctcggatggtttgaggtcggcggcattgcctcctcctccctgccgatggatgctacgtggttgcagcggctgggcgatacgctctggcacatggtgctgcctatgttcgtgctggtggtgctgtccatcggctcgctgatgcgctataccagaaccaacacgctggaggcactcaatgccgactacgtgcgcacggcacgtgccaaaggtctgaccgagcataccgttatctacaagcacgcattccgcaataccatgataccgcttgtcaccatgatggcgggtattctgccgagcctgttcggaggtgccatgattcccgagacggtgttcagtatccccggtatcggcaagctggcatacgatgccctgatcgtggcggacattccgttcatcatgggctacaatatcttcatcgccattctgactgtcatcggcaccctgctgagcgacctgatgtacgcggtggttgacccccgcgtcaagctcggaaagtaa

SEQ ID NO: 1630 - DNA, 1479 bp, Unknown
  Unknown gut bacteria
atgtctgacaggagaaaaacaacgcagggcagggcagggaaattcgccgggacgggcgcggtatataccgtttcgatcacggatttgagcaacctcggctacggcgtcgggcggttgcctgcggacggggatgcccccggagcatcggacgccggcagcggggctgccggcaaggtgatctttgtccggggcgctgtcacgggcgatacagtggagacagccgtcatcaaggagactgcagggtatctggtcgggcggctggttcgcgtggtaacgccgtcgcccctgcgtgagccggcgcagttctgtaccgcgccggaggcgtgcggcggctgtgtgttccggcatctgacctacgccgccgagctggaatccaagcatcggcgggtgcagagcgccttccggcaggcggggctggcagatgtccgtgtcctgccgccgctttcgacaggcaggacggcgggctatcgcaataaggggatgtacccggtgcaggcaggcagaaacgggatgcaggcgggcttttatgccgcgaagtcgcacaggctgattccgtgcgccgattgcgcgctccaaccgccggcgtttgccggcgtggtcgggacggtgtgccgcttctgtgaccgcgagcacattcccgcatatgacgaaacaaccggtgcggggattttgcggcatatctacctgcgcactacggcggcaggagagatcatggtctgcctggtcatcaacgccgacggtctgccgggcgggcgggcagcagaggcgcgactggtggactgcctgctggcggaacagccgcgcacggtcagtgtcctgctcaacatcaaccgcaggaataccaacgtggtgctgggtgagcaatacaggaagctgtacggatccggctggatcgaggacacgctgtgcggactacgcttccggctgtcggcggggtcattctatcaggtcaaccgcgagggcgcagagctgctgtatgaaacggctgcgcgcatggcggaggttcgcgggggcgagagcctgtgggacctctactgcggcgcgggaaccatcggactgtccatgctatcccccggacgcaacgcacgccccgcacaggtgacgggcgtggagattgttccggaggcggtggcgtgcgcggagcagaacgcccgcctgaatgcggaggcggggcggattccgcctgatgcggcgcactttttctgcgccgacgcgggggatgccgccgcgctgtttgccgctgccgacacgggggcggcgcccgcaccggatatcgtaatcatagacccgccgcgcaagggcaccacgccggaactgatccgggaacttgcccgccggggcgttccccgcgttgtttacgtttcctgcgatcccgaaacgctggcgcgcgactgcgctctctttcgcgcgagcgggtatgctgtcggcgaggtgcaaccggtcgatatgttcccgcggacggggcatgtggagacggta

SEQ ID NO: 1631 - DNA, 867 bp, Unknown
  Unknown gut bacteria
atgagcgataactacatcctcttcaccgactccggcgccgacatccccccctccctgctttccgaatggggcgtcggctaccagccgctgaccttccgctttgaccacatcgacaaggagttcagcaacgacgagatggacatccgggaattctaccgactgatgcgcgaggggcacatcgccaagacctccgccgtcgcttccgccatattcaaggatactttcgaagcgatacttgccgaaggcaaagacattctgtatctggcgttttcctccggactgtccgccacctgcaacaacgggcgcgtagcggcggaggatgccgttgcaaagttccccgaccgcaagatcgtcgtggttgactcgctggcggcgtccgccgggcagggactgctgctttggctcgctgtgcagaagaaacgggaaggcgcctcgcttgaagaggtcgcgcagtacctggaggataccaaactccacctgtgccactggttcactgtggatgatctggtctacctcaagcgtggcggtcgcgtcagtgccgcagcggctttggtaggcggtatgttgcaggtccagccgattctgcacgtggacaatgaaggtcacctcatcaagatgtccaccgtgcgcgggcgctggaacagcatccaggcgctggcggatcactatgctgccaacgtcctcgacaagacagcacccgtgttcatctgccacggtgactgccgcgaggatgccgaccgactcgcaacgctggtcatgcaggcgggtggacctcagccggagaagattgtgttcacgggcagcgtcatcgggtcgcattccggtcccggcacgctggcactgttttacctcggcagtgagcggtaa

SEQ ID NO: 1632 - DNA, 756 bp, Unknown
  Unknown gut bacteria
atgaccctgacagttgcttcctacaatattctgcacggggcagcggtcgggtatgactgggcacagcttgccgcagtgatacgggagagcggcgctgatatcgtcggcctgcaggaagtggatcgacgcacgcgccgcgccggcgggacagacgggctgaatgagctgctccgattgctgggctggcgctatgggcgtttctcgccggtcatgccgtatgatggcggggagtatggcattgcgctcctgtcccggttcccgtcggtatatcctgagcgcctggcttgccttcccctcccacatcgggagggggaggagccgcgctcctgcatgcacgccgttatccgtctggaggagagcgggaaacccgggcgcgttctgcatttgctcaatacgcacctggcttttgagaaccccgccagccggagaccgcagatcgaggttctgctgaatgggatccgacgcatcccggcagatgaagccttcgtcctcaccggcgatttcaacaccgagacttactccgaactgcaaccgttgctgaacggtcgtgccgcgcttgccaatgcactggcgccggatcgtccggatcaagcgcatttcaaaacattccgcgagccacccatggcaattgacaatattatttatgacggttcgtctatgacgcttgccgcgtgcggtatgcgtgtcggcggcgagtctgaccataaccttctctgggcacggtttgcattgacaaccgggcagacagagaattga

SEQ ID NO: 1633 - DNA, 1821 bp, Unknown
  Unknown gut bacteria
atggaacgcaagactttgtatgacaggatatatgcctgctggctgggcaaaaacatcggcggcacgctgggaacaccggtggagggctgtaaggaggtcatgcacctggattggtacccccggctcgacccgcacggcgcattgccgaatgatgacctcgacctgcagctggtcaacctgcacgcgatggagcaggagggagtccgcctgggagcggagggcatcgccgccgagtggacggaacacgtctacttcccgtgggatgagtacggctacagcggaaccgctatgcgtatgggattcaagccgcccttttccggaatgtttgacaacactttcaccgactgcatgggctcccccatccgctccgaaatatgggcggcgatctgcgcgggaaagccgcgccttgcggcgtactttgcgtggcaggacgccgtggtggatcatgccggaggcgaaggcgtgttcggcgaaatattcaacgccgcgctggaagcggctgcctatgaatccgacgatatccctgcactgatccgcgaggcactgacctatattcccgaaaactcacgggtttacagatccgtcagccatatgctggcactgtacgagaatggtgtgcccctgccggaggcgcgcgagattatcctgcgcgagcacggacggaataactttaccgatgcaccgcagaacattgcctttgaactggcaggactgctctggggggataactttgaggatgccatcctgaaggtggtcaatctcggctacgatacggactgcaccgtggcgacctgcggcgcgattttggggatcctgcggggcacagccggtattccggagaagtggtcggcacctatcggggatgccatccaggtgtctgctgccatccggggcttcacggcgccggctgatctggatgaactgacgaggcgctgtcttgcgctgtatgacaagctggcgctggaagacgagacacgctataccgtcacaccggaggacaacgcggacttcgcggtacagcactatgtccttccggcacacagccgccgcgatgagggcgtgacctttaccctgcgctacggtgcaaagggggatgggcggtacggtgatccgtcgggtgcaccgggggctccggcatcgatctgcctgaccgtaagaaacaatacggcgtggcgctgggacatggaactgtccctgcgcgttccggacggactgcgggcagcggacaagccggtgcgtcttacgctggaacccggagcggaggcggaaccggtactgcacgccgaggcgatcccgggcgcaccggtgcccggaagccgctgttaccccatggggctgatcgtgcggcgcttcaactgcggcgatatctggtcggagtaccgcctgccctttatattgctggcgcccaatcgctggcgactgaacggcagggaagtgctctgccccgggacgcaggtgcggttcccggaggcatctgccgacggggtgtatgtggcagaggcaacgctgacggcaccgtatgaccgccccacccgcctcatttgcaacacagtacgtcccgtgctcgtaacgctggacggggagacggttatccggtcggagacggcacaggtattcctgcctgcttaccaccgcgcaccggtcgccaacctgcatgacggagtgctgaccggaggcacgcatactgtccgggtggagatccgtaccgagccgggcgacgaaccgccgatgtttgtcatctcgctcaatgcgccggcggaggtggcggagccgggtaacttctacgcctacctggacgaccactttgcggcgggaaaataa

SEQ ID NO: 1634 - DNA, 1200 bp, Unknown
  Unknown gut bacteria
atggaaaaggtaagagttgccgccgtagggcttggaggacgtgggcagtcggtgctggacgggctgctgttgggaatggatacactgcgcgtcacggttgtgtgcgatctgtatgaggatcgtgtcgcgtgcggcgcggcgtcggtggagcgcgcttacggggagcgcccctttgcgacgacggattggcatgcggcgctcgatcctgagcgcgtcgatgcggtgctgatcatgtcggcatgggaatcgcattttcccatcgcctatgaggcaatggagaaggggattgcggtcggcatggaggtcggcggcgcgtacacggttgaggactgctggcggctggtgcgcacgcaggagagaaccggaacgcccttcatgctgctggaaaactgctgctacggacagatggaaatgatggtcatgcacatggtgaaggaaggactgttcggagaggtagtacactgctccggcggctactgccatgatctgcggagtgaggtcgcgcgcggcgaggagaaccgccattaccgcctgcgcaattacctcagccgcaactgcgagaactacccgacgcacgagctgggtcccatcgcgcaggtgctggacatcaaccgcggcaaccggatgctttcgctggtatccatgtccaccaaggcggcggggctcaacgattacgccgcccgccacccggaaatcaatcccgcgctggcaacggcacatttcaatcagggagatgtcgtcagtacgctcatccggtgtgccggcggacagaccatcagtctgacgctggacaccacgctcccccgcgcgtacagccgcggatttaccgtgcacggcacccgcgctctgtacacggaggataataactcgctgtatctggacagcgactttaccgaggcggatcacttcaactggacgccgaactggaacaacgcgaccaaatacctggaaaaatatcagcacccggtctggcgtgactacctggaaaacggtatccgcggcgggcacggcggtatggatgggctggtctatgatgccttcatcgaggcggtgcgcaagggcgaaccgtgccccatcgacgtctacgacgccgccgcttggatgtgcatcacaccgctgtccgagcagtccatcgcaatgggaagcgcaccggttccggtaccagacttcacgtcgggcgcatggagcacgcggcgctga

SEQ ID NO: 1635 - DNA, 1791 bp, Unknown
  Unknown gut bacteria
atgcccttcactttcctgtcctcggattacgagcagggacaggacatctgcgaactggagctggataccgccgcgctgtgcgggctggatgccggcgggcgtcggagcggactgttcttctaccgcctcctgctggtgcgcgatcaggacactctgttcacggacagccgcaacaacgtggacttcacactgggcgcggacggcggacaggcgttccgtctgctggtgtacaacgggggcgacccggtgccggaatggttcgggcagggtgtgctgtaccatgtgttcgtggacaggttccggcgcggcgcgggcgcagtccgctaccagaccggcgcgcgcggcgccgtcatggagccggactgggcacacggaatcccgccctttgccgaacggcagggcgacagccttgccaataataccttcttcggcggcaacctgtggggcgtggcggaagcgctggactatctggcagatctgggcgtgcgggttctgtacctcagcccgattttccgcgcctactccaaccacaagtacgacacgggggattatctcgccgtggacgagggcttcggcggcgaggcggcgctggacgccctgctggacaaggcgaagcgatacggcatcgcggtcattctggacggtgtgttcaaccacaccggggacgacagccgctacttcaaccgctacggcacctatccggacacgggtgcctatcagtcgcccgactccccctaccgcgactggtacgagttttccgagtggccggatcggtacgcatcgtggtggggcattcccattctgcccaagcttaaccacaaaaacgacgtctgccgctccttcttcacgggcgtggacggcgtgggcgcgcgctacatccgccggggcatagcgggctggcggctggatgtcgcggatgagctttcggatgatttcctggacgaattccatgcctccgtgcgcgcggcaggagaggaaagcgcgcggaagccggtcattatcggcgaagtatgggagaatgccgccgaaaagaccgcctacggcaggcggcggcggtacctgcagggcgggcagctggacagcgtcatgaattaccctgtccggagcggcatcctcgcctttgtctgcgaccgggacgcggaaatgctgtacgatgtcctgaccgagctgtatgcttcctacccccgtcccgtgtccgattcgctgatgaatctgatcggcacgcatgacaccgagcgcattctgactgtactgggcagtgaacccggcgactatgaccgttccaaccgtgcgctgtccgtggcgcggctgtctccggaaaagcgccgcgccgccgcgcatctgctcaagctggcgtcgctgctgcaatacaccgtgttcggcatcccttcgctgtactacggtgatgaagtggggcttgagggctatcacgaccccttctgccggatgccgttcccctgggacgagctggaagagcctgtccgtgccgatctgcttgcgcattaccgggcgctgggcgctctgcgcgcgcaccccgccctgaatcgcggcgggttcctgcctgtcgggcacggtgccgattggctcgccttccgccgctccgccgagcacggctgcgcaggctccggcaacgccggggatcttttgatcgccgtcagccgcagttccgaaccggttaacctggatgggccgcaaggcgcggcgctccttctggctgttggcggtgtctcgctcgcctccgggtgcctcaccctgtcgccagacagcggttgcgccgtgcggctgggataa

SEQ ID NO: 1636 - DNA, 1296 bp, Unknown
  Unknown gut bacteria
atgaaaaccatttacacctgcttctgcacggatgtcatccacgaggggcacctgcatatcatagaggaggcgcacaaatacggcgccgttatcgtgggtgcgctgagtgaccgcgcactgatccgctgtatgcggtttccgaccatcccgtttgaggagcgcgtccggctgtatgaaagtcttgacggcgtggatcgcgtggtggtgcaggacgatatgctgtatgacgatatacttgccgaactgaagccggattatgttatccacggcgacaactggcgcacgggacccgaagccgtgctccgcgagagcgcgatccgggcgctggcgcagtacggcggcgagctgatcgaggcgccctatacggtcaacgaggaggtgcgcaagatcgacctgcggctcaaggaaaaactcgccatgccggaattccggcggcggcgcctgcgtcagctggtcgaaatgtgccctatcgtcaagaccatcgaggcgcacaacggactgaccgggctgattgcggaaaagaccgtggtcgagacggacggcaagctggatcagtttgacgccatgtgggtgtcctcgctgtgtgacagcactgccaagggcaagccggacattgaactggtggatatgtcctcccgcatccagacgctgaacgatatcatggaggtgacgaccaagccgatcattctggacggcgacacgggcggcatgatcgagcatttcgtgtataacgtgcggacgctggagcggctgggcgtttcggctgtcatcatcgaggacaagacgggacttaagaaaaactccctgttcggcacggaggtagagcagacgcaggacagcgtggagcatttctgcgcgaagatcacggcgggcaagcgtgcccagctgacggacgatttcatgattatcgcgcgcattgagagcctgattctggagcggggcatggaggatgcgctgacacgcgcgttcgcatacgtggaggcaggtgcagacggcatcatgatccacagccgccggaaggatccgacggagatattcacgttctgcgatactttccggcagaaggatccggctacgcccatcgtggttgtgccgacctccttcaacagcgtgacggaggaggagctggcgcggcacggcgtgaacatcgtgatctatgccaaccagctcacgcgcagtgcgttccctgccatgcaaagcacggcgacggacattctgcgctaccatcgcgcgcaggaagtggatgcgcggctgatgcccatcaagcagatcatttcgctgatcgacgagctgtaa

SEQ ID NO: 1637 - DNA, 1149 bp, Unknown
  Unknown gut bacteria
ttgaacgataaagaaatatccgaaatccgccgccgttacagagcggaaaagagcggcatctcccgcatccggggatgctatgtcaacgaaaaacgaaccatcatctccgaatttgaccagtcgctgggactgatgtccgaaagcgaggcagaggaggtgctgacactgctcaggaaagcgctgtccggaaaagtcggaaccaatctgatggacatcgccttttcgactgcgcaggtgcagtccggcgcggagcacggtctgctcatgactctgcgcgaaagcgccctcggtgatgacgccgccgtccacgccttttacgaaaaggtaatcggttcgctggcgctggagggcaactacatgatcctgctctgccacgacagctatgacgtgttctcctaccacaaggacggcggacgctcggaggactccggcgagatattccgctacatcctctgcgccatctgcccggtcagcatggcaaagcccgcgctgtcctactttgtccgggacaactgtttccgcaatatcacagccgactcggtcgttgcgccgcccgcgctgggctttctgttccccgcctttgacaaccgctccaccaatctctacggcgcgctgtactatacccgcgacaccagcgacagccatgaggagtttaccgatgccgtgttccatgccggaaagctgcccatgcctgccgccgctcagcaggagaccttccgcaacgtgctggcggagtcggtaggggaggcgtgcagtctgccggttgtgcgggcagtgcgcgcacagatctgccaggcggtagaggatcacaaggcgtccaaggagccggagccgctgaccgtggacaagtacgctctgcgggatatgctgggcttcggcggcgtgcccgaggaaggcatcaacgcctttgaggaaaaattcgaccgcagtttcggctccggcgccgccgtcagcccccgcaatctggtggatacacgcaaattcgaggtcagaacgcccgatgtcgtgatccgcgtcaatccggagcgagccgagctggtcgagacccgcatcatcgacggcgtaaagtacattctcatccgtgccgatgacggtgcagaggtcaacgggattgatgtgaccttcgaaaaggacactgcgggacagtaa

SEQ ID NO: 1638 - DNA, 768 bp, Unknown
  Unknown gut bacteria
atgggaatcctgccgttcaggaaaagcgtccccctgacaacccgtgaaatcctgatcaacaaccggaagcgcctgctcaacaacgaaaccccttttgccattaaggaagcctacatcaaactgcgcaccagtctgatgttctgcatgacgcaggacggcgggagcgtctgtcgggttttcgctgtcacaagccccaatccttcggagggtaagagcctgacagccgccaatatcgccatcagctttgccatgctgggcaggcgcactctgctgattgatgcggatatgcgcaagccgactcagcgccttctctggaatgtgcggacaaccagcggtctttgtgactatctcgccgcgatccgtccgctggaaactgcacgggtcgaggatctgccgctttccctgatctgcaccggcaccattccgccaaacccgtcggagctgcttgcttccgaccggatgaagcgctttgtgtccggatgctcccgggactatgcctatattttcatcgatacgccccccatcaacacggtcgcggacgcacagattgtttcggctttcgtggacggcgtgatcctggttgccaaatcgggcggaacaggcgcggatgaactcaataccgccatcagctccgtggagcgggccggcggcaatctgtgcggtgtcgtgctgaacgacgtggacatcaaagccatccggcgctcctaccgctatgacggtcggtacgggaatcagaacgcatatatggattcctatgggaacaagtag

SEQ ID NO: 1639 - DNA, 510 bp, Unknown
  Unknown gut bacteria
atgtcaaaatccgctcacggttccgctttgccgcgcaccaatgccatgcgcatgctggatgcggcaaggattccttacgaggtgctgacctatgaggtggacgagaacgatctgtccggcgtccatatcgccgagcagctttcctatccgcccgaaatgatattcaaaacgctggtcgcccacggggacaggaccggctatctggttttctgcatccccgtcgcattggaaatcgacctgcgcaccgccgcttccctgaccgggaacaagaaaatcgagatggtgcacgtcaaggatctgctttccctgaccggatacatccgcggcggctgttcccccatcggcatgaagaaaaagttccctaccttctttgacgcttccgcgctttccctggataagatcgcggtcagtgccggtatgcgcggagcccagctcctgctggatcgcgccgccctcatgcactttgtggatgggaaggcgctggcggtcacggggcagacgccgacgtga

SEQ ID NO: 1640 - DNA, 1431 bp, Unknown
  Unknown gut bacteria
atgcaggaaaaacccatccggttcggtacgggcggctggcgcgccgtcatcggttccgactttattgaaagcaacatccgccgcacggcggagggcatctgcgcgctgatgtgcgaggagggcaggacggacaagccggtcatcatcggctacgaccaccgcttcctgtccgagacggcggcgcgctggattgccgaggttctggcggcacacggggtgccggtcatgttcctgcgccgttccgcgccgactccactgattatgcacacggttctgcggcagggactgcattacggcattgagataacagccagccacaacccgtcctgctacaacggcgtcaagctgattgtggaggaggggcgcgacgcgccggtcgaaacgaccgcgcggctggagcagctgattgccgccgtccgcccggaggatgtccgggatatgccctttgaggacgcggagtctgccgggctgattctctggcagaagaaccccttcaacgcctttattgatgacattctgtccgtcatggatctgcccgccatccgggagcacggcgcgcgggtgctgttcgatcccatgttcggctccggcacctacccgctgctggttattctctgcaccgcccgttgcacggtggacatgatccacaatacgcgcgatgcgcatttcggcggcaatctgcctgcgcccaccgtcaagggactgggcgagctgcgcaaccgcgtcaccacgggcggctatgagcttggcatcgcctttgacggcgacggcgaccggctcggcatcatcgaccgcaccgggcgctacctgagtgccaacgagatactggtcatgctgtactggtacctgcacgagaagaagggctggcgcggacctgtcgtgcgcaatctggcgaccacgcatatgctggacgtcatggcggcgagcttcggcgaggtctgctacgaggtgcctgtcgggttcaagtacatttcttccaagattgatgaagtggacgcggtgctgggcggcgagtcctccggcggtctgaccgtgcgcgggcacattcacggcaaggattccgtctatgccgcctccctctttgtggaaatgatttcggttgtggaaaagtccccgtccgagatcatggacgcgctgaccgccgcctacggcaccttccgcatggtggaggacaacatcaccttcacgccggagcagaagtcctatgtggaccgtgtgatttttgttgagcgtcgcctgccggatttcggcaagcctgtatcgcgcgtcagctacgaggacggctgcaaggtttattttgccgacaattcctttgttatctgccggttctccggcaccgagcctcttcttcgtatttttgccgaggcgtccgatgaagctgccgcgcgcggttttgtgactgctttccgcgagctgctggcgctggagtga

SEQ ID NO: 1641 - DNA, 795 bp, Unknown
  Unknown gut bacteria
atggacgtcctgcaggagatcacccgtctgcgaaccggcgaaaaaatccaggcaatctttttcatggcggcattcgtgttcatggtcttttcaggtgtcggctgggtgctggagctgttcttccggcgcttcgtgtcggctaaaaaatgggtaaaccccggctttctcaaaggtccctgcctgcccatatacggcaccggcgtggttgtcatgacgggatatgtcctgctcatgtctcagctggaggacgcattccccgcacgctggctgtttgacgccgtcgtcattctgggcagcggtctgctcatgacactgatcgagctgatcggcggactgattttcatcgagaaaatgcacgtccggctttgggactacagcgattcccccggtaacttccggggcattatctgccccaccttctccctcatatggacggcggcgggcgctgccttctactacctgctgtttgaccccatcgtcatcatggcaacgcggttcatcacgctggactggttcgtgctggcggtattcctcatgggaatgtactacggcgtgtttgtcattgatttctgcatttccgtccaactgctcaaaaagatcaaagccgccgcagaggaaagccagcttatcctcaagtgggaaaacatcaagctgcacgtgcaggaggagctgcgccgcaagcaactcaagccgcacttccttgcccccttccagtccggaacgcccctgcgggaaagcctccgcgcctatgtccgggagcagggcgaaaagctggaaaagttcagaaagcgctga

SEQ ID NO: 1642 - DNA, 861 bp, Unknown
  Unknown gut bacteria
atggggcagggaagccccaccgctaaccgtgagatcaaacaggaggtttttgctatgttgccaatcgccattcaactgtattccgtgcgcgacgacgcagccgccgatatgcggggtacactgcagaagatcagggaaatggggtacgacggcgttgagtttgccggtctgcacggacacaccgccgaagaggttcgggagatgtgtcaggaaatcggacttttgcccctgtcggcacacgtgccgtatgacgagatggtcgccgatccggagggcgtgctgggacagtatgccgccatcggatgccgctatgttgccattccgtacctgatgccggagtaccgccccggaacgcccggctttgcggatgtcatccggaatgccgccatgctgggggaagttgccaaccggctgggcatgactctgctgtatcataaccacgattttgagttccagaagattgacggcaagtacgcgctggaggtgctgtacgataccgtgcccgcctccctgctccagaccgagctggatgtgtgctgggtgcgcgtcggcggcgaggagcctgccgcctatatccgcaagtataccgggcgtgcgccggtcgtccacctcaaggactacgccggcggcaagtccgagcatatgtacgagctgatcggcattcagtccgagcacgcgccggaggagcatccctttgagttccgccctgtcggctccggtgtgcaggacatcaccgccattctcgccgccgccgacgatgccggcgcgaagtggctggttgtcgagcaggatcagccttccatggggcttaccccgatggagtgcgcccgcgcgagcatcggctacctgcgcggactgtga

SEQ ID NO: 1643 - DNA, 1494 bp, Unknown
  Unknown gut bacteria
atgatgtatcaatccacccgcgatccatcccacaaaaagtatacctccgccgaggtcatcaaaatggggcttgccccggacggcggactgttcctcccggaaaccatccccacgctcagtgaggcagacattgaagcgttgcggcacgagagctatcccgtgcgcgccgcgcgcatcctgcatatgttcctgaccgactacacgcaggaggaactgatgaccgactgccacgccgcttaccgcgaggcatccttccccggcggtgcggcaccgctggttcatgtatgtaacaatctgtacgcgctggagctgtggcacggtcccactgccgccttcaaggacatggcattgcagatcatgccgcgcctgctctcccgcgcgctggtcaagaccggcgagacacgccatgccctgatcctggtcgccacctcgggcgacacaggaaaggcggcactggagggctaccgcaatgtggatcgggtgaagatcatggtcttctacccggtagacggtgtgagccgcgtgcagaaactccaaatggcaacgcagaccggcgacaacctgcgtgtggtcgccatcaagggaaactttgacgatgcgcagaccggtgtcaaaaatatctttgccgaccgcgaaatggcggagcgcctgaacgagcacgggtatatcctgtccagtgccaactccatcaactggggacgtcttgtcccgcagatcgtctactacatttccgcttactgcgacctgctgaacaagggtgtcatccgcaacggggagcaaatcgacgtctgcgtgccgaccggaaacttcggcaacattttcgccgcatatcttgccaaacggatgggattgcctatccggcggctggtctgcgcctccaatcagaacaacgtgctgacggatttccttgccaccggcacctacgaccgcaatcgtccgttccatctgaccatgtccccctctatggatattctgatctcctccaacctggagcgcctgctctgcctgatggcgggtgagcaaaagacagccgcctacatggagagtctgcgcaaaaccggctcgtacaccgtggacgcggaggttctggcggatatccgtgcgtgcttctccggctacttcgccggggagaacctgaccgccgcgaccatcagcgagtttttcgagaatgaaagctacctcgccgatacccacacggcagtcggacttgcctgcgccgagcagtacgcggaggagcatcccggcgatacaacgcccatggtggtggcatcgaccgccagcccattcaagtttgcggcggacgtgtatatgtcgctgacagacggaaccaagctgccgcgcgatccgctgtccgcgctggatcaactcgccgaactgaccggagccgacatcccgtaccccctgtgcggtctgcgggagcgcaccgtgcgcttccgggagaccattccggcgaacgccatgccggaggcagtgctggatttctgcgggaaataa

SEQ ID NO: 1644 - DNA, 606 bp, Unknown
  Unknown gut bacteria
gtcgagcagacggaggttccggcaactggacaccattgggatgacggcaagatcacgactgaaccgacctgcgaagacaagggcgtaaagacctttacctgcacggtctgccacaataccaaggtggaagagattcccgacaaggggcacgagtgggatgacggcgtagttacgaccgaacccacctgcgaagatacgggtgtaaagacctatacctgcgcggtttgccacgcgaccaagacagaagagatccctgcgaaggggcacaccgaggtcggggatcccgctgtggcatcgacctgtcagaaagaaggactgtccaagggatctcactgctcggtttgcaataaggtgctgacggagcggaagcctgtagggaagcgggggcactcccttgtggagctgccgcgtgaggagccgacctgcgacaagcccggtcataccagcggaatgagctgcaccatgtgtggcgcagttgtgttcgggcataccgagatcccggctcttgggcatcgcatggagaacggcgtttgcaaggtgtgcgggtacgttgcaccgaccgaagaggaaagcacgccggaaaacaaaaccgggaacgatgggtga

SEQ ID NO: 1645 - DNA, 1452 bp, Unknown
  Unknown gut bacteria
ttgcatacagaggtcatgaaagcaaggacattcagacacggtattcacccggcggacggaaaatcgctctcggcgtcctctcccatccgcctgtttgtgcccaccggggcaggggaggcggtgtacccgctctcccagcacatcgggacgccggcggtgcccgtggtttcggtcggggaccgggtgcgcgccggacagaagctggcggaggcggggggctttgtgtctgccccgatatacagtgcattttccggtaccgtgcgggcgctggagccgcggactgcggcaggcggcgagacggttccctgtatcgtgttggagacggatgccgaaactgagtggatcgaccctcggtttgatccggcaacctccggtgtgttcaatgcgtcctccgtggctgcctatatggcaagcggagcgcccgaacacctgactgcggaggatatccgtgctgccgtgcgggaagccggcgtcgtgggtctgggcggtgccggattccctacggcggtcaaactgacgcctaagaatccggacgcaatcgaccgtcttatcgtgaacggcgcggaatgcgagccatacctgacctcggatcatcgcctgatgctggaacggggcgaggcactggtagcgggttgccgcctgttgctcaggctgttccccggtgcggtctgcgtgctggcggtcgagaataacaagccggacgctatcgcgcacctgtccgatcttgtccgggcgtgcggcgatgcgcgcctgtcggtgtgtcctctgaaaacaaaatatccgcagggcggcgagcggatgctgatccgcgcagtcacgggacggtacctcaattcccgcctgctgcctgccgatcggggttgcatcgtaatgaatgtcgcctctgtccttgcggcatacggcgcgatctcgtgcggtcgcccgctgacgcactgcatcatgaccgtgaccggggatgccgtaagcagtccctgcaatctggaagtgcccgtcggaacctcttacgcagctgtgttggcggaggcgggcgggttttcagccgagccggagaaggttatctccggcggccccatgatgggcacggcgctgttttcactggatatccccgtaaccaagaccgcctcgtccattcttgctctgcgtcacgatccggtggcgcttcacgatgcctccccctgcatccattgcgggcactgcctgcatgcctgcccggagaaacttgtgccgcagctgttgtcggctgctgccgagcaggagcagtttgatgtgtttgagaagtacggcggaatggagtgcattgaatgcggctcctgcgcctttgtatgccccgccgggcggcatctcgtgcagagtatgcgttacggcaagcggcagaccggcgcccttatccgggcgcggaaggcggcggagatatccaatcagactgtgcagaagggaggcgccggaaaatga

SEQ ID NO: 1646 - DNA, 933 bp, Unknown
  Unknown gut bacteria
ttgcacatgaaaatcgcaattatcggcgcaggcgccatggggtgcctgttcgcttgcctgttggataactatgaagtcacgctgtacgacgtcagtcctgttgccgtagagcgcatcaaccgggacggcatcctgttgcaggagccggacggcaccgaatcccgccaccgtattcccatccgcttcagcggcgagggacaggaaccgcaggatcttgtcatcctgttcgtcaaggatacggcgggagaagctgcgctgcgcgctaatctgggacttgtcggaaaggacacggttctgctctcgctgcaaaacggtatgggaaactttgagatcatgcaacggtacgtccccgcagagcgtattctgcttggcacgacacggcacaactgcgtcacgcgggcgcccggcgttgtctaccattccggagccggcgaaacgcagatcggctcaccgaccggcgatttcgcaatggcagaagcaactgccgccgtactgtcctcggatgcgtccgcggtagtcgcctgcccggacgtcaagcgcctgctgtgggcaaaactgatgctaaacatgacagtgaatcccatgaccgcacttctggattccaccctcggcttcgccggggagaatccgcatgcgcagagcatcatccggatgctggttgctgaggcggtcgccgtggcggcggcagacggcgtgacctttgatgcggaggctgtcatctcttccatcatacagtccgcccgcgcgcttgctaccgggcgtgcatccatgtgtcaggatatccgggcaggacggcgcactgagattgatttcatcaacggctccgttgtgcggctgggcaggcagtacggcatccccaccccgtgccacgagttgatggttgatctcatccatgcgcgggaggatcggaacgacacggaaaaagccgaatga

SEQ ID NO: 1647 - DNA, 1332 bp, Unknown
  Unknown gut bacteria
atgaagaaagtgcttgccgtcctgctcgccgcgatctttgctctgtcctgcctttccggctgtcgggagcagcccctgcttgatccgcatgatcccgtcgtgctgacgctgtggcacacctacggcgagcaagccgactcgcccatgaacaggctgatcgacagattcaattccaccgtgggcatggagcgcggcgtcgtcatccgcaccacgctgataaccgtcgccgccaagatcagcgaccgccttgccgaggcgcaggacggcacgccgggcgcggtgccgctcccggatctgttcttctgtcacaacaacgatgcggcagggttcggcgtggacaggctgctggactggaacgactatttcaccggggcggagaccgccgcctttgttcccgatttccttgccgacggcatggtggacgggcggcttgcggtactgcccgtgtccaaatccacgcacgtgctgtacctcagcggcggcgaatttgaccgcttttccgcggcgaccggcgtaacccaggagagcctgaacacatgggacgggttcttttccgcggcggagaaatactatacatactccggcggaaagcccttctgcgcccttgactatctgctccgcgcggtggagctgtacgccgtgtcggcgggcgcggacgcctccgccttctacagggacggctggtatgacttctcggatgcttccctgaaggcggcgtacctgcgctttgccgaggctatcgccaaggggcatatcgtggttgccgaccagtattccaacacgcaggtgatgacgggcgagacgcccgccggcatgggctcgtcggctggcatcctgtactataacgacaccgtgacctatccggacaacacccccgagccgatgaggctccgggtttgccccatgccgtatgtggaccgcgcgcgccgggtggacacgcaggcgggcgtggggctttgcgcggtgaagtccgatgagcggaaagccgaggcggcttccgtctttgcccactggcttacggagggcgggcgaaatctggatttcgccgccgagacgggctatatgcccgtgaccgccgatgcgtacgccgggcttgacacgtacaccttccgcgatgacggctaccgcagtctctacaccgtgctgaatacggtcaaaagcgggtacacgctcctgcgcgagccgtcctatgcgggctactacggcagggtgaacgggctgtatgccgagatccgcaaggtacagtctgccttcccggcgcggatacagggcggggagagcgccgccgcgcttgccgcggagctgtgggagcttttccgcacggtgaaataa

SEQ ID NO: 1648 - DNA, 951 bp, Unknown
  Unknown gut bacteria
atgattctcatgacaagaaaagtacttgctttcctgctctctctggctatgctcgggctggctctgccggtctccggagcggatgccgacaatcagccggacacgctgaaagacggctacgcctacgtatccgaccttccgtggaagtcctccaacgccctcgccgggacgcaggtcacgcgtgacgggaacaacaacgctggagagaccatatactcccctgatctgctggtgtatgccaaaggcgtcggaatgcacgcctgcgacaataatttcggcagttatgtggagcttgacatctccgggtacggttttaccaagttcgccgcgcgaatcggcatggtcattacgttgagcgcctacgacatcacgatggcggacgcgatcttttccgtgtccggtgacgggcgcgagctgttccgctccgatctgatgaagtatatgcaaccgttcgctatgatcgaggtggacgtgaccggtatccgcacactgcggctggctgtctcgggtgcgggaagtattgccggcgattggtgcgcgtgggcaaacgctgtgctgagtgtttccggcgatgtggagcagctgttccgggcggacggcgtgctgatttacgacgccaatgccgcggagccggcagaaacccacacgagcgagccgcccgttactacggcgacagaacccgtcacgcagacagagcctgttacgcagaccgacccccctgtgacttctgcggctacggcggagtcgtccatgcagacggagacgccggagacggaacagacttctgccgtgccggaggggtcggcggcggagaccgaagcatccgctaccgtcgggacggacacaggatgcgcttccgtgctgggtgcgggagcggtcggcatcgtggttgccgccgtggcagcaggggctgcctgccgcggaaaaaacaaggaggatgaggacgcatga

SEQ ID NO: 1649 - DNA, 1086 bp, Unknown
  Unknown gut bacteria
atgagtcgccgggggtgccggaagtctgccggggcaccggctcagccgcgccgctaccgctacgtccgctccttcagcaaccggattatcctgcttctttcctccattatggttgcggcatcgctgctcacgattctgctgtactggctgctctatccgatcctgccgagcgagatgtacgcaccgatccttgccgtcgcgctgagtcttgcgttttgccttctggcaggatgccttctgtctgttatcctgtccaaaaagatataccgcccctttgaacagctcatccgcgcgacggagaaaatcgcgcagggggatttcaaggtccggctggcggaaacggcagacccgggatcggatctgggcgcactccagcgcagcttcaaccacatggcgagcgagttggacagcaccgagattttccggaacgattttatcaataatttttcgcacgagttcaagacgcccatcgtgtccatccgcggctttgcccggttgcttcaggagggcaatctgactgcggagcaccacgaaaattacgtgaaaatcatccccgccgagtccgaccgccttgccaatatggcgaccaatatcctgcttctttccaagctggagaaccagaagattgtgacagaccgcacgcgcttctacctggacgagcagcttcgccacgccattctgacgctggaaaagcagtggtcgtcccggaatatcgagctggatattgatctggatgaggtcatgtacgagttcaacgaggatatgctgctgcaggtgtggctcaacctgttcggcaacgccttcaagttcacgccggacggcggaacggtattctgcaccctgcgacaggagaaaaacgaggcggtcgtcagaatccgggataccggatgcggcatgagcgatgcggtaatcacacgtattttcgagaagttctaccagggggacacctcccacagttccgccgggaacgggatcggactgacaatcgtaggtcggattctggttctttgcggcggacagatacaggtcgaaagcagtcccggtcagggcagtacctttacggtgcgcctgcccatgaccgcgtag

SEQ ID NO: 1650 - DNA, 555 bp, Unknown
  Unknown gut bacteria
atgaagaaggatattctggcgctgttcgtgatcgttctgctggtcgccgttgtcatcaacggaaccaatatccagtctgtggacgagtactacctcacgcatatcgacgatattacgccggacagcgagacggttaccatcagcatccggtgtgatacgattctgcagaattacggggatctggatcccgccctccgctcggacgagttcgtgccgccggacggcgtgatcctgccgccgacccgttacgtgctccgtcccggcgatacggtgtttgacatcctcgaccgcgccgtgcgctataaccggattcagatggagtatcagggcgcgcgggaaaacagtttcgggagcgtgtacatccagggattgcattacctgtatgaattttcctgcggaccgctgtccggctggatgtaccgcgtggacggagaattcccggattacggctgttcccggtatgttttgcatgacgggcaggttgtggaatgggtatatacctgcgacctcggcagggatgtgggctgtatgtgggtggaaggagcgataccgtga

SEQ ID NO: 1651 - DNA, 2184 bp, Coprococcus eutactus
atgggatatacaatcatcacaggtaagaagaatgaccttaaggctgaggttactttctttgttcctcagaactacgctggagaggttccgcaggtcgttcttacaaatgaaggctcagaggagaagacattctcattcttctcatttgaggagtggtgtctctgggatgcacaggatgactgcaccaacttccagagaaacttcagtacaggtcgtgtagaggttgtcggatcaactatctaccacaagacagagtacagagacagacgtgaccacttcgcattctacacagtgaatgacgagatcgatggttacgatacagacagagattcattcatcggactttacaatggcttccacaacccacaggctgttgaggctggcaagtcaaatgattcatttgctgatggatggtcgcctatcgcttcacactacaagaagatcactcttgctccaggcgagacaaagactcttgtatttatacttggatatgttgagatgcctgttgaccagaagttcgaggcagacggcaagactatcaataaggtaaaggctctcgagatgatcgagaagtacaacactcctgagaaggttgctgcaggtcttgaggagctcaaggagcactggaacagactgttgagcattctcaacgttaacacacctgatgacaaggttaaccgtatggtcaacatctggaatcagtatcagtgtatggttacattcaacctttcacgttcagcttcatacttcgagtcaggtatcggccgtggtatgggattccgtgattccaaccaggatgtgcttggatttgttcatcagatccctgatcgtgcaagagagagaatcatcgatatagcttcaacacagttcccagacggtggatgctaccatcagtaccagccacttaccaagaagggtaacgcagatatcggtggagacttctcagatgatccattatggctgatcctttcagtttcagcttatatcaaggagactggcgactggggcatccttgacgagatggttccatatgacaacgatatgtcaattgcaaagcctatgcttgaccacctcaaggtttcattctacaagatcgtgaacaaccttggaccacacggacttccacttgcaatgagagctgactggaacgattgtatcaacctttcatgcttctcagatacaccaggtgagagcttccagacatacaccaaccctaagttcgctgctgagggtggatactcaaaggttgctgagtcagttatggttgctacactcttcacatatgcaggtcctaactacgttgctatccttaagcaccttggaatggacgctgaggctgatgctgctcaggctgagatcgacaagatgaaggccaacatcatggagtcagcatgggacggcgactggttcctcagagcttacgatgcaaacggtgagaagatgggatccaaggagtgcgaggaaggtcagatcttcatcgagccacagggattcgctatcatgtcagacatcggtaaggatcagggctgcgacaagaagactcttgctgcaatcgatgagagacttaatacacagcacggacttgtactcaacaacccagcatttacaaagtattacatccagtatggtgagatttctacatacccaggtggatacaaggagaatgccggaatcttcacacataacaatgcatggatcatctgtgctgctgcttacgcaggtgccggtgatcaggcatttaagtactactcagagatagctccagctttcactgaggagacatcagatatacacaagactgagccatatgtatacggccagatgatcggtggtaaggatgccggatctgatatcggcaagccgggcaaccacttcggtcagggtaagaactcatggctgactggtactgctgcttggaacatggtagctatatcacagtacatccttggtatctcagcagacttcgatggtctgaagatcgatccatcaattcctgctgcatgtgatggaatgacagctacacgtcagttccgtggtgctacatacgacatcaaggtttctaacccagctcacatcaacaagggcgttaagagcgtactcgttgatggcaacgctatcgagggcaacgttatcccagcatttggcgatggcaagactcactcagtagaggttgtaatgggctaa

SEQ ID NO: 1652 - DNA, 1407 bp, Coprococcus eutactus
atgggtggattttttggagtagcggcaaaagatgactgtgtgtttgatctgttctttggaatagactatcattcacatcttggaacaagacgcggaggcatgacagtgtatggagataagggatttgacagatccatacacaatatcgagaatgctccatttagaacaaagttcgacaaagatatgcagaacatgaagggttattttggaataggatgtatatccgattatgagccacagccactcatagtgcgttcacatcacggaacatatgccctgacgacagtcagcaagatcaacaacgttgacgagatatccaaggagatatttgatcagggacattcacatttccttgagatgagcggaggggatatcaacagcacagagctggtggcagcccttatcaaccagaaggataatctgatagatggaataagatatgcgctggagaagatagacggttctctgtcactcctgctcatgaaccagaatggaatatatgcagccagggatatgcgtggaagaactcctgtggtcataggcaagaaagatggtgcattctgtgcgtcatttgagaactttgcctacaagaaccttggctatcatgactataaagaactcggtcctggtgaggttgttgtactcacaccgtcaaactgcgtgacgcttgtgcaaccgggcaaggacatgaagatctgtaccttcctgtgggtatactatggttaccctgcaagttcatacgagggtatgagcgtagagcagatgagatacaactgcggagccagcatggcaaagagagataacgttaagcctgatatcgtagccggagttccggattcaggaacagcgcatgcagtcggctatgcaaatgagtctggaatacctttctcaagaccatttatcaagtacacaccgacatggccacgttcatttatgccgaccatacagagccagcgtaatctcatagccaagatgaagcttctggcagttgaggatcttataaaggataagagccttctgctcatagacgattccatcgtgcgtggaacacagctcagagagacaaccgagtatctgtttgacagcggtgccaaggaagtgcacatcagacctgcatgtccaccacttgtatacggatgtaaataccttaacttctcaagatcatcatcagagatggatcttataacaagaagagttatcgagagacttgagaatggaaatgtgacagatgaggtacttcaggagtacacagatcctgattcagagaagtatgagaagatggttgatgagatctgcaaggagctgcatttcacatcactcagattcaacagacttgacgatatgcttgaggcgtgcggagttgagaagtgcaagctttgtacatactgctgggatggtaaggagtaa

SEQ ID NO: 1653 - DNA, 1026 bp, Coprococcus eutactus
atggcaaaatcagtaaaattgggagacatagctgccattgttggcgtgagtaccgtgacggtctcaaaggcactttcagatcagaagggtgtcagcgaggagctcagagcacagatcaaacaattggcagatgagatgggataccagtcaccatctgagatcagaaagaagacggcaaagaaaaagtataatattggtgttctcattcaagagatatatcttggaaagtatccgtcgttctattggcagttatatcaggtgcttaacaaaaaggcggtggcaagaggctgctttactatgctggagtttgtttccagagatagtgtattgaacgctgagatgcctatgctcttggaggacgacaaggttgatggaatagttgttgtaggttccatgggtaaggaatacctggaaaagctggagaagacagccaaggttcctgtagaatatgtggattactatgacaattcgagaccgatagacacggttatagcaaacagtttctatggaagctatatgctgactaattatctgtatgatatgggacatagagatattgcatatgttggcacgataggttcaacgaacagtataactgacagatatttgggctatataaagtctttgttggagcatgatattccgctcagagaagactgggttattccggacagagatgtgaagacgggtcagtttgacgaggagaactgttttaaacttccaaagaatatgcctacagcgtttgtgtgcaactgtgatcttgcggcagctacgctcataaagatactcaatgctgcgggctacagagttcctgaggatgtgtccgttgtggggtttgataattacatgtatcctggaagctgcgatataggcgtgaccacatacgagatcaatatgcaggagatggcagagagaaccatgcataagattataaaaaagatatccaacgaaaaatatactgatggcatatttgtcgtggatggacgaatcgtggtaaaggatagcgttgccagaatagaacgataa

SEQ ID NO: 1654 - DNA, 720 bp, Coprococcus eutactus
atggaatcaatacagacaaacgctctgaacagcaaatacatcaattcactcctgcgcccggaggaaaatcctttcatgcaggagatgcagagttttgaggagatcatgatgatgtattcatgtgccatcagagaggtgaagacaaaatttgaagtgctgaacgatgatttcagcgtaagatataagagaaatcctatagaattcatacagtcaaggatcaaaaagcctgtcagcattgccaaaaagcgtgcaagcaagggctgtccggttacatgtgcaagtatactgaacaatctggatgacgtcgccggaataagagtcatctgcccattcatcgatgacatatacatggtggcagaaaagctcataagtcaggacgacatcaccctgatcgaggcaaaagactacatatcgcatccaaagccaaatggctaccgcagtctgcatgtcatagtcgagattcctgtgttcttcgcagaccacacaaggaatatgcgtgtggaggtacagatcagaacaatcgcgatggacttctgggcgagcctggatcaccagctcagatataagaaggatatcccgaccgtagacatgatatccgcacgacttaagaaatgcgcagatgtgatatccgcaacagaccttgagatgcagtccatcaagaacagcatttatggtcagcgatatattcctgaacttaagagagaatcacctaaagaataa

SEQ ID NO: 1655 - DNA, 2430 bp, Coprococcus eutactus
atgaatacaccaatttcatggataaaggcatatgttcctgatctggacgtgacagctcaggagtttgtagacgccatgactctctcaggatcacatgtagagggttacgaacagaaggataagaatcttgacaagatcgttgtcggcaagattctcactatggagaagcatccggatgcggacaagcttgtagtatgtcaggtagatgttggacaggcggagcctcttcagatcgtgaccggagcaaagaatgtaaaggtcaatgatctcatcccacttgtacttgacggtggtaaggttgcggcagcacacggcgacaacaatgagtaccctgacggaatcaagatcaagaagggcaagctcagaggagttgagtcaaatggtatgatgtgcggtatagaggagcttggttcatcaagagacttctatccggaagcaccggaggatggcgtgtatgtattcccggtggagtcaggtgtgaagccgggcgatgacgctgtgaaggcacttggacttgacgatgttgttgtcgaatacgagatcacatccaacagagttgattgtttctcaatgatcggtatggcaagagaggcagcagctacatttgacaagtcattttacccaccagtggtaacaaagacaggaaatgatgaggacgtcaatgactatatatcagtagaggtaaaggatcctgacctctgccctagatacacagcaagggttgtcaagaacctgaagatcggaccttcaccaaagtggatgcagcagagacttgcttcacagggaatccgttcgatcaacaaccttgtcgatataacaaactacgttatggaagagtacggacagccaatgcacgcatatgatctcagcaccatagccggcaacaagatcgttgtccgccgtgcaaatgacggagatacatttgtaacacttgatggacaggagagaaagctcgaccatgacgttctgatgatctgtgacggtgagaaggagatcggtatcgccggaatcatgggcggcgagaattccatggtaacagacagtatcgatacactgctctttgaggcagcttgcttcgatggaacaaatatcagactttcatcgagaagaatcggacttgcaactgatgcggcagcaaagttcacaaagggacttgacccaaatcttgccatggaggcaatagacagagcatgtcagctcattgaggagatgggcgcaggtgaggtagtcggcggagctgttgacgtatatccaaatcctgtacaggacaagaaactcccatttgagcctgataagatgaacgcacttctcggaacagatgttgagccagagaagatgctgtactacttcggtagacttggtctcacatacgatgcagatactaacacactggatgtgccaagtttcagacaggatctgaactgtatggcagatctggcagaggaggttgcaagattctacggatacgacaacattcctgtatcactcccaagaggtgaggcaacagttggtaagctcccatacgaccagatgatcaatgccatcgcaagggatgtccttgaggcaaatggtttctctggcggtatgtgctactcattcgagagccctaaggtatttgacaagctgctactgcctgctgacagcgagttcagaaagacagttacaatagcaaatcctcttggcgaggacttcagtatcatgagaacagtatcactgaacggtgttctcacatcactggcaacaaattataatagaaagaacaagatcgcaagactttatgagttcggaaatgtataccttccaaagtcacttccactcacagagcttccagaggagagaatgaagcttactatcggtatgtatggtcagggagatttctttgatctcaagggagttctcgaggagcttacagacaaggttggtctcaagggacaggtgacatacgagcctgagtcagagtacacattccttcatccgggccgtcaggcaaagctcaagaagggcaacctgacaattggatttatcggacaggtacatcctgaggtatgtgacaactacaaccttaagggggaggtatatgttgcagttatagatatgcctacactggttatgctgtcaagcttcgacatcaagtatgaaggaattgcaaagttccctggaagtacaagagatctgagtcttgttgtggacaaggaaatatttgtcggacagatagaggaagtcataaagaaatgtggcggcaagctgcttgagagctacaaacttttcgatgtatatgagggtgagcagatcgcaaagggcaagaagtcagtggcttacacaatgacattccgtgctaaggatagaacacttgagacatcagaggtcgatggaatcattgccaagatcctcaaggagctcggcaagctcggaatcgagatcagagcgtaa

SEQ ID NO: 1656 - DNA, 489 bp, Coprococcus eutactus
atggcaaaggtagagttaaagaagccaatagtagaagagatcaaggcaaatcttgaaggcgctgctactgcagtagttgtagactatcgtggtcttacagttgagcaggatacacagctccgtaagaatttaagagaagctggtgttgtatacaaggtatacaagaacacaatggttaacttcgctatcgagggaacagagttcgaaggccttaagggttgtttagagggaccaactggtcttgcaatctgcaaggatgacgctacagcggctgcaagagttcttgcagacttcgcaaagaatgccccagctcttgagcttaagggcggcgttgtagaaggtacattctacgatgcagaaggaatccaggttattgcaaagatcccttcaagagacgcgcttatttccaagttccttggaagtatccagtcacctatcgcaaacttcgctcgtgttatcaagcagatcgcagagcagaaggaggcttaa

SEQ ID NO: 1657 - DNA, 1245 bp, Coprococcus eutactus
atgaacaagaagatatatgacggttatacatatgtagacggtggcgtgtgtgcggccaagggtttcacggcaaatggacttaactgtggactgaaccctgataagaacaagaatgatctcggaatggtattttcagaggtgccatgtgtggcagcaggcgtgtatacacagaacaaggtgaagggcgcaccggtcacagttaccaaggaacacctgaagaaatctggcaacaaggcacaggcagtcattgtgaactccaagaatgccaacacatgcaacgcggatggaatagagaaggctgagaagatatcccagcttgcagcggatgccctgggtatagatgtgaaccttgtcatcaatgcttcaacaggtgtcatcggacagatcatccctatcgagccatttgaggagcatatgaaagaacttgcagacggtctcacagcagacggcaacgacaaggctgcaaatgctatcatgaccacagacacagttgacaagcaggttgctgtccagtttgacatagacggagtgacatgcaccctcggaggtatggcaaagggaagcggaatgatccatccaaacatggctacaacgcttaacttcatcacatcagacatagccattacatcagagctgatccagaaggcgctctcagagatcgtaaaggttacttacaactgtctctcagtagatggagaccagtccacaaatgataccctgacagtcatggcaaatggccttgctggcaacaagctcatcgacacggagaacgaagcttatgagaagttcaagaaggccctctatatagttatggagtgcatgaccatgatgcttgcatcagacggcgagggcgcaaccaagatgatcgagtgtacagttgcaggggcacctgaccttgacacagccattatcgtggcaaagagcgttatccgttccccacttacaaagtgtgctatgttcggcgaggatgccaactggggacgtatcctctgtgctatcggatatgcggaggcagactttgatatagataaggttgcagtagatcttgagtcagaatttggcgtggttccagtatgccgcaacggcgcaggcgtaccattctcagaggagaaggcagccaaggtattgagctcagatgaaatccacatcaacatagatctcggaatcggtgacgtgacagccaaggcatggggctgtgacctgacatatgattacgtgaagatcaatggggattatcgttcataa

SEQ ID NO: 1658 - DNA, 273 bp, Coprococcus eutactus
atgaataagacagaattagttgcagcaatcgctgagaagacagaattatcaaagaaggacgctgaggcagcattaaaggctttcacagacgttgtagcagatgagttaaagaaaggtgagaagattcagttagttggatttggtacattcgaggtatcagagagaccagctagagagggtagaaacccaagaactggcgagacaatgacaatcgctgcttcaaaggcacctaagttcaaggctggaaaggcattaaaggattcaatcaactaa

SEQ ID NO: 1659 - DNA, 2622 bp, Coprococcus eutactus
aaagaattcaagacagacagccgcggactgtcgacggagcgggcagaggagatccgcagtgaaaagggagaaaatgttctccaggaaggcaagagaaagagcacattacaggtgttcctcagccagttttgtgacctgctggtgatcatactgatcatagcagcggtcgtttctatgttttctgacaatatcgagagtaccatagtaatcttggcggtactcgttatgaatgctgtgcttggaacggtgcagcatgtgaaagctgagcgttcgcttgacagtttgaaacagctttcatccccaaatgcaaaagttatgagaaatggtgtgaagcaggagcttccgtcccgcgagatagttccgggtgatatcgtgctgctcgaggcgggcgatatgatagttgccgatggaaggatactaaggaacttctcactccaggtaaatgagagttcactcaccggagaatctacaaatgtggaaaagaatgatgcaataatagaaggttccgtgcctcttgcagacaggacaaatatggtgtattcaggaagtcttgttacatacggacgagcagaggtgcttgtgaccggaacaggaatggatacggagcttggtaagatcgcaggacttatgaatgcggcaaaggagagaaagactccgcttcaggagagccttgacaagttcagtgcaaggcttgcggcattcatcatgatcgtgtgcgcgctggtatttgtcctctgtatatacaggaagatggcggtgcttgattccatgatgttcgcagtcgcccttgcagttgcagctatacctgaggctcttggttcgatagttaccatcgtgcaggcatttggcacccagaagatggcgaaggagaatgcgatcatcaagaacctcaaggcggttgaaagccttggatgtgtgtcagtcatctgctcagacaagaccggaacacttacacagaacaagatgaccgtgcaggagatatatctggatggaaaactttacaagccggaggagcttgattcccataaccagctccacagatatctgctatatgatgcggttctcaccaatgattccagcatagtggatggaaaaggaataggagatccgacggaatatgcattgcttgagatgttccgtcaggtccacatgatgccaggcatggagacggatggtacaggtatctctgttcctgcggagactgtaaaatggagtctgaaggaggatgtactcagggactgcatggacagaatggaggaggttccgttcgactcggacagaaagcttatgagtacaaagtatctgcttcatggggttccgaccatactcaccaagggtgctgtggatgtgctgcttgacagatgcgtgagcgtgagatacagcgatggcgtaaagcctatgacagatgaagaaaaagcgaagatcaaggctcagaacaaggcattctcagagaatggcctccgtgtactgtcatttgcatataaggaaagtgatgaggtactgggtgttgatacagagtatggatttacatttcttggacttgtgtccatggtggatccaccacgtccggagtctatggcagcggttgccgatgcaaggcgtgcgggcataaagccggtcatgataactggagaccacaagatcacagcggttgccatagcgaagcagatcggaatatacgaagatggggacatggcactcacgggagaggagcttgacgctctgtctgatgaggagcttgcacgtgacataacaaagatatctgtatatgccagggtgtcaccggagaataagataaggatagtcgatgcatggcagaagaacggcaatatagtagccatgacaggcgatggtgtcaatgatgcccctgcactcaagaaggcagacataggtgttgccatgggaataaccggcacggaggtgtccaaggacgcggcggccatgatcctctcagatgacaactttgcaaccatcatcaaggctgtgtcaaatggacgaaatgtatacaggaacataaagaatgcgatactgttcctgctgtcaggaaacacagctggaatactggcggtgctttacacctcgatagccgccctgcctgttccgtttgcaccggtacatctgttgttcatcaacctactcacagattctcttcctgcgctcgcgataggaatggagccggctgacccatcgctgctatcagaaaaaccgagggatcctaagaagggaatcctgacatctgactttatggcaaagatgctctcggagggccttctcatcgctgtagcgaccatgacagcattccatcttggactgccggtaagtccggcaaaagccactaccatggcatttgcaacactgacacttgccagactgttccatggttttaactgcagaagtgaggagtcgatgtttaagcttggatttagatcaaataaatacagcgtatatgcatttttagccggagtggcatttctggctgcggttctgttcataccgggacttcacagtctgttcagcgtggtaagtcttggagcagcggatgtgctgaagatagcgggacttgcatttgcaccaactgcgataatacagatcattaaggccatacaggataataggagatag

SEQ ID NO: 1660 - DNA, 588 bp, Coprococcus eutactus
atgcatatggaaaatagctggatagaagaattttacggagagacggatgcggataagagacttgaactgctggaaaataacagcacggatatggatggtgacagcgccggttcgtctactgccttccgtcagagattgtggacggcgagatatggcaagagaaagccgaagaatgatgcatttgtgggctgccttatggagctcaaatacatatcggagggcggttctgttgacatcggaggtcagaaaaagaaacaggcagtggagattataagcaagctctgcctgttcgacgcagacaggagaagtgccgaggaacaggagatattgctatatgaactcaagaatgcgtttctcaagttcatcgaggtgagcagaggcggcagaggtttcacatccatagcatttggtatggggcagctctcggatgagggcgtggcgaagaagatcgcagatcagataagctccatcgcatttgacgcgccgcatatgctgcacatggacaaggaatttgccatacttcagagcgcagcactggcggcattcaggcaggagtatccgaacagggagcatttcttaagaaaatga

SEQ ID NO: 1661 - DNA, 888 bp, Coprococcus eutactus
atggcaaagtatatattgagctgctgctcaacagcagatctttcaaaggagcattttgacaaaatagacgtaaaatatatatgctttcactacgagcttgatggtgtggagcatcctgatgacctgggacagaccatgccatttgaggaattttacagaaagatgacagagggtgcggctacgaagacctcgcaggtgaattcagatgaatattatgatttctggaaaccttatcttgaacaggggtatgacatacttcacctgacattgtcatcgggaataagcgggtctataaactctgcaaatattgccagggaggatctggaggaagaattccctgacaggaaactctatgtggttgattccctgggagcgtcctcgggctatgggctcatcatggacacgctggcaggaatgagagatgaaggcaagtccatagacgagctgcatgactggatagaacagcataagctggacctgaaccactggttcttctcaacggatctcacgttttatatcagaggcggaagaatatccaagactgctggaacggttggcacaatacttggaatatgtccacttctcaacatggatgacgagggcaggctgataccgagatcaaagataagaggtaaaaagaaggttattcaggagatagtaaagcgcatggaggagaatgcacaggatgggcttgattattccggcaagtgctatatatcgcagtctgcatgtatggaggatgccgaggctgtggcaaggcttgttgaggagagatttccaaaacttgacggcaaggtggagatcaattatataggaactaccataggaagtcatacaggacctggcacagttgccttgtttttctggggcaaaagacgtcaggggtag

SEQ ID NO: 1662 - DNA, 1080 bp, Coprococcus eutactus
atgatcatgaaagcttttttgatacttgaagacggacacgtgtttgaaggtaaaagtattggctctactgatgagataatcagtgagatagtattcaatacttcgatgaccggctatctggaaattcttacagatccatcatatgcagggcagtcagtatgtatgacatatccgcttataggcaactacggtgtatgcagagaggatatggaggctggcagaccttggcagtcaggattcattgttagagagctctgcaagactcctagtaatttcagaagcgagatgaccataaacgaatttcttgttgagaataatataactggtatagaaggaatagataccagaacacttaccaagatcctcaggaaagatggtaccatgagaggtatgatcacaactgatgagaattatgattttgatgagtgcatgaagcgtattaaggcatggaagatgggacatgttgttctcgatgttacatgtaaggagaaaatattctatcctggtgacggattcaaggttgcagtcatcgatctcggtgttaaaaagaacatcgtcaagtccctccttgcaagaggttgtcaggttactgtatatcctgcagagacacctgctgaggagatcatcgcagacgctccggacggaatcatgcttacaaatggtcctggagatccaaaggagtgtaaggtcacaatagctcaggtaaagaagcttttcgatacagatattccaatttttgctatatgtcttggacatcagctcatggcgcttgccaacggcggtgatacagagaagatgaagtacggacacagaggtgcaaaccatcctgtaagagatatgaagaccggcaaggtatatatttcaacacagaatcacggatatatggtcaaggaagacagcctcgacagaaagatcgcagaggtcagcttcgtcaatgtaaatgacggaacagtagagggagttcactatcttggaaagaatgcacagacagttcagttccatccggaggcatgtgcaggtccgctggatacagattcactgtttgatacatttatgaatatgatggaggtgtcaaagtaa

SEQ ID NO: 1663 - DNA, 621 bp, Coprococcus eutactus
atggcatcagttaaggtttatgacattgaaggcaaagaagttgagacattagagctcaatgatgcagttttcggtgtagaaataaatgagcatataatgcataaggctgtagttggtcagttagccaacaaccgtcagggaacacagagcgctaagacacgttcagaagtttctggtggtggaagaaagccttggagacagaagggaactggtcatgctagacagggttcaacaagatctccaaagtggacaggcggcggagttgtattcgcaccaaagccaagagattattcagttaagatgaataagaaagagaagcagcttgctatgaagtcagcactttcatcaaaggttgctgagaacaagctggtagtagttgacaagcttgatcttcaggaggctaagacaagcgtatttgcaaagatccttgcaaagctttcagctcctaaggctcttgtagtaacaaaggataagaacaataacgttgttctttcagcaaacaacattccaacagttaagacaacagtagctaattcacttagcgtatacgatattctcaagtatgagaagcttgttcttactaaggaagcagttgcagcaattgaggaggtgtacgcataa

SEQ ID NO: 1664 - DNA, 1692 bp, Coprococcus eutactus
atggataatacaattgataaaagcatacaaatggacagtcagatgaaagaattcttcgagtgcataagcggggacgcggatacacagcaacagagaatccagtgtataaggaatggtcttgctgctattgctgacaggctcaggctgggaaaggcggagattactgttgatattccgaaaaacaggtttatgccgcttggagaaagaagcagcgcggtattatacgaggaagaaggggctgaattgggtactcccgttgatatagagatgaagatcagaaccggtggtactgtgtttatcaaggattatccatatggtccgggttattcagaagaggagatacagacacacaggtttatatttagggagatatttattcagtacaaccggacattggctcagtgcatgcttgaaaagatcatgaatacagatataaacacgggtgttgccaatcagaattccctgatgtattatgcggtgaatctgataaataacggacggattggtgattatacaggcatattttttaatatccacaatttcaagtatgtgaataaggtttttgattattcacagggagatgtgatacttagaaattatgcgcatatggtgaagtcatatcttgacagcgatgaggagatagcaaggcttggaggagataattttgttgtaatctgtcgtaatgagaatgcgtctgattttataagcaagattaaagatgttcatatgagtcatgagttcagatctgtcaaaagagaattacagctgggagttacagcgggtatagcctgcctggaaggcgttgataagccgagggaagttatggccagaaccagcattgcgtatcaggcagcaagaaaaaccggagcgggctctatagtggtatatacaaaagagattcagaagcaacttatggatgatcaggagattctggctgcttttccccaggcacttgctgcgggcgaatttgtagtatattatcagccaaaggtgaggattgcggacaaaagtatatatggtgcggaggcacttgtccgctgggtgagagatggacaggtggttacacctgcgagatttataccgcagtttgagagagagggaagtgtgtgcaggcttgactactatatgcttgagcaggtatgcggttttttgaagagcagactggataaaggtctgaagattgtgcctgtatcagtcaatttttccagaagacatctggaagaaggcgatctggtggaacgaataaccggtaccatagacagatttgggatagacagaagctatattgagatagagctcacagaaagtgaggattatcagaattatgagatcatgtccagcgtgataggaagactcaaggaacgaggcataagtacatccatagatgattttggcacaggattttcttcactcaacatgatcaaaaaggttgaccttgataccatcaagatagacaaatcgctgataccttttgacgatgtaaacaataataagcatcaggatatagtaatgttttcaagcataatagacctcataggccggctcgggaaaaagtcagttgcggagggcgttgagacaactcagcagcttgactatctggaaaagcttggctgtgatatagtacagggatatgtgtttgacaagcccctgccaaaggatgaatttgagcaaaggctggagtcgggatattaa

SEQ ID NO: 1665 - DNA, 1188 bp, Coprococcus eutactus
atggagatacagatagatatgtatcagacactggcggtgtcagttctggtacttatattgggacagtttttgaagaaaagaattaatttcctggagaaattctgcataccggcgccggtcataggaggtctgcttttcgcagtcctgacctgtgtgtgttacagtcttggcatagcagaatttacatttgacgatacgctgagagaggtgtgcatggtattcttcttcacatccgttggattccaggcgaatctcaaggttttaaagagcggaggaaagtcgttgttcatattccttggactggttgtggtgcttatagtgtcccagaattttctggcactcggggtgagtaagctattgcatcttgatccgcttgttggactctgcacgggatctatacctatggtaggtggtcatggaactgcaggagcgtttggcccggtgctggaggattttgatgtcaagggggcaacaactatatgcacggctgcggcaacatttggacttatcgcaggaagtcttataggtggccctattggcaagagactcatagacaggaagaaacttctggatactgcagttgccgaggacgacagtatactggttgaggatgagaagaaacatgagcgtcataccaatatgtatgcggcagcagtgtttcagctcatcatagcagtaggaataggaaccatcatatcggaactcctcacaaagacaggacttacatttcctatatatataggtgcgatgatcgcggctgcggtcatcagaaatatcggagagtattccggcaagtttgatatatacatgggtgagatcaacaaccttggtggtatctgcctgtcactgttccttggaatggcgatgatcacactgaagctgtggcagcttgcagaacttgcacttccgctgatcatactgctctcggcgcagctcatactcatgatgctgttcacatattttgttgtgttcaacgtgatgggcagggattacgatgcggcggttctgtccgccggaacatgcggattcggtatgggagcaacgccaaatgccatggcgaacatgcaggctatatgcgaccgctatgttccttcggtcaaggcatatctgataataccgcttataggaagtttatttgctgacttcttgaacagcctggtaattacatttttcataaacatactttag

SEQ ID NO: 1666 - DNA, 2805 bp, Coprococcus eutactus
atggaattgagcaaagatatattgggaggtaggaagatggaagatagagtacttgactgggcagtatatgagaagacagcccgtgagatggctgcagagggactggttctgttaaagaacgacaacaaagctctgccacttaagcagggagagacggtttctgtatttggacgtatgcagaatcattattataagagtggaaccggttcaggcggcatggtgaatgttgccagagtggtaggaatccttgatgcacttaatgagtgcaaggatgtaaatgtcaatcagaaactggcagagacttatgccgcatgggatgaggaacatcctgtggagctgggacttggctggggacaggagccgtggtcacaggcagagatgccggttacagaggagctcgtgcaggaggctgccggcgagtcggattcggccatagtgataatcgctaggacggcaggcgaggacaaggacaatacacttgaaaaaggagcatttatgctcactgatatagagactgatatgcttagacttgtcagagagaatttccagaagatggtcgttctcttgaatgtcggcggtcttatagatatgtcatttcttgacacgatttccccggatgcctgcatgtatgtatggcagggtggaatggtcggaggatatggagtggctgatgtcctcgtaggagatgtcagcccttcaggaaaactcacagacacgatagcctacgatatcaaggattatcctgcgtatgacaatttcggcggtgaagagagaaacttctacgctgaggatatctatgtgggataccgttactttgagacatttgcaaaggataaggtcagatatccgtttggatatggattgtcatacacagacttcaaaatcggtgtaaagcatgcaagcatggattttgaaaaaggtgtggcgaatatctgtgtcaaagtcacaaatacaggaaagagacttggcaaggaggttgtccaggtgtacggtgagatgccacagggcaggcttggcaagccatccagagtactcattgattttgcaaagacaaaggagcttgttccgggactcagcgatgagttgaagtttgagattccgcttgaccgtatggcatcatttgacgattcgggagtcacgggccatagaaactgttatgtgcttgaagctggagactacactatccatgtaggaaacagcataagaaatacaacagagtgtctgttctttgagcttaccgagactgtggagcttcagaagcttcaggaggcacttgcaccatatgagaagtttgaccgcatgaaaccattctgtgatgagaacggcaggatgcttatagagtatgaggagacacctctagtcactgttgatatgtatgacaggagagagcaggaactgccggaggagataccggttaccggtgacaagggaattacgcttcttgatgtaagggaaggcagggccaccatggatgagttcatagcgcagtttgatgatgaggatctggcatgctttgtccgcggagagggaatgggaagttctcttgtgacggcgggaacagcgtccgcatttgccggggtatcgcccaatttgatcgcacataagatcccatcggtgtgctgtgatgacggaccatcgggaatgagactcgactcaggtatgaaggcattctcacttccaaatggcactctgtgcggatgttcatttaacaaagaattgaacaccagactgtatgcacttctcggacttgagatgacagcaaataaggttgaggttcttcttggaccgggaatgaatatccaccgtcacccgcttaatggacgcaactttgagtatttctccgaggatccataccttacgggttccattgcaactgcacagttagagggacttaagtccagcggcgtgtccggaacgatcaagcatttctgcggaaataatcaggagtatcaccgccatacaactgactcgatcatctcccagagggcactcagggagatatatctgaagggatttgagatagctgtcaagtcgggatatgccgactctgttatgacaacatatggtctggtaaatggtctctacaccgcaggaagttatgatctgaataccacgatactcagaaatgagtggggatttacaggcgtggtcatgacagattggtgggcatccatcaaccgcaggggtatggagccggatgcaaatgactttgcgactatgatacaggcacagaatgacatgtatatgtgctgcccggacggctcgaagaacatgggcggagataatgtcatagaggcacttcaggacggacgtatattgagagctgagcttcagagaattgcaaagaatgtgtgtaactttgccatgaatacgaatgcatttaagcgtcttgtgggagagcctgtagaggtagagataataaaccgtccaaagcaggcggacgatttttcaattgatgatgtggaatacatcaatgtcgacagagacatacttatagatctgacagagaaggccagcaccgccgacacgaattatgtcatagcacttgatgttgaacatccgggagagtatgaggtgagcctgaggggaagctcgacactcgaaaagcttgcccagctgccgtgtaccctgtttttcaacggattccctgtgagcaatttcacatttaacggaactgacggcaaggatgttgtgatcaggaaagaggtcaaattttacggcagattcaatgtgctccgactgtatgtgaaatcgaatggacttgatctcaaggatattaagtttagttttgaaaaagaattttga

SEQ ID NO: 1667 - DNA, 300 bp, Coprococcus eutactus
atggcagatatcaaatattatgacgttatacttaagccagtgatcacagagaagagcatgaacgctatggctgagaagaaatatacattccttgttcatccagaagcaaacaagtcacaggttaaggaagctgtagagaagatgttcgagggaacaaaggttgcaaaggtcaacacaatgaacaatgacggtaaggtcaagagacgtggtatgacacttggtaacacagcaaagtacaagaaggctatcgttcagcttacagctgacagcaaggacatcgagatcttcgagggactttaa

SEQ ID NO: 1668 - DNA, 900 bp, Coprococcus eutactus
atggatagatcagataaacagagaattgagggaatcgtgcagaggatattggatgatttcggcgatgacagagccatcaacaagacggatctgtgcaacgagccggataagacagccattatcgatgtgatcgacaaactcatgaagattctgtatccgggttattacagcgacaagctgtataagatatacagcttgaagaataacatgtctgttatcatagaggatgtaatattccatctgaagaaacagatcatgatagttctcaggtattgcaaaaagtttcctgagctcacagatgctgagcttgaggataaggcgatggatataacatatgaattcatggataagatacctcagataagagactatcttgagactgatatccaggcggcatttgacggagatcctgctgcgggcagcaaggatgaggtcatactttcataccctggactgtatgccatatctgtataccgtatggcacatgagctttgtctgctggatgtgccgatgataccaaggatcatgactgagcacgcccacagcgtgaccggaatagatattcatccgggcgccaccataggaaagtatttctttattgaccatggtacgggaatcgttatcggcgagacgactattatcggcgagcatgtgaagatatatcagggtgtgacacttggaggactctctacacagggaggtcagaaactcaagggagccaagaggcatccaaccatcggtgacaatgtaaccatctattcaggcgcgtccatccttggaggagagactatcatcgaggataatgttgttgtgggtggtaatacatttatcaccaactcagttgagaaggatacaagggttactgccaagaagcaggagcttcagtataaaaataattag

SEQ ID NO: 1669 - DNA, 1503 bp, Coprococcus eutactus
ttgagttcaattagttcagaggatattatttctatactcaaagaagagatagagaattatgattttgactccagggacaaagaagtcggtaaggtcatctatgtaggtgatggaatcgtaaccgtatacggtatagacaatgccatgtacggcgagatcgttgtttttgagaatggtgtcaaaggtatggttcaggatatcagaagaacagagataggatgtattctgttcggtcgtgatacaggaatcaaagaaggaacaaaggtcagcagaacgggaaagcgtgcaggcatccctgtaggcgatgcatttatcggacgtatagttgatgcccttggagcacctatagatggaaagggcagcatagagtcaacggattatcgtccaatagagaatccggctccaagcatagttgatcgtaagtcggtcaaccagccgcttcagacaggaatcctctcgatagatgccatgttcccaatcggaagaggacagagagagctgatcataggagacagacagacaggtaagacatccatagcgatagataccattctgaatcagaagggcaaggatgtcatctgtgtatatgtggctataggccagaaggcttcaacaatagccaaggttgtaaataacctgaacaaatatgatgccatggactacacgatagtcgttgcatctacagcaagtgattcagcaccacttcagtatattgcgccttattcaggtacagcgatcgctgagtatttcatgcataagggcaaggatgtgctgatcgtgtacgatgatctgtcaaagcacgctgttgcttacagaacattgtcactgcttctcggacgttcaccaggacgtgaggcatatcctggagatgtattctatctccattcaagacttcttgagagatcaagtaagcttaaggatgagctgggcggaggctccatcacagcccttcctattatcgagacacaggcaggcgatgtatctgcttatatacctacaaatgttatatctatcacagatggacagatattcctcgagagcgatctgttcttctcaggtatgagacctgctgtcaacgtcggtctgtcggtatcacgagttggtggtgcagcgcagacaaaggcgatgaagaaggccgcaggaagtatccgtatcgatctggcacagtacagagagatggaggtgttcacacagttcagttcagatcttgatgagaacaccaaggaacagcttcagtacggcaagggacttatggagcttttaaagcagcctctgtgtaatccgctgtcaatggccgaggaggttatcattctggtagcagctaccaataaggtattccttccagttgaggtttcagaggtcaagaagaagaaacttgagatgcttgaatacttccacagtgcccataaggatatcgtggatgagatcgaggagaagcaggtgcttacagatgagctgaaggacaagatagtcgcagccgctaaggagtttatcgagagatag

SEQ ID NO: 1670 - DNA, 411 bp, Coprococcus eutactus
atggtgatttcttcaaagggagaatatgccctgagggttatggcagaccttgccataaaccacgacggcagattcattccgttaaaagaaatagttcagaaagaggaactgtcccagaagtatctggagagcataatgcgcatgctgtccaaggcaaatctgatagaggcagccagtggacatggtggcggctacagactcaaaaaagcccctgaggaatatacactgtgggagatacttgaactcacggaaggtggacttgctccggtggcatgcatgaagaacagcgcaatgacctgtgacagatccggacagtgctacactttgccgatatggcagggactggcggagttgatacaggattatttccagggtaagacactggcggatatagccagaaatgtggaatga

SEQ ID NO: 1671 - DNA, 1677 bp, Coprococcus eutactus
atggattacaacaaattagcggatttgatatttgcagatataacagatacagtggatgaccttgagaagagatttccggagagagatcttccagagggagcaagggtaacaagatttgcgccaagccctacaggatacatgcacatcggtggactgtatgcagccatgatctcaagaaagcttgcaaagcagagtggcggcgtgttctacctcagaatagaggacactgacagaaagagggagcttgaggacggtgtaaatgagattatcaattcgctgaagaagtttgaccttggatttgacgagggaccatttgagggcggtaagactatatatggtccatataagcagagtgagagaaaagagatatatcagacatgtgtcaagaagcttatgcaggagggatatgcatatcctgacttcacaacagccgaggagcttgatgagatcagggcaaagcaggaggctgcaaaggttgacataggatattacggcgagtatgcagtaggaagaaatctgacatacgagcagatagaggagaagcttgcagcgggcgagccatatgttgttagacttaagagtccgggcgaggcaggaaagactgttatctacagcgatcctatcaggggcaagatcgagatgcctgagaatatcatggatgtggtacttctgaagtcagacggaatacctacataccattttgcacatgcagttgacgatcatttcatgaggacaaatcttgtcatcagaggtgacgagtggcttgcatcatatccacttcacaagcagctctttgatctgtgtggatttgcgcttccaaagtatgcgcacatcgcacctatcatgaagcttgaggttacagtggacgaggagggcgagcaccagagaaagagaaagctcagcaagagaaaggaccccgaggctgcggttggcttctatgcagagcagggattcccatcagtcagcgtgcttgagtaccttatgacaatagcaaactccaactacgaagagtggcatgcagcacatgcagacaagacaatagacgactttacattatcactcaagaagatgcctgtcagcggcgcactttttgacatggtgaagcttaatgatgtcagcaaggagatgatctcaaagctcacagccgaggagtgttacgacctcatcatggagtgggcaaaggagcatgacgagaacatatacacatttggcacacaggacaaggacggcttcatgaagaccatcaacctgtggaagatgtcaggcaagaaggtccgcaaggatgtcggcaaatggtcagatctgcgcgctatgttcggttatctgtacactcccgaggacgagctggatctccagtatgagatagacgagaagtacacaccggagatgatcacagaggttatcgaggagtacaagaaggatctcttccttgactcagaagactggttctcaagcatgaaggtcatgggcgagaagatcggctactgtccaaatgtcaaggagtacaagcagaatcctgacggatacaagggtagcatcacagatgtatgtaccatagtaagagttgccataacaggcaagcagaactcacctgacctgttcaccatcatgaacgtgataggaaaagacaagaccgtgggcagactggacaagttccttgcgtgggtgaatagatag

SEQ ID NO: 1672 - DNA, 2337 bp, Coprococcus eutactus
atgacactgagagatttgaaggtaggacagagtgccagaataaaggcagttggcggtgaaggagagctaagacagcatttccttgacatgggtgttatacccggtgcggagctcacccttgtgaagcttgctccgatgggcgatcctatggagtttcagatccatggatatgaacttacactcagactggctgatgcagagcagatagatgcagagcagatagagacaagatccagagcccacaccagagttgagatcatagaggagaaggaacatccaggacttggcgaggaaggaaaatatcacgtcaaaggggacggtgatccgcttccagaaggaacaagacttacatttgccctggttggcaaccagaactgtggaaagacgactctgttcaatcagctcaccggatcaaatcagcatataggcaatttccctggagtaactgtcgacagaaaagatggtccgataaggggcagggagaatacttccgtgacggatctgcctggaatatattcgatgtctccttatagcagcgaggagatcgtgtccagaaactttgtgattgatgatcacccaaaggctatcatcaatatagtagacgctactaatatagagcgaaatatgtatctcacaatgcagcttcttgagatggagataccggttgtcgtcgcactcaacatgatggatgaggtcacaggcaattcgggctccatagatgtaaatgggatggaggccatgcttggaaccccggttgtgcctatatctgcggcaaaaaacgagggtgtggatgagcttgtaagacacgccatacatatagccaagtatcaggaaaagcctggaagacaggacttctgtgatgagaatgagtttggcggagctgttcacagatgtatacatgcggtggcgcatcttatagaggatcatgtaaaggcggcagatctgccgcttagattcgctgctaccaagatcatagagggagatcatctcatacttgaaaggcttggacttgatgagaacgagaaagagacgatagaacatctgataatccagatggaaaaagagagaggacttgacaggagtgcagccatagctgatatgagatttaatttcatagaaaaggtatgtgaaaattgcgtagttaagccaaaggagagcaaggagaggatcagaagcgagaagatagatcgtatcctcaccggaaagtatacagcaattccgtgctttatcggtatcatgctggcggtgttctatctgacatttaacgtgatcggagctggacttcagaaacttttagagatggggatagatgcacttacggttcaggtgggaaagcttctcactgcagcaaatgtaaatgtggtggtcaagagccttgttatggacggaatatttgcaggagtgggaagtgtgctcagcttccttccaataattgttaccctgttcttcttcctgtcgcttatggaagacagtggatacatcgccagagttgcatttgtcatggataagctgctcaggaagattggactttccggcaagagcatagttccgatgctgataggctttggctgtacggttccggccgtcatggcaaccaggacactcccgagtgagagagaccgaaagatgactattctgctcactccatatatgagctgttcggctaagcttcctatatatgcgttctttgtaagcgcattctttcctggaaagggcggccttattatggcagggctttatttccttggaattgcgataggaataattgtggctatggtttatcggagcacattgtttaagggcaatgcggttccttttgtcatggagcttccaaattacagacttccgggtgcgaagaacgtaggccagctcctgtgggagaaggcaaaggactttcttcagaaggcgttcacagttatatttcttgcaactatatgtatctggttccttcagagctttgatatgcacctcaatatggtgaaagactcgcaggacagcatacttgctgcgatagctggacttttggtgccgatatttaagccgcttggacttggcgactggagaatatgtacgtcgctcataagtggtatcatggcgaaggagagtgtggtatccacacttgagatattgtttaacggatcagtgaccgcagctatcacaaccagggctgcagcatcgctgctcgtattcagcctgctttactcgccttgtatagcagccatcgcctccatcaagagagagatgggacatcgctgggctgtcatggtagtgatctggcagtgcgttgtggcgtggcttgcggcatttgtggtgtatatgataggtggaattctgtga

SEQ ID NO: 1673 - DNA, 1407 bp, Coprococcus eutactus
atggcagataagaaaccgataaagattacggaaactgtactgcgtgatgcgcatcagtcacttatagctactcgtatgacaaccgagcagatgcttcctatcatcgacaagatggataaggttggttatcattcagtagagtgctggggcggtgcaacatttgatgcatcactcagattccttaaggaggatccatgggagagactcagaaagctcagagatggattcaagaatacaaagctgcagatgctcttcagaggacagaatatcctcggataccgtcattatgcagatgatgttgtagagtatttcgtacagaagtcaatcgcaaatggtattgatatcatcagaatatttgactgtctgaacgatcttagaaaccttcagacatcagttaaggcttgtaacaaagagggtggacatgcccaggtagctctttcatatacactcggtgatgcatatactctggattactggaaggatatggcaaagagaatcgaggatatgggagcagattcaatctgtatcaaggatatggctggacttcttgttccaaataaggctacagagcttgtacaggcactcaaggatggttcaagccttccaattcagcttcatacacattacacatcaggtgtagcttcaatgacatatctcaaggctgtagaggctggatgtgatgtcatcgatacagcaatctcacctcttgcgcttggtacatcacagcctgcaacagaggttatggccaagacatttgagggaacagagtttgatccaggtctggatcagaagcttctggctgagatagcagactacttcagaccactcagagaagagtggatcgcaagcggtctcttaaatccaaaggttcttggcgttaacgttaagacacttctctaccaggtacctggtggaatgctttcaaacctcgtatcacagctcaaggagatgggtgctgaggataagttcgaggcagttcttgaggaggttccaagagttcgtaaggactatggtgagccaccacttgttactccttcaagccagatcgttggcacgcaggcagttctcaacgttgtaacaggcgagagatacaagatgtgtacaaaggagtcaaaggcacttgtacgtggcgagtatggtcagtcagtaaagcctgttgatccagaggttaagaagaaggttatcggcgatgagaagcagatcacatgccgtccagcagatcttcttgagaacgagctcgacaagattgagaaggagatgatccagtacaagaagcaggatgaggatgtactcacatatgcactgttcccacaggttgcaactgacttcttcaagtacagagaggctcaggataagaaggtcgatgtcacacttgctgacaaggacagcacagcttatccagtttaa

SEQ ID NO: 1674 - DNA, 327 bp, Coprococcus eutactus
gaggcggctttttttatggcaaatcagattatgagaattacacttaaggcttatgaccacaaacttatcgacaaggcagcagcacagattgttgatacagttaagaagactggcgcaaaggtaagcggaccagttccaatgcctactaagattgagaagatcacaatcttaagagcagttcataagtacaaggactcaagagagcagtttgagcagagaactcataagagacttatcgatgttgtagcaccaactcagaagacaattgatgcattacagaagatcgatctgtccgctggcgtgttcatcgatgttaagatgaaataa

SEQ ID NO: 1675 - DNA, 2037 bp, Coprococcus eutactus
atggaagatattagtagaaataccagtgaaaatattaaagaaaataatgacatcagtggcaataacgataatggcaagatagccagaattaaagaacttgtaaagcagctcaacgatgctgcaaagaaatattatatggaagatacagagatcatgagcaatctggaatatgatgctctgtacgatgagctgagtgccctggagaaagagaccgggatggtcatgagcaacagcccgacggtcaaggtaggatatgaggtcgtcagtgagctgccgaaggaggctcacgagcatccaatgctttctcttgacaagacaaaggatgtaggtgctcttgcgtcatggcttggcggtcagaagggcgtaatatcctggaagatggacggactcacagttgttctcacatatgagaacggagagatgataaaagcggttacccgtggaaatggtgagataggcgaggtcatcacgaacaatgcgaaggtatttgcaaatgtacctcatcacatcccgtacaagggcaagctgacgatcagaggcgaggcggtcatcaaatactcggatttcaatgcgataaatgagaagataacggatgcggaatctaagtacaagaacccgcgaaatctgtgcagcggctcagtgagacagctcgataacaagataacaaaagagagaaatgtacatttcttcgcttttaatttagtggacggtgaggatgtggacttccacaattcattcaaatatcagcttgactggttggagcagcagggatttaccgtggtagaacactacctgacagactcggcggcacttcctgataaggtgagggaattttcagagaagataacggagaatgacttcccatcggatggtctggtactcatgctggatgatctggcatacggaaggagcctgggaaccacagccaagttcccgcgaaatgccatggcgttcaaatgggcggacgaggaagcgataacccacctccgctatgtggagtggagtccatcaagaactggactcatcaacccggttgctgtatttgacccggtggagctcgagggaacaacagtcagccgtgccagcatacacaacgtcagcatacttaagtcattggcgcttggcgaaggtgatgagattgcagtatacaaggcgaatatgatcattccgcagattgcaaggaatctaaccatgagcggtaacgtggtcataccggctgcgtgtcctgcatgcggaggagagactgagatagtgagggaggaaggcggtgcagcgtcaggagttgagactctgtactgcacaaaccagttctgccctgcgaagaaactcaagtcattttcacactatgtgtccagaaatgcgttgaatatagacggactctcagaggcgaccatagagaagttcatagatgagaagatcctcgaggagcttcctgatctgtataagcttgcggctcacagagaacatatagttgaacttgagggatttggcgagaagtcgtacaacaagcttgtggctgcggtggacgcatccagacagacgaacatgtggcgtcttgtcaatggtctcggcattgcaaatgtcggagaggcgacagccaagctcatggcaaagcattttgcaaatgatatggatgccatgaagaaggcagatgtgttagcatacgttgagatagacggaatcggtcaggttatagcagaggatatagtcagatactttgaaaatgagaagaattgtgctatcatagataggttgatggctgagcttacgtttgtggatgaggtttctgatacggagcaggatctggcgggcaaggtgttcgtcataaccggttcgctcacccattttgacaacagaaatcagctcaaggaactgatagagagcagaggaggtcaggttacaggttctgtatctgccaagacctcatatcttataaataacgatgtgaattctacatcatccaagaacaagaaggcaaaaagccttgatgtgcctatcatatctgaggaggatttcttagaattgattggacagtag

SEQ ID NO: 1676 - DNA, 792 bp, Coprococcus eutactus
atggagtttgttacatacgaacaggatggatatgtaggaattatcacaatcaaccgtccaaaggctctgaacgcactcaacagtgcagttcttgaagagcttgatgcaacattcaaggcagttgatcttgatacaacaagatgtcttattcttacaggtgccggtgagaagtcatttgttgccggagctgatataggtgagatgtcaacactcacaaaggcagagggagaggccttcggtaagaagggtaacgatgtgttcagagccattgagacattccctatcccagtcatcgcagcagtgaatggattcgctcttggcggcggatgcgagatttcaatgagctgtgatatcagaatctgctcagagaatgcaatattcggtcagccagaggctggtcttggaatcacacctggttttggcggaacacagagacttgcacgtcttgtaggtgcaggcatggctaagcagcttatctacacagcaagaaacatcaaggcagatgaggcttacagaatcggtcttgtgaacgctgtttatccacttgaggagctccttccagcagctaagaagatggcagccggaatcgcagcaaacgctcctattgcagtaagaaactgcaagaaggctatcaacgatggcttacaggtagatatggatcaggcaattgttattgaagagaagctttttggtgactgtttcgagacagaggatcagaaggcaggaatgggcaatttccttgagaaagacaaggagaagaaacttaaggttgttcctttccagaataagtaa

SEQ ID NO: 1677 - DNA, 1020 bp, Coprococcus eutactus
atgagagacaagttggaagccatcaaggcagaggctcttgccaagatcgagagcgcagaggttgtatcgacacttaacgatgtgaaggtggcgatactcggtaagaagggagaactcacacaggttctcaaaagcatgaaggatgtagcaccggaggacagaccaaaggtaggccagatggtaaatgaggcgcgtcaggccatcgagacagcccttgatgagaagacaaagtccatcaacagggcactccgtgcagagaagatgaagagagagacaatagatgtaactcttccaggagtgaagaagcttacaggacacagacatccaaaccagatagcacttgaagatctggagagagtattcatcggtatgggttacgagatagttgagggaccagaggtagagtacgacaagtacaacttcgagctgctgaacatccctgcaaatcaccctgcaaaggatgagcaggatacattctatgttacaaaggatatcctccttcgtacacagacatcacctgttcaggcaagaatcatggagaagggcaatcttcctataagaatcctctcacctggacgagtattcagagctgatgaggtagatgcaacacattcaccatcattccatcaggtagagggacttgttatagacaagggaatcaccatggcagacctcaagggaacactggcgcagtgggcaaaggagttcttcggtgagaacacaaaggtcaagttcagacctcatcacttcccattcacagagccttcagcagagtgtgatatcacatgcttcaagtgcggcggcaagggatgccgagtatgtaagggcagcggctggatagagatccttggctgtggtatggttcatccaaaggttctccgcgactgtggaatagatcctgaggtatattcaggatttgcatttggaatcggacttgagagagtaacacttctcaagtatgagatagatgacatgagacttctctacgagaacgacatgagattcttagaccagttttaa

SEQ ID NO: 1678 - DNA, 1740 bp, Coprococcus eutactus
gtgagaaaggagaaagatatgaatagtttggtaattgttcttatcgcagtagtagttttaggtgctggctatcttggctatggaagatggcttgcaaagaaatggggtgtagatccaaatgcaaagacaccagcagttgcaaatgaggatggcaaggattatgtaccatcatcaaagcttacagtatttgcacatcagttttcatcgatagcaggtgccggccctgtccagggacctatcatcgcagccatgttcggatgggtaccagttttactctggctgcttgtcggaggcgtattctttggtgcagttcaggattttggttcactttacgcatcagttaaaaatggtggtaagtcaataggacttgtcatcgagaagtacataggcaaggcaggaagaagattcttctcactgttctgctggctctttacacttcttgttatagcagcatttacatcgatggtttcatcgacatttaacggtttcacagcaggcgctgacggagctgtgacaaagaacttcaatggtgctgcagctgctacagtttcaatgctgttcatagtagtagccatggtattcggtgtggttatgaagacatgcaagaatatgaaggagtggctcaaagctatagtagctatcgtcctcatcgttgcaatgtttgcagtaggtatgaaatgtccttggtacttaaatggtgaccagtggaattacgtaatcatggcttacctcttcctcgcatcagttcttccaatgtggttactcatgcagccaagagattacatgacaacattcatgctcatcggtatgttagttggtgcatttgtcggagttctggtaggacatcccgatatgaacctgaatgcattcaatggtttcacagttgtatcatcaacaggtgttaagagttatctgtttccaacattgtttgtaacgatcgcctgtggtgcggtttccggtttccacagccttgtttcatcaggaacatcatctaagacagtaaaaaatgaaaaagatatgcttttcgtaggttatggcgcaatgatccttgagacgctcctcggagttatctcacttatagtagttggtgctgtcgcagttggcggcaaggctccagagggtcttacacctttccagatcttctcacagggtatcgcaggattcctcgagaagttcggacttccaaactcagttgcaaatgtattcatgacaatgtgtgtatcagcacttgcccttacatcacttgatgcagttgcacgtatcggacgtatgtcattccaggagctcttcatgggagacacaacagatacatccaagatgcctgtatggcagaagatacttacaaacaagtattttgcaacagttataacactgttctttggttatcttctctgcaagggtggatattcaaatgtatggccactcttcggatcagcaaaccagatgcttgcagcccttgtacttataggcgtagcagtattcctcaaggcaacaaacagaaagcacgcaatgctctacccacctatgctgataatgcttgctgttacatttacagctatcgtgttcaatgtaataggcaatgtacagaagttccaggctggaacagcaacattccttgtagagggacttcagcttatagtagcagtattccttatcgtgcttggtatcatcgtggccatcacatgtatcaagaagcttgttcttatgaagaaggagaatgctgagaaggcagaggcttaa

SEQ ID NO: 1679 - DNA, 630 bp, Coprococcus eutactus
ctttcaaaccttgatgctaagcttcgtgtacagatgcgtgttgagatctcaaagcttcatcagagactccagacaactatcatctacgtaacacatgaccagacagaggctatgacacttggtacaataatcgtagttatgaaggatggtatcatccagcaggtagatacacctcagaacctctacgacaagccatgtaacctgttcgttgccggattcatgggtatgccacctatgaacttcatcgattgtaaggttgttaagtcaggtgctgacgttctccttatgttcggttcacattcaatcaaggttccagacagcaaggctgagagacttatcgcacttgatgctatcgataaggaagttgttcttggtatccgtccagaggatattcatgatgagcagctcttcatcgagtcatcaccagagagcgtaatcgatgcaagaatcaacatctacgagatgcttggtgccgaggtttacttatacttcacaatcgaccagttcgatatcaccgcaagagtaaatgctcgtacaacagctagacctggcgacacagttcagttcgcatttgacttaagcaagattcatatcttcgataaggagacagaggagatccttgttaactag

SEQ ID NO: 1680 - DNA, 1062 bp, Coprococcus eutactus
atgtacgtcgagatgaaaaatatatataagaaatatggagatttcctggcgtccaacaatgtcagctttggtgtggagaagggcaagctggtggcgcttctgggaccgtcgggaagcggaaaaacgacacttctccgaatgatagctggacttgaaaatccaaattccggtgacatatacatagacggcaggcgtgtaaatgatataccagctgcgaagagaggaataggatttgtattccagaattatgcactgttccgttacatgacggtatttgacaatgtggcatttggacttgaactcatgaaggttccaaagaaggagatcaagaagagagttatggagcttctggagcttacagggctgtcaggtatggagaagagatatccgaatcagctctcaggcggacaacggcagagagtggcatttgccagggcgctggcaccgaatccacaggtgttgctgctggacgagccgtttgccgcgatagatgcaaaggtcaggacggagcttagaacctggctcaaggagatggttgaaaagcttggcataacgagcatatttgtcacccacgatcaggacgaggcggtggaggttgcggatgagatcatcatcaccaaccacggacagatagagcagatgggatcgccgatggagatatacaagacgccgtccacaccatttgtggcacagttcatcggaaggtcaactgttgtggaggactacgagaagctcaagggttttgacagggtgccgggagcggacagagcggtcatcagaccggagttcgtcaagatatccaagagcggcaggctggatcagtaccagagtgcggcggagtcggggatagtcaaggatgtgctgttccgcggaagccatctggacgtcacggtggatgtcaacggagtggaaatcgtcgccgagagatccatggagaaggatgtcgtaaagccgggggagcaggtccacgttcttatctacaggctgtatgtatttgatgagaatcagacatatctgctggagaacaaggcaatgcaggataacgatgtattctacatctaa

SEQ ID NO: 1681 - DNA, 957 bp, Coprococcus eutactus
atgtttgagtttgaaaaaccaaaaatcgagatcgttgagacttcagatgacaacaaatatggcaagtttgtaatcgagcctttagagagaggttacggtataacacttggtaactcacttagaagaataatgctttcttcattaccaggtaccgctgtaagccacgttaagataaagggtgttttacacgagttcagctcaataccaggtgtaaaagaggatgttactgagataataatgaacatcaagaatgtcgttatcaagaataactcagatacatttgagccaaagcaggcatacatcgatgttgttggtgagcgcgttgttaaggcaggagatatcaaggttgacggagatatagagattgtaaatcctgatcttgtaatcgcaaaccttagtggtccggacgcaaagcttgagatggagcttacaattgtcaacggacgtggatatgtaagccttgacaagaacaaggaagcagatgcaccaattgatgtcatcgctattgactcaatcttcacccctgttgaaagagtaaaccttacagttcagaatacacgtgttggtcaggttactgactatgataagttaactcttgatgtatatacaaacggagctcttgctccagatgaggcagtaagtcttgctgcaaatcttctggtagagcacttgaagctgttcgtagatttatcagagaacgcacgtcttgtagatgttatggttgagagcacaacagacgagaaggaaaaggttcttgagatgaatatcgatgagctcgagttatcagttcgttcatacaactgtttgaagagagctggcatcaacacagttcaggaacttataaacaagacaccagaggatatgatgaaggttcgtaaccttggtcgtaagtcactggatgaagtattagctaagcttaaggagttaggcttatcacttaatcagaacgaggactaa

SEQ ID NO: 1682 - DNA, 495 bp, Coprococcus eutactus
atggaaaagaaagaactgatatactacagactggatgaggtggatgagaagatacttgccatgcttcaggacaatgcacgtgtatcactcaaggatataggcgctgaggtgtccatgtcacctacagcagttggaacaagaatagacaggatgcttgccgagggcgtgcttgagggatttacgaccaagctcaacccggaggctatgggtcattatatcaaggcatttatcaatctggaggtttcacctgagcagaaggctgagttctatccatatatagacagcgtgttaaatgttgtggagtgcaactgtgtgacaggagattactcaatgctcattgaggtacgtttcaagacaacagcagatctcgatcattttgttggtgaacttcagagatttggcaagacaaagactcagatcgtattctccacaaatgtaaagcacagatgcagatactggaagaatgatcttcaccacgatgaggagaagaagtaa

SEQ ID NO: 1683 - DNA, 1512 bp, Coprococcus eutactus
gtgtgcggcaagcagccatccacatctaatctacaggacgagcttgtgtgtgagcttataaaacttgcagaactctcaaaaaatgagaataaacacagcgcggtcgccgacagacttatcatagacggtcttttcacaaccctgacaaatgtaaactttgacgacaatgcaataaaagaatttatgggaagggttaaaaacgagcagaacaagatcagcagacctgaggctgaaaagatacaggtgatcgacctatgggatggtgacacggatatagtgtccttgcgttccaccctgctgtttggactcaagggtatggcggcatacgcccatcacgccatgaatctcggctacacagataatgaggttctgaagtggttctacaagggactgtgcgaggttaacagggagcacagcgtcaccgaatggatagaactcatcatggaattgggccaggtcaatttcaaatgcatggagctgctggacaaagccaacactgaatcatttggcaatcctgtgcctacgagagtaaatgttgacatcaaaaaagggccatttatcgtggtctccggtcacgacctgaacgacctgtcacagctccttgagcagactgaaaagacaggagtaaatgtatatacccactgcgagatgctgcctgcgcacggctatccggagcttaacaaataccataatctggcgggcaatttcggaaccgcatggcagagccagcagacagaattcgaaaatatacccgcgccggtgctctttaccaccaactgtctcatgccgccaaggccgagctacaaggacaggatctacaccacatcagtcgtgggttatgacggcatggttcacatctcaggtacaagagcagggaagaaagattttacccctctgatcaagcacgcacagaagcttggcggctatgaacacgacaggagcatgagcggcataaacggcggccatatgctgacgaccggatttggccacaacgcagttctgtcacaggctggcaagatcatagatgcaatcaaggctggtcatatcaaacacattttcctcgttggcggctgcgacggcgcacatccgggacgcaactattacaccgaattcgtaaagcagactccgatggacacccttgtcctcaccctcgcctgcggcaaataccgtttcaacgatctcgacctcggcgaaattgacgggattcctagaatactcgacatgggacagtgcaatgactcctacagtgccatcaaggttgctttggctctggctgatgcatttaattgcagcataaacgacctcccactcacccttgtcctgtcatggtatgagcagaaggctgtctgcatactcctcaccctgctgtcgctgggcgtgcgcaacatgtatatcggaccgacacttccggcattcatgtccgagaccgtggtgaaatatctggtggagaattataagctaaacccgatcactgctcctgaacaggatatggatgcgatactgaaacgttga

SEQ ID NO: 1684 - DNA, 1509 bp, Coprococcus eutactus
atgatagatacaaatatcaagcagctcgttgagtacggaattgcaaatgagctgatagaggaagaggatagaatatatacgaccaacaccatcctcgagatgctgaagaaggacagctacgaggagccgggtgtggtgccagctatagatacaccggaaaaacttgaggagtgtctcaaggggattctggattacgcagttgagaatggacttatcgcagagaattcagttgtcctcagagatctgttcgacacgaagatcatgaatgcgctggttccaaagccaagccagatcataaagacgttcagagagaagtatgcaaagtccccagaggaggcgacagacttctattataagctcagcagagcaacagattatataagaacatacagagttgcaagggatatcaagtgggtaaagcctacagagtatggtgatatcgacatcaccatcaacctttcaaagcctgagaaggatccgaagatgattgcccttgctaagaccatgtcacagtcatcatatccaaagtgccagctgtgtatggagaacgagggatatgcgggaaggatcaaccatccagcaagagagaatcacaggatcattcctatagaggtaaatggtagcaagtggggattccagtattctccatatgtatactacaatgagcactgtatcgtgttcaacggacagcacatccctatgaagatagaaaaggctacattccagaaactcttttcatttgttggacagttcccgcattacttcctgggatcaaatgcagaccttcctatagtaggtggatctatcctcacacacgatcacttccagggcggacgttatacatttgccatgacaaaggcacctgttgagacaaagattacatttgcaggatatgaggatgttgaggcaggaatcgtgaagtggcctatgtcagtcatcagacttgacggagaggatccagacaagatcatagagcttgccgacaagattctcggcgcatggagaggctacacagatgaggatgcgtacatattcgcggagacagacggagagcctcacaacaccatcactccgatcgcaagaatgagagatggcaagtacgagatggacttagtccttcgtaacaacatcaccacagaggagcatccacttggtctctatcatccatgggagcagtatcacaacatcaagaaggagaacatcggactcatcgaggtgatgggacttgcggtccttcctgcaagactcaagggcgagatggaagagctggcagaggttcttgtggcaggtggagacatcaaggctcatgagaatatagcaaagcattacgactgggtacagactttcattggaaagtacgatataaatgcggataacgtacacaagatacttcgggatgagatcggcgatgtattcgcaaagatccttgagtgtgcaggcgtttacaagagagatgaggccggaaaggctgcattcctcaagttcgtagattatgtgaatgcacagtaa

SEQ ID NO: 1685 - DNA, 1068 bp, Coprococcus eutactus
atggagaacaataacgagatgaagatcaacaagctcccggcaaagacatggtactggcttcgcatgaacgacacagcacttaactggaatccggacatggcgggatgcagtgtgaagatagatggcggcaaggaagctgataagcaggcttctgatttcgatggaatagagactggtgcaggaagagatgcggacgtactcttcgcacagcaggcagcaggaagtgtactcgttgcggacgagaccaataaaggtcagacagtgcacgtgctgataaatggaaccggggcaaatggcagcagcggttatgcttacgtgcaggcagatgcaggttcagacatgacagtcatagagacatttggcgagaatgcggagggcggcagcctggcattccgtacgcgttttaatatagagaaggacgcacacatacgtcttgtacagatatttatgcaggatgagaacacgaccatactcaacgacgtgggaagtgagtgtgcggagaatggccagctagatgtgcttcagatatttatcggcaagggcaatctgtacaacggcgtgagaactgagctcattggtaagcgtgcttcaaccaacatggatataggttatctgggacagaaaaaacaggtgatagatataaatcttgtcgtgaaccatataggcaagaagaccaattgcaacatacaggtggatggaacacttaaggatgctgcggagaagatattcagaggttcgatagatttcaagacaggttcatcggattcgaagggcgctgagactgagaatgtactgctgctcggcgatgatgtggtgaacaagactataccgcttatcctctgtgcagaggaaaatgtggagggatcacatggagcgaccatcggtgagcttgacgaggatactttattttacttcgcgtcaaggggaatcgatatggagacagccgaggacatgatgaccaagggcaagatggaggtcctctaccgcaagatccaggacgaggacacagagaagctggtggagaagcagcttgcggaggtaatggaatatgacagacaggaattatag

SEQ ID NO: 1686 - DNA, 786 bp, Coprococcus eutactus
gaggggaggatcttcatgagtaatatatcaaaagcatttgagcatggaaaagcatttataccatttgtgacatgtggcgatccgtcgctggatgtgacagaggaggtagtatacgcaatggtggaggccggtgcagaccttatagagctgggaatcccattctcagacccgacagccgagggtccggtcattcagggcgcaaatataagagcgcttgcaggcggcgtgacgacagacaaggtatttgaccttgtgagaaagctccgcaagaaagttacaatacctatggtgttcatgacatatgcaaatgtcgtgttctcgtacggttcggagagattcatcagcacatgcagggagatcggcatagatggactgatccttcctgacattccttacgaggagaaggatgagtttgacggaatctgcaagcagtatgatgtggatctcatttcacttatcgcacctacatcccatgagagaatatccatgatcgcaaatgatgcgagtggatttgtatactgcgtgtcatcactcggtgtaaccggaaccagaaccaagatcaccacagacataggagcaatggtcgatctggtgaagaaggcgaaggacatcccttgcgctgtaggtttcggaatatccacacctgagcaggcaaagcagatggcggagaagtcagatggtgtcattgtcggttcagccatcgtcaagctgtgtgcccagtacggcaaggactgtgtgccttatgtgagagattatgtgaagagcatgaaggatgcgataaggtag

SEQ ID NO: 1687 - DNA, 1176 bp, Coprococcus eutactus
ttggttataacgggcagtaaaataaatgcaggtgaaggagacaaaaatatggcagattatataaagggcgtggatctctccgctgttgccgaggttgaagagctgggggcgaaatattatgacgatggtgtgcagggagatatatttgacatacttaagaactatggtgtgaattctgtgagacttcgtctgtggaatgatccgtacacggaggacggcgtaccttatggtgcgggcacaaatgaccttgaggtatacaagaaactcgcgaagcgcgctatggatcatggaatgagcattctgcttgattatcactacagtgatttctgggctgacccgggcaagcagagggtgccaaaggcgtggagaggcatggatgcggatcagcttgagcaggctgtgtacgactacacaagggagactcttttagagatgaaagatgcgggcgttctccctcagcttgttcaggttggaaacgagcttacaaacggactgatgtggccgcttgggcagaaaccagaatatgacaatatcgcgaagtttgtgagcgcaggaataagggcggtcagatcggttgactctgatattccggttatgatacatctcgacaatggcggcaataatcctatgtatgtggactggtttgataactacatggaaagaggagaaaattttgatataattggaatgtcgtattatccgttctggcatggaaccatgaaggagctggaggcaaatatgcgggatatggcggatagatatggcaaaaagatagttattgctgaggtttccatgggatttaccatggaagactatgctgactatgagaaactggggcctgacgatagaaagggctatgccacaaaaccttcactggtggagaatcttgactaccctatgacacctgagggacaggcggaatttatgaacgacataatgaaactgatagatgatgttcctggtggcgatggcttttattattgggaggcaggctggataccagtaccgggaagcggctgggctacggaaggtgctctgtcatatatagaggagtctggaccatgcggaaatgaatgggcaaatcaggcactttttgattatgacggacatgctctgccggcacttaagactatacgtgattacaagccgctgcacagcgactatccacttaagtga

SEQ ID NO: 1688 - DNA, 555 bp, Coprococcus eutactus
atatttatgacaaaacagttcaacagggatggacgaaagagaataccgttctggtcctatgtgacaacaaaaggaaaggtcaaaagtgcatttgcaccatatgatccgtatttttcatttgagaagtttgagggacagatcatatctcttatccgtatggcgattatgtcagaccacccggagaatctggcatcatattgtggtggaacattaaatccatattttcgggatattatagaaatgacatatatgcaggctatgacagtgcaggatatacatatggagggaagtcatctgtgcatgacactcagaacatggtggataaattacagtgagaagaatggacgcgtcaacaggtgcggagactgtatagacgttacacttcggagaaatgttgcttacatggaacctcctggattctccattacatctgtgtattgcaggaattgtggagcaagctttgattctgtccgtcagagaaactgcccatattgcggaaccgtatatcacatggagaatgaaggttttataattgaaagacttgagctggtataa

SEQ ID NO: 1689 - DNA, 792 bp, Coprococcus eutactus
atgacggatatacagaatggtaaaatgattgatccggggaaacagtcctggaatataaaggcaggagtattcagctcctgtatgctgcatatcattgcgatggcatgcatgctcagtgatcacatgtgggcaacgttgtttccgtatgtggatatacttacgtgcataggaagaatagcatttccgatatttgccttcatgatagttgagggattttatcacaccagtaatttccgcagatatctgtgcagaatgctgatatttgcggtgatatctgaagttccgtttgatcttgtgtccggagacagtgtcctgtatctgtttcatcagaatgtactttggacatttctcataggattgctgctgatagcattgatagacaaggtgaggaaaacgggcaaggtatggctgtggatcccggttgcgattgttgtgactcttgtgggatatgtgataggaacgatcaccatggttgatttctatggagcgggagttgtcatggttataatgttctatctgttccggggcaaggaaccatggaaattgatagcacagctcgtgtgtatgtattatatcaatgcacagctgcttagtggatattgttatacatttagtatagcgggacatagctttgaattcccgcagcaggcgtttgcgctcatcgcattgccggtgatatggctatacaatggaaaactgggataccataagaagtggtttaaatacttctgttatgcattttatccgggacacttgcttgtattgtacataatctggcagatggcgatgtag

SEQ ID NO: 1690 - DNA, 1278 bp, Coprococcus eutactus
atggcaatgacaaattcacaggatctatttgaaaaatcacagaaggtaattccgggcggcgtcaattcaccggtcagggcatttggctcggtgggacggacacctgtatttatgaagaaagcaaaaggttcacatatatttgacgaggatggcaattcctatgtggattatgtttgttcctggggcccgggaattctggggcatgccgatgacagagtcatagatgcggtgaaggcggcttgtgatgacggacttacattcggcgcaccgacaaggaaagagctcgagatcgcagagctggtaaatgagcttatgccttcaatggagctgaccaggatggtcaactcgggaacagaggcagtgatgagtgcgctcagagtggcgagaggatttacaggcagagacaagattgtaaagttccgcggctgctatcacggacacagcgatggacttctggtcaaggcaggctcggcggcacttacacagtcagttccggacagcctgggagttccaaagtcgtatacacagcatacactcatagcagagtataacaacgaggacagcgtaaagaagttatttgaggcggagggcaaagacattgccgcaatcgtggtcgagccggttgccgcaaatatgggggttgtcccaccgcatgatggattccttcagttcctcagggacataacaaatgagtacggcgcacttcttatatttgatgaggtcatcacaggtttcagactcagccttggcggtgctcaggaatacttcggggtaaagcctgatctcacaacacttggcaagatagtcggaggcggaatgccggtgggagcatacggcggacgccgcgatgtcatgagcatggtggcaccacttggcggagtataccaagcgggaactctgtcgggcaatccgatagccatgacagccggactcacaacgctccgcatactccagaaggaaaaggatacaatatatccggcgatagaaaagagcacaaggcagatagccgacacagtcagagacacactcggcgacacagtccatgtcaaccagataggctcactgatgagcgtattcttcacagatcaggaagtagtggatatggacacgtcaatatccagcgacaccgcaaggtatgcaaagtatttctcatacatgctggacaacggaatctaccttgctccatcacagttcgaggcaatgttcgtgtcctacgcacacagcaaggaagacgtatccaaaacctgtgaattaataaaggcatataaagagaattaa

SEQ ID NO: 1691 - DNA, 882 bp, Coprococcus eutactus
ttggaagacgagatggcagcagaggaaaatggcaagaaggataaacttaataacgcaaagaagaccagagttatcccgggatatcatctgacgcttggaatagtcattgcaatgctgtcgctgatagttctgatcccgctggcatcggtgctggtgtcatcgctgaagctctcaccgggtgaattctggcatctgcttctgaagaagaatgtgctgaatgcatttaagaccagcatcggctgttcgttcatagcggcgatagccaacacggtgtttggtctgataatagcgtggacactggtcaaatacgattttcccggcaagaagatactggacggattcatagagcttccattctgtctgccaacggcggttgccggtatcacactgtcgagactttacagtgaggatggatttcttggaaagccgcttgcggctcttggaatagacgttgcatacacgaagataggacttaccatcgccctcgtattcgttggaataccatttgtcataagggcggtgcagccgatacttgagaagatggacaatcagtacgaggaggcggcctacatgctgggagccacaccgagaagaacattcttcaaggtcatacttccagagctcagaccggcacttctgaccggcttcggactggcatttgccagagggatcggagagtacggcagtgtcatctacatatcaggcaacagcgcaaaggagcagacgcaggtcatatcatacgtgatcatgcagaagctcagctacatagactatgccagcgcaacagccatagcattggtgatgctggtcatatcatttgtactgttatttgcgatcaacatagtacagttaaagcagtccaagagaacaaacctattatag

SEQ ID NO: 1692 - DNA, 1020 bp, Coprococcus eutactus
atgagatttccgaaatttataaaaaagggcgatgcgataggtttcgttgcgccatcatttggctgtgatacagagccgtataagactgcatttggcagagcgcaggagaacttcaggaatatgggttttggtatacagatcggaccaaattgttataccggtgagggcataggaatcagcaacaagccggagctgtgcggtcaggagataaatgactattacacatcggagaagaacgatgcactcatatcctgcggcggcggagagctcatgtgcgagatacttaactatgttgattttgacagactgagggcagcagatccgaagtggtttatgggatattcggacaacacaaatctcacattcctgctcacgacattgtgcgatacggcgtccatatatggtccgtgtgcggcggcatttggacaagagccgtggcaccgatcagttgcggatgctatggcggtccttcagggacagaaactgtcatttgccggatatgacggatgggagaaggaatccctcagggatgaggaacatccattcttgccatacaacatcacagagccaagagtgataaagggctatcctgagaagttccaggtgagcgggcgaatgataggcggctgcatggactgtctggtgaaccttataggaacaaagtttgaccatgttggcgaattccttgagagatataaggatgatggatttatctggttcctcgagtcctgtgatctgaacgtcatgtccataagacgagccatgtggcagatggacaacggcggatggttcagatactgtaagggctttatgatcggcagaccgctgcagttcggacaggagatgatgggccttgaccagtatcaggctgtgctggggatcataggaaaatacaatgtgcctgtcgtgatggatgtggatctcggacatctgtcaccgatgatgcctgtggtatgcggcagcatgggaactcttgtggtggacggccaggatatgagtctttccatggagatgaggtag

SEQ ID NO: 1693 - DNA, 1515 bp, Coprococcus eutactus
atgggagttttatcaaatatcgagccatatggagtttttcgtttctttgaggagatatgcgggattccacacggatcgtcggatacaaagaagataagtgattatctggtgaagtttgccatagacaaaaatctgagatatatacaggatgagagcaacaatgtgatcatattcaaggacggaactgccgggtatgaggacagtgcccctgtcatgctacagggacatatggatatggtctgtgagaaagatgttgactgtgatattgattttgagcgggacggactgagactagtgcttgaggacggagtgatatccgctgatggaaccacccttggcggagatgacgggatagctgtggcatttgcactggctatactggatgccgatgatataccacatccaccgattgagtgtgtatttacggttgatgaggagataggaatgctgggagctgcggcgattgactgtagtccacttaagtcacggatcatgctcaatctggattctgaggatgaggggtatctgctggtgtcatgtgccggaggtgcgtgtgctacgtgccatattccggttgaatatgagaatgcaaaagatgatcattcagttgtgaaaattattgtagagggtcttaccggtggacattccggcgtggagatcataaaacagagggcaaatgccgacaagcagcttgcaagacttctatataatataggaagggatgttccatacagactgatatctataaagggcggtcttaaggacaatgcaatacctaacaaggcggaggcatatgtgggtattgatccggaggatgtggataactttgtaaaatctgcggaaaagaatgagaagattctgaggcatgaatttggaaatactgatccagagcttgtagtgaaagtagaaacggatctgtcagatgatctgggttcatataataacgcggatgatgtgcagaacgatatgtatggtagaaccatgatcaacagagttatgacagaaaagtcatcggatatagttatcaggagtcttatgatgatgccaaatggaattcagaagatgagcaatgatatagaagggcttgtgcagacatcgctgaatcttggaatattgaagacaactgaggatgaggtcacagcaagcttttcagtaagaagcagtgtacagtctgaaaaggaaaatctgatagatcagctccgatgtgtatctgtctcggctggtggaagtctggaagtgcagggggattatcctgcatgggagtacagacatgattctcctctcagagatattatggtggatgtgtttgaagagcagtatggaagaaagcctgttatacaggcgattcacgccggagtggagtgtggtctttttgccggtaagctgcctggtctggactgcgtatcatttggcccggatatgaaaaatatccataccagcagagagtctatggatgttgccagtgtacagagaacatggaggtatacactgggtatacttgagaaattgaagtaa

SEQ ID NO: 1694 - DNA, 390 bp, Coprococcus eutactus
atgaaatttggttattttgatgatgccaacaaggagtatgtcatcacatctcctagaactccttatccttggatcaactaccttggaacacaggatttcttttcactgatctccaacactgcaggaggttacagcttctacaaggacgctcgtcttcgtagaatcacaagatatcgttataacaacgtgcctatagatatgggcggacgttatttctatatcaacgacaatggtacaatatggaatccgggatggtcaccggtaaagacagagcttgacgagtatcagtgccgtcatggtatgggatatacaatcatcacaggtaagaagaatgaccttaaggctgaggttactttctttgttcctcagaactacgctggagaggttcag

SEQ ID NO: 1695 - DNA, 1494 bp, Coprococcus eutactus
atgataagaccagaacttagcgaggcaaagaaatatgcggcagacggatataggatggttccggtgtgctgcgagatgttatcggatgtgatcacacctatcaacttactcagaaagctgaaagcggcgaatgagcactgttacatacttgagagcgtggagaatcaggaggtgtggggacgctacacatttcttggttacaatccaaagcttgatgtcacatgcatgaatgggcacatacagctcaaggatatagatggaaatgtgataaagaaagcggatgacattcatcctgagggattcataagagagatacttaaggattacaggagtccgaagatagaaggacttccaacatttacaggcgggtttgtcggttacttctcatatgattatataaagtacagtgagaagaagcttgtgatcgatgccgatgacgatgaggaatttcaggatctggatctcatgctctttgacaaggtcatagcatttgacaatttcaagtcaaagctgatcctcattgcaaatgctgacacgtccgatatagaagccggatatgcaaaggcacttgctgacatagaagatatgaagaagctaatcctcgatggagagatggctgagatagagccggttaagatgaagagtgatttcaagcctctgttcaataaagaaaaatattgcagcatggtcgagagggcaaagaagtacatattcgagggagatatcttccaggtggttctgtccaacagacttgaggctgagatggagggttcactgttcaatacatacagggttctcagaagcacaaatccttctccatatatgttctacttcagcggcgaccagatagaggttgcgggcgcatcacctgagacactggtaaagcttgagaatggcgtgctccacacatttcctcttgctggaacgagaccgaggggaaagacaaaggaagaggatatgagacttgaggccggacttatggcggatgagaaggagctggcggagcacaacatgctggtggatctcggaagaaatgatcttggtaagataagcaagttcggaactgttgaggttgagcagtacatgaaggttcagaggtactcacatgtaatgcatatcgggtcaacggtcaaaggagagatcgatgacagcaggtatgatgagctgtcagccgtggatgcggtacttccagcaggaaccctctcaggagcaccgaagatcagagcgtgtcagatcatcaacgagttggaggacaacaagagaggaatatatggcggtgccataggatacatagatttcacagggaatcttgatacatgtatagccataaggatcgcatacaaaaagggtgacaaggtatttgtcagatccggagcaggaatcgtggcggacagtgttccggaaaatgagttccaggaatgtatcaacaaggcaaaggcagttacaacagcactcacaatgagcgcttttcatgcgcatgcacaatacatataa

SEQ ID NO: 1696 - DNA, 783 bp, Coprococcus eutactus
atgaaagttcataattataaaataaaaaataactttgagcaggcagagggtgcaacttgtgaaacgtgcagaaaaataacattgaacggaataggtctgctttccggagcacagcttaagtatatagcgttcatttcaatgctcatagatcatacgaataagacattgctgtatccgtatctggatggtggaataatatcggctgtaagtgatgtatttgatgtcctggggcggatagctttcccgatattcatatatatgttggtggaaggatattttcatacgagaaacaagtggaagtatcttggaatgctgcttatatttggcgtgatatctgagatcccttatgacatgttctccagtggcgtattctttgaatggaatgcaaataatattatgtttacattggcgatggtgctggcaatgatatggatcattgatgtgctgaggaaaaaaatggagaagcttcccaaggcagtatggtttatagcaacgataccgatagttgccatagtgtgtcttatatcgatgaatcttgcggttgattatgactaccatgccatacttataggatatttcctgtatatatttcatgaaaagtccgcaattgcaataccgttctgctacctggcgatgttcaaggaaccgtgggcactgttggggtttggactgactttgacatacaatggcaagcgcggcaggcagaataagctggtgaattacctgttctatccagtgcatatgctgatactcggtattataaggatgtgtcttgggctgtga

SEQ ID NO: 1697 - DNA, 345 bp, Coprococcus eutactus
atgggtaagattataggtattgacttaggtacaacaaattcatgtgtagcagttatggaaggcggtaagcctgtagttatagctaactcagagggtatgagaacaacaccttcagtagtaggtttcctgaagacaggagagagagtagtaggtgagcctgcaaagcgtcaggcagttacaaacgcagataagacaatttcatctatcaagcgtcacatgggatcagattacagagtagagatagatggcaagaagtattcaccacaggagatgtcagcaatgatccttcagaagctgaagtcagatgcagagggatacttaggagagaaggttacagaggcagtt

SEQ ID NO: 1698 - DNA, 876 bp, Coprococcus eutactus
atgatgggcgaacaggaaaagctgcagcgcggcaagcgcaggacaaagataatactgataaccgtgacggtgcttttcatagtgctcatgctggtggttccacttatatcggtgataacaagtgcgctgaaggagggctttaagttctacctgcagtccatcacgacagagtatgtggtaagtgcactcggtgtcacactgatcgccactgtcatagctgtggtggtaaacacatttttcggaatatgtgcggcatggctactgacgaagttctccttcaaaggcaagcaggtgctggcgacactgatagacattccgttttccatatcacctgtcatcgtaggccttgcctacctcatgacatttggaagacttggatggacgtatccggcgatcagatgtatcaatgatatgctgggaacaaatatcaggataacttttgcagttccgggcgttgtgcttgctaccatattcgtgacattcccatttgtgtcaagggagcttatcccggtgctgaacgcgcagggtaaggacgaggaggaggctgcggcgctcatgggagcgaaaggcttcacgatattcagaaggataacacttccccagatgaaatggggactcatatacggaatcattctctgtaccgccagagcactcggcgagttcggtgcggtaaatgcactgtccaagacaaggggcgggacatttacacttccacttgagatcgatgcgctgtacatgtcgggaacggaggaatccatcacagcagcatttgctgtatcgtccatactggtgatcatagcggtcataatattgttcctgagaaatctgcttgagtacagagcgaagaggaaacgcgcttatgaacgaagttcataa

SEQ ID NO: 1699 - DNA, 1734 bp, Coprococcus eutactus
gatccagagtgcagaccggagctggttgcaatgctcggatcatctatcgcaacatgtatatcagacgttccatttgacggaccatgtgccatgacacaggtaggtctcatcgacggagagttcatcatcaacccaacacagaagcagtgggatgagggtgatctgaaactcacagttgcatctacatcacagaaggttatcatgatcgaggccggtgcaaatattgtacctgaggctaagatgatcgaagctatctacatggctcatgatatcaaccaggacatcatcgcatttatcaatgagatagtagctgaggttggaaagccaaagcattcatatgtaagctgtgcagttccagaggagctctttgcagcgattaaggagatcgttcctccagaggctatggaggaggctgtattctcagacgagaagcaggttcgtgaggagaacatcagacagatcacagagaagcttgaggaggcatttgcagacaacgaggagtggcttgcagtccttccagacgctatataccagtatcagaagaagacagtaagaaagatgatcctcaaggatcacaagagacctgatggacgagctatcaaccagatcagaccacttgctgctgaggttgacatcattcctagagtccacggctcagctatgtttacaagaggacagacacagatctgtaacgtatgtacacttgctccactttctgagatccagagagttgacggacttgacgagaacgttacatccaagagatatatgcaccactacaacttcccttcatactcagtaggagagacaaaggtttcaagaggacctggacgtagagagattggacacggtgcacttgctgagagagcacttcttcctgtacttccaagtgaggaagagttcccatatgcgatcagaaccgtatcagagacatttgagtcaaatggttcaacatcaatggcatcaacatgttcatcatgtatgtcactcatggctgccggtgttcctatcaaggctatggttgccggaatctcatgcggacttgtaacaggtgatacagacgacgattacatcgtactcacagatatccagggacttgaggacttcttcggagatatggacttcaaggtaacaggtacaaaagagggtatcacagctatccagatggatatcaagattcacggacttacaagacctatcgttgaggaggctatcgcaagaacacgtgaggcaagactcttcatcatggagacatgtatgaagccggccatcgcagctccaagaccaacggtcaatgagttcgcgccaaagatcaagcagatcaagatcgatccagagaagatcggtgaggttatcggacagagaggtaagactatcaacactatcatcgaggagacaggtgttaagatcgatatcgatgatgagggaagaatctctatctgtggcgtagagcaggcaggtatggacaaggctatcgagatgatcaacatgatcgtagagcctcttgaggttggcaagaactaccatggtaaggttgtaaaagttatcgactgtggagctatcgtatcgcttgcacctaacaaggatggactcatccacatctcaaagctttcagacaagagagttgcaaaagttgaggatgttgtaaatgtaggtgatgaggttgacgttaaggtcatcaagatcgacgagagagcaggaagaataagcctgagtctcaaggatgtacagtaa

SEQ ID NO: 1700 - DNA, 1308 bp, Coprococcus eutactus
atgagaaagaaagttttatcattaacacttgttgctgcgatgatggcaggatgccttgcgggatgtggcaacgcagattcaaaggacgaaggaacaacagcagctgctggcgacagcacaacacaggctgcagcatcagatgatgcgattcagaacttaattgatgcaacaacaggaactgtagatctttcggtatgggcttctgaggaagatcaggatctcacaacacaggttattgaagaattcaagaaaaagtattcagatgttgacttcaacatcacactcggagccgagtcagagtcaaagacaaaggatgatatcctggtagacgttgaggctgctcctgatgtattcgcatttgctgatgatcagatcaatgagctggttaaggctggagcacttcagccggtacaggctacatatacttttgatgttgcaaacgagaatgtggcagcttctgttgaggcagcttctgttgatggaacattatatgcatatccaatgacagcagataacggatacttcatgttctatgattcatcagtattcacagaggatgatgttcagtcactggatgctatgatcgaggcagcaaagaaggcaaacaagaagatcgctatgaacgtatcagatgcctggtatgtatactcattcttccagggagcaggtcttgaccttactcttaacgatgacggacttacaaatacatgtacttggaatcaggcaggcggtacagacgtagctcaggcaatccttgatctcttcaagactggcgtatttgtagatatggatgatcctacacaggcaacagcaatcgctgagggtacgatctgtgcagcagttaacggaacatggagagcagcagacgctcaggcagcatggggcgagaactatgcagcagctaagctccctacatacacagttgcaggcaagcaggttcagatggcttcattctcaggatgcaagcttgtaggtgtaaacccacattcaaagaacgtaggctggtcaatgcttcttgctgagtatcttacatcagaggatacacaggttacaagatttaagcagagaggccttggtccttcaaacatcaacgcttcagagtcagaagaagttaaggctgatccagctatatcagctcttgcagctcaggcagcatatgcaacaccacagcgtgtaggcggcaactactggacaccagctgagacacttggttcaatccttgcccagggcaatccagacggaacagatcttcagaagcttctcgacaacgctgtagaaggaattgaggcacctgtatcacaggagtaa

SEQ ID NO: 1701 - DNA, 1428 bp, Unknown
  Unknown gut bacteria
tatttcgatcaccgcgatacccgccacagttcaaaaagcggacgttatcaaatcacggaaacagaacagatttacagttgcattcattttatcggcaactccgaaacgccggcaaaggaatatgccctgccttatgaaaactgcatcggggtctttcagggcggatggttcgaagcagggcagatttataagaaatgggcgctgcggcagagctgggctgtaaacagaagacacgaaaatccgctccggcacatcggcatgtgggtctggaacagaggactcgcagaagcggtggttcctccggttctgaaacttcaagaagattcaggttcaattcctgttgcgcttgactggtactggtggcatcacaatccgtatgatacggattatccggacttctggcctccgcgtgaaggggaggaaaaattcaaggcggatgtggcggaactcaggaaacacggaattttcacacaggtctacgtcaacggcatgacatgggatatggacggcgcctcatggaaggagggcgggaatgaatccgttgtcatcctgcgggacggaaatccgcgcgcggtcgcgtttaatcagttcaactatcatcgcctcggttacatgtgcggggagtctccgaagtttcaggataagatgtccgttcttgtaagacgccttcgggagagcgggctcgacggccagtatctggacatgatcggctgtgcgggttacaaaccgtgttacaatcccgcacaccatcatccgcggggagactccgccgcaggagtggaggggttccggaatatgcttacgcgcctgaaagcggagaatccgggcttccctctctccacggaatgcagcaatgaggcttatatggaccttgtcgacagcgtcatcacctgcggaacggtgtctgccgaacgcatgggcagcaacatggagttcgtccctctgtttacctccatctatcacggcagtctggcggtattcggcagttatgcgctgccggacggcatcccctcatgggaccccctttggccggacaaggaacgctggcagggcgaggaaccgtggcatcgactctatcccgatcagtttttcattgagctggcgcgggatgtggcatggggagttcagccgatggtctgcaatctcagcagaaaaatacaggaagatcccgaattcagggaaccttaccgcttcattcttgaaacggcgaagttctatcacgcaaacagaaaatttcttttcgacggcgccatgctctcccccgaaggatttcaatgcgggaaaaaagaggtgaaattcatgaaacggatgattttcacaaaaaagaaagacagcgccgtgatcgtaaagacacttccggtaattctccacagcatctggaaagcgccggacggagaaaaggctctgattctggcaaattatacgggc

SEQ ID NO: 1702 - DNA, 1110 bp, Unknown
  Unknown gut bacteria
atggaacaaaaacagaagggaaaacgaatggctgaactggaatccgcttccttgccgctggactccggcgcatctcccgcgggagatgccgtcacggagactactttgcgcggcgaagtggagaaagtgatctatcagagcgacgatgattcgttttccattttgaacctgaaagattcgcagggcaatctgcattgtgtctgcggcgctgtttccggcgcttatgcggggcaggggattgaagtcaccggcaaatgggagttccacaaggaacacgggcgtcgcctgaaagtttcctcctattcgttcacgctgccgaccacgaccgagggcattgaaaaatatctggcttcggggatcatcaaaggaatcggggcgaagtatgcgaaggagatcgtcaagacctttggtgacaaaacgctggaaatcctggacaatgcttctgtccggctccgcgaggttcccggtctcgggcagaaacgcatcaaggcgatcaagaagtcgtgggcggagaatgcggagaagcgcaacgcccagatctgtttgcagagcctcgggatcacacccgcatacttcaaccggatttacaacaattacggcaatgaatgcgcggaaatcatccgcaaggacccttaccgtctggcttcggacattgacggcatcgggttcatcatggcagaccggattgcggagaagtcggggatcgggaaagcggatgccaaacgcctgaaatcaggcgtgacctatgcgttgtcgcaaatccgtctttccggacacgtctgcatgccgcgcggggaattcatccagacggttgcgcgtctgctggatgtggaggaggcgaatgcggaacaggcgctggaactggcgcttctggaagaccttgccgtgatccgccgttcgcattccggcattgacatggtttacgagccggggcttctgcgctgcgaggaggagcttccgaaactgattgccaatcttgctgtgcgcgaaaaacatttcggtcatgccgtcctgaacttcagaaccccgccggattccaagttcagcggggaacagctccgtgcgggcgagaccgccggggcgtcggcgttttcgatcatcaccggcggg

SEQ ID NO: 1703 - DNA, 1290 bp, Unknown
  Unknown gut bacteria
atgagtaagagaatttacaaaggtgcgcgcgtgatcgatcccgcgcggaatatcgacaaagtcatggacatcggtgtggagaatggcgtgttcgccgatcccgcaacgttgaaagatgcggaagtcgttgaccttgcgggaaatgttctcgctcccggtttcatcgacctgcatgtccacctgcggcagcccggcaagacggatgcggaaaccattcacaccggaacgctggcggcggcggcaggcggattcacctccattgtagccatgccgaacacaagtccgtgtgcggacaaccccggaaccatccattacatcaggacttatgctcaggcggaaggcgtcgtcaaggtgcttccctgcggcgcgatcaccaaaggtctggagggacaggagatggcgggcatcggcggactgaaagccgccggagtcgtggcgctttccgatgacgggaaatgtgttcagaatcatgagcttatgcgccatgtgatcgaatactcgcgcactttcaaactgccgattcttgatcactgcgaagatacggttcttgccagcggcggcgtcatgcatgaaggtcactggtcggtgtttctgggaatgaaaggcatggcggcagcggcggaggagctcatcgtcgcccgtgacgcgattcttgccagaaccgcaggctggaaagtgcatatccagcatgtctccacaaaaggttcgctgtcgatcatccgcactgcgcagaaagaaggcgttcagattacggcggaagcgactccgcaccatatctccctcacggatgtcgaaatcaaaaagttcgataccaattacaaaatgaatccgcccctgcgttccgaggaggatcgtctggcggtaatcgagggcttgcgcgacggcacgatcacggtcatagccacagaccatgcgccgcataccaatacggcgaagacggttgaattcgactatgccccgttcggtatcatcggacttgaaacggcggttcagatctgccttacggagctttatcacaaacagtatcttgatcttcccgccctgatatccaaattcaccaaaggtcccgcggatgttctcgggatgccgatcggcacattggaaaacgggcgtcccgcggatattacgattcttgatccggagaaagagggtgtcgtggatgcggacaaattttattccaaatcccgcaatacgccgttcaacggttaccgctacaaagggcttgcggtcggcacgatcgtggacggcaaatgcgtcttcagcctgctggacagtctgaagaaagagtga

SEQ ID NO: 1704 - DNA, 684 bp, Unknown
  Unknown gut bacteria
gctttgaacaaagcaaaactcaaagcacattccatttcctgcatcaataacttgaagacgattggaactttttcacatttttacggcaatgactacaatgattatatcgtaccgtccagccttagatcgacaaaagaaggaatcaccctgccggcatcaagcgatgttttcggagacggtgatgggaataaaagtgcttattatatggttttcaacgtcctgggatatacaaaattttataaacgcggaggtccggacaccgtaacaaacggagccaaaatctttttctgtccctccatgtatgtcaaatcaatgttctctctcatgtactggggcgccaccagctactgcgtcagcagcgctgtgctccataaggaaccctggtacttcggcgaggcggaatccaacaagaactggttccgtttcgccgacgtcaaatccgccagcaaaaaatggtatatcagcgacggggcaagtacaaaggaatatacttcatccggttttctcatgatcccgaacgccaattctcccggagacggcacaagcgttccccatgactggcaccggggcaatgtgaacatgctccatatcggtggaaatgtctcctcctaccgggcacagtatgtttacgggaacaaactgcgttaccttgcaacaacagaacatatccgctatgatcggtaa

SEQ ID NO: 1705 - DNA, 1110 bp, Unknown
  Unknown gut bacteria
atgaaaatccgcccgtatcagaatctctatattcatgtgccgttctgcaacggcaagtgcgcctattgcgctttctactccgaaccggaggtaaaacaggaggctgtcgatgcgtggctgtgccgtctggaacttgacgcaaaacagtatgccccgcagagtgtcccgctgaacacggtttatctcggcggcgggactccgaccgccattccgccggagtcgctggaacgtattttcaaaatcatcggaacgtattttacccttgcggaaaatgcggagatttccacggaatgcaatccggagagcctgacggaggaaaaagccgctgtgctcggacgttgcgtgaaccgggtcagcatgggggtgcagtcgttcaatccgaaattccgcagcctgatcgggcggcgcggaggaggcgcgggaaccgtggaatgggcattggacctgctgcgctccaacggaattgcgaatatcggtttcgacctgatctatgctttgccggaacagactctcgacgactgggtgcgggaactggaaacctcgctcgggtatatgccgcgtcatatctccgcatattctctcatcattgaggacgggacggagcttgccgcgcgtgattttccgccggaggacaacgaactttctttccggatgtggcagactgcgcaggatttcctgggcgcacatgggatgccgcgctatgaaatctcgaattatgcggcggaaaaaaatgaatgccgccacaatcagaatgtctggcacggggagacttatctggggctcggtcccggcgcctgttcctttgacggggctgtgcgccggacggaagttccctcacttgcacgatggctgaaaggggatgccgccgagcaggatatcatcgaagaacggaaacggctgagtgaaattttcattatggggctgcggacggtgcgcggctggaaaaaaagcgaattttcgcagttttccgtgttgtcctggcgggaaatgtggagtaaaataatagagaaacaaatttcagacggtatgttgaaggagagtccggactgtatttccccgacggagaaagggctggctttctggaatgatcttgccgaagcatatttttga

SEQ ID NO: 1706 - DNA, 1341 bp, Unknown
  Unknown gut bacteria
atgaagcatctctattttttcagagactacctgacggaacattacggaaaggcgctccagaggattccgttcgatctgggattgtcctgtccgcaccggaaaccggacggttccggcggatgcgctttctgtgcggaaaacggttccgccgcacgccacctgtccccggacatgagcatagcgaaacaggcggagcgcggcatccgttatgtcaaagaacgttacggagcggatgcgccctatctcgcctatttccaatctttcaccaacacctatgcggatattgagacattgaagcgcctttatgaggaggcgctgtccaccgcggactataaaatcgtgatcatcgcgacacgcccagactgcctgagtgaagaatgtgtggaatatctcgcatccctgaaaaacagatacgaggtctgggttgagctcggtgtccagagcgccaatgacgccacgctgaaaaagatcaaccggggacacggtttcgccgccgtgaaggatgcggtaagacggctcgatgcacgcggaatcaaagtcgccgcccatgtgatcctcggacttcccggcgaggaccgcaaagattatcttgcaacggcggaacagattgccgccctccccttttccggcatcaaagtgcataacctgctgatcctgaaaggcactccaatggcgcggatgctaaacgacggggaagcggcgccgctcaacgaatacgaatatgccggcgctcttgcggacttccttctgcacctgccggaaaaaatggtcgtaatgcgcctcagcgccgaggcggaaccatcggaagtgattgcgccgaaatggtggatgaaaaaaggacagtttctcgaaatgttccggcaggtgttccgggaacgttcggaaggaaatgcagacggaatccgcgcagtcaggacggaggacggctcctatacgctgtatcacccggagtaccgccagcatttccacagcgtcgcgggagcgcggatggaatcatggaagaaatacatcgaaccgtgccggatcggagaacgcctgaaaacgggagacgatgtcgcgattcttgatatcggtttcggcatgggttacaatgtcgccgcgctcgccgaactggcggaacggacggcaaaaggcaggattcgcgcagtttccctggaaatggaccgcaatacgctcaggaacgccctcctgctgccggattttccgcgaaaagatgttctggaagcgctttccgccgggaactgctatcaaagcacttatgcggagatcgcgattgcgtggggtgatgcacggcaatatgttttgaatacgcaggaaaaattcgattttctgtttctcgac

SEQ ID NO: 1707 - DNA, 810 bp, Unknown
  Unknown gut bacteria
atggatgccgaaaaaaatcagggaaaaatcaggctgtgttactggggatacgccgaaggaaatccttccatcaggataaaaatgcatgtccacgatttctttcaggcgaatttcacgctgtcgggaaaatgcgaactcattacggagaacggcagttgccccgtccaggagaatgatctgttgtttgtggcgccgggaaccccgcatgctctcaaatattcggagaagtatctttctctctgctataaattttatatggaacagccggttttcccgcctttcctccacgttgcggcgaatgatttcacccgtggagtcattgacgcgacaaagaccatttttgaaaccacctttccctcccgttttttcggagttccggaaggcacgatcatccttccgcaggatcgctatcagattctgatggaatattatctgacgggggttgtcgccactctgtttcagcattctcagcgctactccggaccgcttgccagaatttatgacatccttgaaaaacaggagcgctgtcccttttctgtgacagaggctgcggaggcatgtcattattcgagaaatcatttttccgtattgatcaggcggatgacggggcttacggcaaaagactttctgaatcagctccgggtggaaagcgcaaaacggtatttgcgctattcggataagaacatcggcgagattgccgcgatcatgggtttttcctcccagttccatttttccgattttttcaaacggatgaccggaagttcgcctctccattataaaaaagaactttatgttttctgtaaaacgttc

SEQ ID NO: 1708 - DNA, 1143 bp, Unknown
  Unknown gut bacteria
atgaaacgcgaccagatattcaatgagctgaaacagcgtattgccacaggggaatatgcggcgggggaaaaactgccgacagaattcgagctgtccgcgcaatatgccgttgcccgcggtacggtccgtcagtctttgaagcgcctggaggaggaaggttatcttgaacgcatcaaatccaaagggactttcatccgccgcccccccggaaaatccaatgcggacaaggtcatctctttcctgattccgtatccgggttacatccgcccgaacaatgatccggtgttcatcactttttcacaggctttctacggtgcgatccgtgccgcatcggaagccgaatggcgcgttgaaacggttccgttttccagaaccaacaataattccgacatcgactggaaggcattggaacatatcggggaggattccagagtcatgatattcaatcactggtattatcctgcattcgatgcattgctgaagcggaaagcaagagtcgggattatccggtatttcagccatgtaaagagtccgtgggaccactgtttcgaaaattggatcgacgccgtggtcgatacgaaaaaagttgcttcggacgcggtgcattttctttatactctgggatgccggaaaattctgaacgcaaattggtattataatgacgcatataacgagaaaccgctcggctaccgtgaagcagcggattgcctggggctggaacggcttgaactggattacgatatattctacgggaaaccacactatggcagaaatgtcgcgaatgcaatccggaacatctgggagaagacgcatttcgacgccttgtttgcggataacccggagcattatttcacggaaaaggggaacatctatcagactctcggaattccggaaaacgtgaagattctgttgaacaatgatgagcctcaatattatttacggacatccccgcaggtcagcgcgttttcgattgacatggaccggatcggttatctcaccgccaaacgccttacggaggaccgttatacaccctgccggcttgttttcgagcggacactttgcaacagggaatccaccggaggagcttacattccgccgcaggagacaaaagaaaaggaggaaaaatggatggcaatgatataa

SEQ ID NO: 1709 - DNA, 801 bp, Unknown
  Unknown gut bacteria
gtcgcgcttgccgcaggagtgtctgcgcagaccgtttcgagagtgatcaacaatcagccgcatgtgagcgggaaagcgcggaggaaagtgcttgaggcaatccggctgctcggttatactccgtcggagtccgcgcggattctgcgttccggcgggagaatgaagcttggcaacggcatgatgcggctcggccatattgttcccccgctcggaaaggattactggcatttcgaacgtgagcgtctccagttgacggaggcgtttatccggggcggcatgatccagaccttctgcctgacgagcgatgtccttttgaaggatgaacatctgtttcattatatgattgatccggcaaaggtcgatgccttgttcattacgatgtgcagtgatgaactgcgggaggctctggaccgccgtctgccgcagggattcccgattgtgacattcaaccgcgaaaactggcacggacaggtttatatcgactttgagagtcagatggggaaggcgctggagtatctttatgagctggggcatcgccggatcggttttctgggcgtgacttctccgtggaatggaaagtatgaatgccgttaccggtgttatcttgactttatgaaaaagcgcgggttggatattgctgccggctgggctccgtccggcggggattttcatgactccttgtccggcgcacatcttgcggaaaagcttcttgcctcggaatgccgcccgacggcgcttgtcgccgcgtcaagttcgattgcgatttccggcgcgagtttccttctgaatcacggaatcagg

SEQ ID NO: 1710 - DNA, 1452 bp, Unknown
  Unknown gut bacteria
atgccgtggtttctgaaactgatcatcgaccgggctctcggcagttccaatctcggactgttgtgtctcctgcttggcggaatccttgtcatttacatcctccgcgagatttttttctacatcagccattatctgttttactacacaggaaaccggattctgttcggtgtgcgggtgaaacttttcaagcacctccagagtctctcgctgcgtttctatcaggaataccgcaccggcaagctgatctccaatatccttaccgacgtttccatgctcaacggcatgatcagcacagttctcgtgaacctcgtcattcacctgttcacgatcacctgcatcatcatcgctctgatcgccatgagcccgaaactttcgctgatctgcctgatcctcgtgccgcttcaaaccctgaatttcacctatttccggcgttccatgaagaaagtcgccatgaatctccgggaacggatgtcggaagtttcggcaagccttgcggaaacgatcaacggaattaaagtcgtcaaatctttcggcaaggaacgaacggaaagccgcgagttcgcggaaatgctccgccccacattcgacgcctcgctttccctcaatatgaaaggcgtttacacgtggatgatcgccgaaggcatcaacatcacctgcatcatcctcgcactcggctggggcgggcttatgacagtcaagggagaaatgagcatcggcgaccttgtggcgtattacacgtatctcacgatgctgaccggtccgctgaatcaattgagcgggctctcctccgcaatctccgacggcatgaccagcatcgaccgtatcggtgtgctgttcgactccattccggagatcaaggaatcagaatcgccgcgcgaactggaattcgcaaagggcaaactcaaattctcgaatgtcagtttcggctacactccgaataaaccggttctgcgggatttcaccctggaagtggagccgggactcaaagtcgcgcttgtcggtccgtccggttcgggcaagtcgacaatcgccagtctgctgatgcgtttcttcgacgtgacctccggcagcatcgaaatcgacggcgtggacctgcgggacatgagtatggaatcgctccgccagaatgtcggcatcgtgcttcaggaatcgttccttttcagcggaacggtggaggacaacatcaaatacggctgtgaacacgccatgcacgcgcaggtcgtcgaagccgcgaaaatggcgaatgcgcacgagttcatcatggaactcccgaaaggctacaattccgaggtcggcgaaaacggcgtaagctctccggcgggcagaagcagcgaatcgccatcgcccgcgcgatcctcaagaatccgcgggtcctggtgctggacgaagcgacctccgcactggacaccgtctccgaagcctcggtgcaggaggcgctggacaccctcatga

SEQ ID NO: 1711 - DNA, 816 bp, Unknown
  Unknown gut bacteria
atgaatcccggaacttttaaccacttctttcaactcaacagttttcaaaaggagccaatcatgccgaaactgccgctgtccggaaaaaaatacaactttttcatcgacgacaatattttctttttcaacgatatttatgaacactgtcatgtttccatattcgatcaattctatctgaacgggttgaaaaaggcacacctgaaatacggaacgaaattcacgttgaactgtttctggaaaaactcacataatccttctttcgatctctcgcagtttcccgacaagtaccgttccgaattcgaggacaattcagactggctgagatttgccttccacggctatgcggaattccccgacagaccttattcagaagcatatccggaaaaaatgccggaacattatgcgctgctgatgaatgacctcaggcgcatcgtcggcggaaaatccctgattgcgcccgtcatcatgcactggttccgcatcacgccggaaaaccgcatcttcatgcggaagcacggaatgaaattcttcgccgttccggagggggaggaaatcacttgcaaccgggacttcagtatgtatgacatgcccgtggatgccatcctgaatcttttcaaagatgacctgcggggaatcggggaacgcctgaaccggcgtatcgcatccgggaaaaacctgatctgcatcggttctcacgaacagtatgcctatcgggattattccaattacatcccgcagtattttgaggaaatcgacaccgcgctgcgggtcatggcggacaacggctatgaaagcgtttatttcaacgaattatga

SEQ ID NO: 1712 - DNA, 798 bp, Unknown
  Unknown gut bacteria
atgaaagcactttcgctgctgttccgcggactcgttccggcactcgctgttgtcctgctcgcgtcctgcgcgcatgacgatgatttcgaaaaacgtttcggcgccgacgcaccgcgcgagaagatcattgcggtaaaagcctcaggcaagatcacgctcgacggcaatctgaacgagggtgcctgggcaaaagctcccgcctacgcattccagccgccggcgcgcaattacggcgtggtgatgccgaaagtggcgaaaaatcaggatgctttcgagccgggcatggcaaaactggtttatgatgacaaatatctttatatcggcgctgtgctccaggattccgatgtggttcagtatggcaaggaagatcaggcgcatctctatcttcagggagatcttttcgagattttcctcaaatccgaaaagtctccgaaatactgggaactttatgcggctccgaacggcaagaagaccactttcatctttgaatcccgcggttatgcccgtgccgactggggcacgcttgatccgtcctttctgaccgccgcaacagttcagggcacgctcaacaactacaatgacaaggataaaagctggaccgtcgaagtcgcgattcccctgaaaatgcttcagggactgaccggagtcaagtttgacaatgcaggaaaatggacaatccttctcggaagatacaactacaatttcgggcagaaccgttcccagctaagctccgttccccagcttccgcagggaaattatcacctgatcgaatactacggggaacttgtcctcaagtaa

SEQ ID NO: 1713 - DNA, 1362 bp, Unknown
  Unknown gut bacteria
ctgattaattccgcaggggaaatcattgccggcggcaggattcatgaactggttacgggcaactgggaccaatcggcgaaaatgccttctctcatgaaggacggagaactggaggctctctgccggaaaatgctggaaatgaaggcgggaaccgcgacggtcacgatcaacggcgtcaaacagattgtcggctacgctccggtcaaggcctgttcctggagcattgcgctgattcagacggaggccgagactctgaaaccggcttttgaaacggaagcggagattcatgacgacaagctgaaagccgaacatttcatgaatgaggcgctcagcatgaacctcaagattttcatgggattttcgctgttcatgcttgcgattattctttttatcggttatatgcttgcgaaacacctcagcaatccgattcgcaagctgattgcaggtgcaaaaaagatcggcgccggatatctggactggaagctggaattgaaaaccggtgatgaaatcgaagaactttccgataccttcaacagcatggcgcacgatcttaaaaattatatccggaatctgaacgacgcagcgcgtgagaaacagcggatcgaatccgaccttaaagccgccacggagattcagacgtccatgctgccgcgcaggtttcccccgtttccggggcggaccgacgttgatgtctatgccgtgatggaacctgcaaaagaggtcggcggcgatctgtatgactttgtattcattgatgagaaccgtcttttctttacggtcggagatgtttccggcaaaggaattcctgccgcgctgttcatggcgacggcgaagacgctgatgcgcggatttgccctgaacggactttctccggcacagattctccattcctccaacaactatcttgcggatgaaaacgacacctgcatgttcattacggttttctgcggaatcctcgactgccggaccggtgtggtgacttatgcgaacggcgggcacaacccgccggtggtcatccggcgtgacggaaacagctcttttttgaaaatggcgcccggttttccgcttgggccttttgaaatggcgatgaacggggtgtatgttgaagggcaatttattctggaacccggggattcggtgtttgcgtatacggacggcgcgactgaagcggtgaacccggaggatgagttgttcggtgaagggcggatgtcgcttgctttgtctgtggcgcccccggttccgggaacggatctgaagactacggtggatacggtgcgcagaattgtgcgcgaacatgcgaacggcactccgcagtcggatgacattacaatgctgctgatacgttataacggtaaaaaataa

SEQ ID NO: 1714 - DNA, 381 bp, Unknown
  Unknown gut bacteria
atcaggttcaacctctgtaaagtgaaatccgtcagcaacggcgtgctcaccggggaaactacaggcggaaaggaaatcgcaattccggtcaaggaaatgaataccggttcgcgtccattcatgaatttcgtgaaaaaagtcggagagaaactcaataaaccggcatccgttccgttttatttcctctggatcaaagaatataatgtggctcatgtcgtcgccaacgaggagaacaacaccgtaagaaacctggtgtcctccatcttcaacacctatctttccaatgcgttgagacagaaaaatatagacaaggaagaacttgaaaacgaattcggcaggctgccggaatacaaaaagctggcgccgaaaaaaagaaaataa

SEQ ID NO: 1715 - DNA, 1119 bp, Unknown
  Unknown gut bacteria
atgtaccaagtacaaaaacgtgacgggaaaaacgtcgatttcaatctgcagaagatttccgacgcaatcagaatggctttcgaggcacaggaaaaacagtatcacccttccatcattgatttcctcgccttgaaagtcacggcggatttcgagcccaagatcaaagaggggctgatctccgtcgaagatattcaggacagcgtggaatctgtgcttgtacaagcgggttacgccgacgttgccaaggcttatattctgtaccgccgccagcgtgaaaaactccgctccatctcgtccaccgcgctcgattacaagacaacggtggacaactacctgaaaatcagcgactggcgcgtcaaggaaaactccacagtcacctattccgtcggcggactgatcctttccaactccggagcgattacggcaaactactggctctccgaagtttacgatgatgaaatcgccaacgcgcaccgcaatgccgatattcatctgcacgacctttccatgctgaccggctattgcgccggctggtctctccggcagttgattcaggagggactcggcggagttccgggaaaaatcacaagcgctcccgcacgtcatctggcaacactctgcaaccagatggtaaacttcctcggaatcatgcagaacgaatgggcgggcgcgcaggcattctcctccttcgacacctatctggcgccattcgtgaaagcggacaatctctcctattcacaggtcaagaaatgtatcgagtcctttattttcggggtcaacacgccgtcccgctggggcacacaggcgccgttctccaacatcacgctggactgggaggttccgaacgaccttgcggagctgaatgcaatcgtcggcggcagggaaatgccgttcaaatacaaggactgcaagccggaaatggatatgatcaacaaagcgttcatcgagacgatgatcgaaggcgacgccaacgggcgcggtttccaatatccgattccgacctattccattacccgtgacttcgactggtccgaccgggaaaacaaccgtcttcttttcgagatggcgtcaaaatacgggacgccgtatttctcgaattacatcaacagcgacatggag

SEQ ID NO: 1716 - DNA, 1578 bp, Unknown
  Unknown gut bacteria
atgaaagaatattccaatacggagcttcaggaaaagctcggcagcaggaaatacgcgagaatcttcctgatcctcgcatttgcgattcctttcgtctggctgtgcgttctgcgaccgctgatcatggacggcggggagacggacagcgatgcctactaccatatgaaaatggcggagctggggccgtccgtattctgcgcgaaaaaatttccgtggctgacgatgtccatctggaacgaccgttttgctgacaaggaactgctgtttcacggggcgctctgggtggttcacggagttcagaagctccttcatctgccgaccggcgcaccgttcaacataccttcgcttcttctgattgccgcggcacttctggcatttattttcgcaatgcggcgcaggggcgtctccccgccgctcatcatgacattcgccatcctgatgccgctgatttccgcaaacttcatgttccggctgatcatgatgcgcccgcatgtgctgtccatcgctttcctgctggtgacgtgcgcgcttctgtcgaaaggcacactccggttccggatgatcgccgcgggggtgatctcgttcatttatgcctggacctactcgaatccgcagttcatcgtcatacccgccttcgtttttgcgcttgcatactgcaaacgcgattccgcaaaagtcttctggattccggcggcggcgtttggaggggtcatgctcggactgctgattcacccgcagttcccgaattcattcatcatctggaaagtgcagtccttcgacgctctgttcggaccgatctttgcagacaatcttcagaaagtcagttcggaaatgcttccgatggaaatgctcgccccgaaattccgctggcataaagccatgctgccgttctacattttcgcctatctgactctgctctgcttctgccgcctcgccgtcatgaaagggtggtccgccatcgcccctcacatcaaagcgaccggttttcttgcagttctctttaccggaggcatgttcgtggcgctccgcaccgtggaatacgcggttccgttcacggtcctgttcggagcgctcgtgttcaacgaagccttgaaagagaatgtgctggttccgctccgcgccaaaccgctgaaaatgtatctggtctatacggtcctcgcgattcttctgggcgtattttcctcctccctgaatctggctctcacaccggctatggtgcatccggcgctgggcatcggaaaatggattcagcagaatatccccccggagacggctgtcgtaaacctgaactggggcgactttcccacgattttctatgccaatgaccgcaattactacttatggggaatggaccctgttttctcttttgcgcttgacggaagacatgcgaaaaaggtggagaaactgcttctgaatctggaacgggtacgcggcagcgcaaaacttctcggacgcctgaccaacgcaaaatatgcggttctgctggcaaggagagagaacttcgtcaatctcctgaaacggaatgactggaagacggtctatgagacggaggaaggcactgtatttctcctagaatga

SEQ ID NO: 1717 - DNA, 1203 bp, Unknown
  Unknown gut bacteria
gctctggcacaggcaaacagcctgattgcggaaaatgaaaacatggtctgcaaaggcgaaagaacggactctgtctctgtgacgccgctcactccgtatcccgcgccgaaaaagcggatcaactccagatatttcagcgatcttccaccggaaagtctgcttcagaccgcggcattccgcaaagacggcattcttcttgcggctgtcggcaacttctgggaaagaggcgatgtatttttcaccctccggatcaaagggctgaaacaggacgggcgttatctggtgcgggaaccggagaaaaaacgctgtttcggcggtcagggcaaaacatttttcaccggcgctgaacttgcgcagggtgttactctgcacgccggagccctgcgctgggcattttttgaaatcatgccgtggaaagcggaaacagcgggcggaaagatgatttcgcaggatacggtcagccgcgccatgcgggaacggctgcctgtcctgaaaagagccgccggcaaggaagcggaacgcgatgccgcggaagaccgggattttcagaaatccgaattgaaaagcatcacttccggcgaactgaaatgcaatccggtcaggaactccggcggagcacaggcgcttgagttcacatccggtaaaaattcactccgcctcactctgaacggcatggcggtgcagagctggaaactcgacggaaatgaatggattgccggaacgaaatccagtggtctcggagcccccgcattctggctgccgccggtccagccggagacgccgtttctcgtaaaggagcagaaagcctgcgatagcggcatccggatcacggcggaaaagacgttgaacagaaagatttctccggcattggagcatctcacgatacgccagacacttgaagtcagccggaatctggaaaaaatcacgatccggacggaattgatcaacatgcatgattcggaatccggcatgggctcagtcacggcggggttccggtaccatattctgccgctctgcctcggaaaaggcggcagcctggaaatgaaatcgggcgggcaaagctgcaaattcaggcgcactcaggaacgtatgatcttcgcccgcggagccacagaatccgctatggcgatgaaaaaactgttcgaggctccgcgcgctcccgtcatgatcgatgataatatcctgacctggcggatgcctgaa

SEQ ID NO: 1718 - DNA, 1113 bp, Unknown
  Unknown gut bacteria
atggcagtaaaaacttacaagatcgcttgtcttcccggcgacggaacaggcccggaagtcatcaatgaaggtgtaaaggttctcaaggccgcagccaggaaattcggtttcgcgatgaaattcgatacttatgactggggtggaacacgttatgtggaacagggctccatcatgcccgacaacgcaacggaaattctgaagaaatacagcgcgatttatctcggcgcgatcggacgtcccgacattgcccccggcattcttgagaaaggaatcctcctgaaactccggttcgatcttgaccagtatatcaatctgcgccccgtgaaactgtatccgggcgtggagactccccttgccaacaagacgccggaagacatcgactatgtcgtcgtgcgcgagaactccggcgacgtatataccggcatgggcggcgttgccagaaaagggacggcggatgaagtcgcgattcaggaaatggtctatacccgtacacaggttgaccgctgcctgaaatttgcgtttgagcttgcgaaaaaacgtcataccaggaagaatccgtggcgcgggctttccaaagaagacattgctgccggcaagaccagcaagctgacgctctgcggcaagaccaatgtgctgacctatgtgttcaatctctgggagcgcgctttccatgagatggcggagaaatatccggaagtcaagatcgactactgccatgtggatgccacatgtatgtggatggtcaagaatcccgagtggttcgatgtgattgtcacgaccaacatgttcggcgacatcatcacagaccttgccgccatgacctccggcggaatgggtgttgccgcaggcggcaacctgaatccggaaggcatcagcatgttcgagccgatcggcggatccgctccgaaatataccggacttggcgtcatcaacccgctcgctgcgattctttccggcgcgatgatgctggattatctcggtgaaaccaaggccgccaaagcgattgaaaagagcgtcgaatttgtgacgggcaagaagctgaaaagcatgtccgccggcaaaatgggctactctacgaaacaagtcggcgatcttgttgtcaaaaacctttaa

SEQ ID NO: 1719 - DNA, 1098 bp, Unknown
  Unknown gut bacteria
atggcttatgacaagataaaggttcccgccggagaaaagatcacactgaaatcggagggggttctcgatgtccccgatcagccggtcattacttacatcgaaggtgacggtatcggcccggacatcacgaaggcaagtatgcacatctggaactccgccgtggaaaaagcttacggcggaaaacgcaaaatcgcgtggatggaggtctttgccggagaaaaggcgaaccggatttacggcgagggcacatggctccccgatgaaacggtcgaggcgattcgcgactgccgcggctccatcaagggaccgctgacgacgccggtcggcaagggaatccgttcgctgaacgttgcgctccggcagacccttgatctctatgtctgcctgcgcccggtgcgtcactttgccggagtaccgtctcccgtcaagaatcccgaattgaccgatatggtcgtgttccgtgaaaatacagaggacatttacgcgggaatcgaatggcagtccggtactcccgaagcgaagaaagtcattgacttccttcagaacgagatgggagtgaagaagatccgtttcccggaaaccagcgcaatcggagtcaaaccggtttccagagagggaagcgagcgcctgatccgcgccgcgatccggtatgctctcgacaacaaccgcaagagcgtgacgctggtccataagggcaacatcatgaaattcaccgagggcggattcaaggactggggatacgagctcgcaaaacgcgaattcgcggataaggtcgccgttgcttccgaatgcgactggaaagcgccggaaggcaagatcctgatcaaagactgtatctgtgacgcattcctccagcagattctgccacgtcccgcggaatatgacgtgatcgccacgatgaatctgaacggcgattatgtttccgatgcgcttgcagcctgcgtcggcggtatcggaatcgcccccggagccaacatcaattatatgaccggcatggcggttttcgaggcgacacacggaactgcgcctaaatatgcgggtatggacaaggtcaatccttcatcgcttgcgctttccggcgagatgcttctgcgtcat

SEQ ID NO: 1720 - DNA, 1332 bp, Unknown
  Unknown gut bacteria
atgttatctgatcaggtctgcgttgaagtgcgcaatctctccaaaatttatgaaatctatgccagaccggtgcatcgcctgatgcagactctgttctgcgggacaaggcatttctaccgtgaattccgcgcgcttgacaatgtttccttccgcgtgaaaaccggacagtgtttcggaatcatcggaatgaacggagccgggaaaagcactctgcttcagattttcgccgatacgctggagccgacttccggagaagtggcggtccatggcagaatagcggcgcttctggagcttggaagcggtttctcgcctgagtttacgggaaaagagaatgtctatatgaacgcgtccctgctgggactcacaaaaagccagatcgacgccagatatgagcagattacggcatttgccgatatcggagaggcgattgatcagcctgtgaaaacctattccagcggtatgatgatgcgtctggcattcgccgtcattgcgcatattgacgcggatatcctgatcattgatgaggctctgtccgtgggggatgtcgttttcacgcagaagtgcatgaagttcatgcggtctttcatgcaagagcatacggtgatcctcgtgacgcacgataccggcgcagtgctggatatgtgcgatgaagttctctggctggatcatggcaaagtcatggagatcggacaacccaagaccgttgttgaacactatcttgctttctgctataaaaaacagcagggggaattccgctccgccggacagatttccgggcgctcgccggaaaggagaaaagtccgcgatgtgcgtcaggaacggttcaattccagcaatcttgtccatgaatatgaatttttcgagtttaatgaaaacgcaccttctttcggcgccggcggagcggtgattgaatccattcagttttatgatgagaatggagggatgctggtgagcacgctcggcggggaagatgtgcggctggaaatccgctgtcgtgccagacaggatattttcagcccgatcgtcggttttgcgatccgcaactatttgggggagaacctgttcggtgacaatacctatgtgcagtaccggtcggagcctcgcttcgctcctgccggttccgtgatcaaagcggtgttttcatttcagatgccgcgcctgaaaagcggggaatatacgcttcatgccgcaattgcggagggaacgcagacggaacatattcagcaccagtggtttcatgatgctttgagaatcaaatcgcattacatgggtgaacagggggtgctcgtcgggattccgatggagcggattactttggatattgaaagatag

SEQ ID NO: 1721 - DNA, 900 bp, Unknown
  Unknown gut bacteria
atgtctgtgtttgatctgccattatggtttctgccgattcttgcttcggcattcggtctcggattttatgatctctgtaaaaaacatgcggtacgcgacaatcctgtcatgcctgttctcttttatgcgaccctgtgcggctccgcattattcgtcgccgcggctctgattacaggcaggttctcatccgccatcatcgccgaacctcatcactggctcctgatcctggcaaagaccatccttgtggcaaccagttggacctgcgtctattatgcaattcgcgaactgccgatctccattgcatcgccggtccgcgcaagtgcgccgctctggaccgtaatcggcggaattcttctttttcatgaaataccgagcccgttgcagggaatcggaatgcttgcgctcttcatcggatattatcttttctccgtattcggaaaactggaaggcatttcgttcgccagaaacaaaggcatccatttcatcctgctcggcacgattctcggcgcggcttcggcactgtatgacaaatacctgctgggtgtggcgatgatcccgcgcgaaacactccagctgtggttttccatcgacctcgttttcattctcggagcggcatatctggtcagaaatctctggagcaaagatcagaaatacacatttcactggcgctggtcgatacctctgacgggcattctgctgatcattgcggattatctgtatttttacgcagtcagcctgccggatgtacatatttcgattctttcactgatccgccgctgcaactgtatcgtgacattcgttttcggcgtatggtatttcaaggaaactcatatccggcagaaagcctttgcccttgcgctgatcctgctgggggtgtttttcctggcgctcgccggataa

SEQ ID NO: 1722 - DNA, 825 bp, Unknown
  Unknown gut bacteria
atgaaacctgcactgctggtgctcgccgccggaatgggaagccgttacggcggactcaagcaaattgatccggtcggtccgtccggcgaaatcattttggactattccatttacgatgcgctcaaaagcggattcggcaaagtcgttttcgtgatccgtcacgacatcgaacaggcgttccgcgagcacatcggcgcgaaatgggaaaataaagtccaggtggaatacgctttccaggaactggacaagctccccgctccgttccggactccggaagaacgcaccaagccgtggggaacggggcacgcgattctgtgtgcctcggaaaaaatctccgaaccgttcgccgcaatcaacgcggatgatttctacgggcggagcggatatgctctgctcgcagacagttttgcaggaaatacgaatccggcaaaacgccatttcatggtcggattcacactccggaacacgctttccgaaaacggttccgtggcacgcggcgtctgctgctgcgatccggaagggttcctgaaagaggttacggaacgcaccaatattgttcccgatggcagaggcggtgcgtttttcacggaagaaaacgggactcaggttccgctgaccggcgatgagatcgtctccatgaacatgtggggattcatgcccggcatttttgaccatctttccagtttgtttgaacagtttctttccaaacgcgggaaagaattgaaatccgagttttacattccttcggcggttgcttcgctgatccattccggagacgccgaagtcaaagtcatgaagagcagtgattcgtggttcggagtcacc

SEQ ID NO: 1723 - DNA, 1233 bp, Unknown
  Unknown gut bacteria
atggcagaaacattccgggacagccctgcaatcttcgcatggcaactggacaatgaaatcgcggcggaagcggaacacgggttctgtttctgtgacgggtgtgcaaaacgtttccgcacgcatctggaaatgaaataccggacggtcgaaaatctcaacgcggcgtggaacggagcattctggagcggagatttcacttctttcgatgagattgatccacgcaatttcaagcgtgtcagctggaaagcggaatacgcacagttcatgagttccctttacacggaactggcttacgaacagcgcgacattctccgccaagtcaatccgtcgtggaaaatcaccacgaacagttggacttcgttcctgccggacgttgctccggatgagatttacccgggacttgatttcgcctcctgcgacacttatctcggaaacgattttcttgagttctcccattcattctgggattactaccggaacatcaggggaaaacggcaggcgtttacagtcggagagacaggagcatggaaccccgtcacaacgcagaaagacgcgtatcaggttctgcgcacctgggcatgggacgcgttcgcacacggcgccgaaaatctgttctatttccgctggcggcagtcgctgatgggcgaagaaagccatccctcgattcttccgtggagcggaaatcccggagaagcatacgggatcataagcagaaccatacgggaaatccgcgcattttccggacagcatcccggcctgccgccgccggaaagcaacgtcgccatcctgacggatcgcctcacgggattcattacgaaatatcgcggcgactactcttattttcatgcggtcgtgcgcatgaatcaggcattgaacgagactggagtccatgcggacattctgcctctttcgcttatcacggaacatacactttccgcatacaagcttgtcatcctgcctcagatagaacatcttccggacgcagtctgccggtttctgcacgaataccggcggaacggggggaagattttggctcaatgccgattgaaccgtatggacgaattcggaaaataccgcatggaatccgctccggcaaatctgcaaaagctgttcggactgcatatcgacgagtcctgcaacatttgcaagggcgtggatttccgcgaatttgaatacaacgaaagaacgctcccggaaaacaaccggagcctggatgtcgagttcatgggaaaa

SEQ ID NO: 1724 - DNA, 687 bp, Unknown
  Unknown gut bacteria
atggcgatgtcgaaaaagaagaaaatactggtgattgccggatgcgtggcaggcggactggttctgttgctggcggctgcttacaatgtggcgctcagttcgagtgtgatctgttcccggtggcttccgatggcggggcggatgacgaattccacgatgacggcgtccgaggtgaagctgagtctgttcggaaacagtcttgaggtcagggactttgtatatgcgagtccgtcggggatcgaagtcagagtggattcgttacagacgaaaatcgcattcatcaaggcgatatccaaggatatccgcgtcaacggcctggcattgaaaggcgtccatgcgaaaatccgtccggtgcggaaaaaagcaatcccgcccgcagccggaactccggttgccgctgtgactcccgcgacaggtgtgaaccgtccggcggcgaatgagaataccgcggtgccgctgattgaggattttcagataccggaatctattctcggatggaaagcgcttccgttcaagatcgcgttgaaagatgttgcgctccaggatattaccgtggattacgcggatgaagccggagagatggatttcaaatatgtgatcaattctctctctctgaaccgggtgactccggggatgacgacggaaatcactttggactctttcctgaccggatctctgaaaaagcag

SEQ ID NO: 1725 - DNA, 930 bp, Unknown
  Unknown gut bacteria
gggctccccgctcccacgcttccgctggtttccaatgccggagtcggattcatcatcatgtccatgatcattcttaccgccggaaccatggttttggtatggcttggcgagagaattacggaaaacggcatcggcaacggtgtgtcgatcatcatcacggcgaacatcattgagcgtcttccgcagtcgctgatggctctctttgagatgatgaacagcggtttttccgcatccggcacaagattccgtctggttcacctcctgcttctcttcgtcatttttgcagcagttaccgcgctgacggtcctgttgacacagggacagaggcgtgtgccgattcagatggcgaaacgtattgtaggcaacaagatgagcggcggtacgacttacatgcccttgaaggtcaatttccccggagttatgccgatcatctttgcaggcgcgatcctgattttcccgcctgtgcttttccagatgatcccgaatgagacggtccgctcttttgcggtctatttccagcatgacagctactcctatatgacgatctacggtctgctgatcctggcgttttcctacttctgggttgccaatatgttcaaccccgtccagatttacgacaatctgaagaaagaaggcgcctatatccccggcatccgtcccggaaagccgactgcggacttccttgattccacgatgacgaaggtgacttttgccggtgcgattttcctgacggcgctggcggttttcccgatgctgctcacgaagtggctcaaaatcccctatcagattgcttctttcttcggtggaacaagtcttctgattatcgtgggtgtgacgatcgatacgttgagtcagatggaatcccacctcgtgatgagaaactatgacggcttcctccaaagggggcggatcaagagcagacgaggctga

SEQ ID NO: 1726 - DNA, 999 bp, Unknown
  Unknown gut bacteria
atgttttttgtggacaattatggatgggcagtattcttttgcgtcgtgacgatgttctgctgggggtcctgggggaatactcagaaactggcggggaaaaactggcgctatgaacttttctactgggattatgtgatcggagtattgcttctcagcatcgttgccggattgacgcttggcagtttcggcagcgccggacggagttttctgccggatttgcatcaggcaagctggggcagcatcggcagtgcgctggcgggaggtattgttttcaatgccgcgaacctgctgctttccgcttcgatctcaattgcggggatgtcggttgcgtttccggtgggaatcggactggcgctgattctcggtgtgatcgtcaactacatcggagcgcccaaaggggatccgtggattcttttcggcggtgttttcctgattgcggttgccattctgatgaatgcctatgcctataagatcaaggagccgggcgggaaaaaggttccgatgaaaggaatcgcgcttgctgtgatctgcggtgtgctgatggcatttttctaccgtttcatcgccgcttccatggatatgaactttacggcgcccgcggcggggaaaatgacaccctattcggcattcttcattttttccgtcggtattttcctgagcacatttgtatttaatacgattgcgatgaaacatccggtttcgggggagcctctggcactgaccgcctatttcaaagggaatccggcaattcaccttgtaggactgctcggcggtgtcatctggggcgtcggcaatattctcagcctggtagccgcaggaaaggcgggaccggcgatttcctacggtctcggacagggggctacactggtggcggcactttggggaatcctgatctggaaagagttccgcggagcaccgaagctctcccattatctgaaccttgcaatgttcgtgctgttcctggcaggactcgggctcctgatcaaagccggggcgtaa

SEQ ID NO: 1727 - DNA, 642 bp, Unknown
  Unknown gut bacteria
gatatgacggaaatcatccgccgcgtcaatgaaaatatctatgatcccgccgaagcgaagaaagcggttgcctgggcgaagaagaactgcaagctcggcaaggatgtctacaacggcaaaaaaggactttccgccagagagcagcaggcgaagttcgaatactgcatcaagatgacgatgatcgcccgcgacctcatggtcggcaacgagaaactcaaagaactcggcttcatcgaggaaggcatgggacacaacgccatcatggcgggtttccagggacagcgccagtggaccgaccacatgccgaacggcgacgtcatggaaacaatcctgaattcttcgttcgactggaatggaatccgcaagccctacatcatggcgacggaaaatgacgggctcaacggcgtggcgatgctcttcgggcatctgctcacgaactccgcgtccggcttctccgatgtccgcactttctggagccccgaagcggtcaggaaggcaaccggacacaaactcgccgttcccggcctgattcatctgatcaactccggcgcgaccacaatggacgcaaccggacgccagaccatcaaaggcaagcccgccatgaaaccgttctgggaaatcacggaaaaagaagcgcaggcg

SEQ ID NO: 1728 - DNA, 738 bp, Unknown
  Unknown gut bacteria
cgcacctcgcccgaactccagatgaaacggcttctcgccgccggcatggagcggatttaccagctcgggccatgtttccgcgcaggggaaaacggtcgcagacaccgtcccgaattcacgatgctggaatattatatgaccggcgcggactatctggaactcctggatttcaccagaggattccttgcctccatctgctccgacctttacggttcgcaccgtttccggttcggagaaaacacgatcgacatcgacaagctggagatcattccggtgcgcgaggcattccgcagatttgcaaatgaagacgccgaccggtgtgcggaggaagacgcccgtttcgagttcgttctcgtggacagaatcgagcctgccctgccgaaagaccgtccctgcgtcctgatggattatccggttcgcttcggcgcgtttgcccgtccgaaagcatccgatcccacgctcgcggaacgctgggagatttacatgggcggacttgaactcgccaacgcttacggagagctgatcgatccgcagattcagcgcgcccgcttcaggcaatttgccgaaacccgaaaaaaaatgaatctggcggaatatcccgaaccaaccgcatttctggaagcgattgacgcaggcattcccccctgtgccggagccgctctcggtttcgatcgtctcgtgatgcttctcgcagacaaacaggacatctcggaagtcgctttccccatcgactcatga

SEQ ID NO: 1729 - DNA, 1545 bp, Unknown
  Unknown gut bacteria
cccgcagggccgtccggaaggggcgcaacggaaatcaatgccactttgaacggtatttttgcgggtatcgtcggcagaaacaattcggaaggaaaatttgtccccgctgagaagatccgtgatgcggcatggaaatacatcagcttcatgaattcgaagagagcgcgtaaaatttatgcggaaaccatggtcaatctggggcaggggcgttctctcagcccgacttatctgcgggagttcggctatacggaatacctgaaatatttccccccgtcatgggagcaggcgttcaaccaggctcttgaaaacggaaaaccggagccttacgggcgcaactgtcagatggtgtatatttacctgacgcagccgattgacgaagcaatgcagcttttccgcgacggcaaactgccggagggcgattcacccgaggcaaaggaaaagcgtcttgacatgcttcaggaaatcctgaaaaaagccgaaaacaggaccaatgcccggatgatcgggcatattgaaccgcaggaacagcagaaacgcacgacggtggcaatcattgtcgccatcatcattgcatgtgttttctgtttcgtgatctacaatatctggaaggtcttttctccgaaagattcttattccggcaagaaacgcggctgggatttcaagcggaactggctgggatatttgattatgattcctgcgctggtgagcattctgctgtggacttattatcccatgctgacgggttcccagttgttcttccaggattaccgtgttgtcggcgacagccggtgggtcgggttcgacaaccttgccggagtcctgttcagcgatgaatggtggtccgcgatctggaacacgttccgctatatgatgttcactttgacgctgggttttcttgcgccgatcgttctcgcgattctgcttcaggaggtttcccacggaaaaatcgtttacagaaccctgtattacctgcccgcggtcatgagcggactggtcgtgatcttcatgtggaaacttttctatcaggcgggttcttccggcattctcaaccagactttgaacagccttgccagcctttgcggattggagtttacgccgcaggactggctgaatgacgccaaatgggcgatgctggcgtgcgtgattccgaccatctgggcaggagcggggccgggctgcctgatctatctggcggcgctgaaaggcgtaccggaggagacttatgaggcggcggagattgacggcgcaaacttcttccagaagatctggcatgtcacgttcccgacgctgaaagccctgatcatcatcaactttgtcggtgcgttcatcgcctccgcacagtccgggggaatgatcctgatcatgacgttcggacgtgcgaacacggaggtcgccgaactgcatatcttcaaggaagcctacacgaatcttcagtttggaagcgccatttcaatggcgtgggtgctgggaatgatgacgttgatgttcaccatttacaatctcaagagactttccaaaatggaattcaagacaacggggaaataa

SEQ ID NO: 1730 - DNA, 807 bp, Unknown
  Unknown gut bacteria
aactctttcggcgatatgagccacatgccgcgttctggcagtgccggattcgatctctataccgtcggcgatgacggcagggaactttacctgaccacgattcagccgagaccggagaaccggagcaagactctggaacagcgttttaacaatgtccccggcgggaaaatgcgcagttatacggtttatcttccgctttacagcggagtaaagaatctggagatcggcgtaaaacccggcagcaaggtcttgccgcctgacccgcagaagatcggaaaaccgattgtcttttacggctcgtccattacacagggcggatgcgcatcgcgtcccgccaataattacaccacgatgctctgccgcgccgtggatgcgccgcagatcaatctgggattttccggcagcgccaagggtgaaatcgctctcgcggaagcgatcggcaagctggatatggcggtatttgtgctggattatgattacaatgcgccgagtgccgagcatctggcaaaaacgcatgagccattcttcaaagcggtccgcaaggcgaatcccgatgttccggtcattatgctgtcgaaatgttcgtggatctctccggcgcgcagggacatcatcaaaaagacctacgacaatgccgtcaggggaggcgataagaacgtctggttcatcgacgggcaggaactgttcggagaacccggacagaatatgtgcaccgtcgatcactgccacccgaacgatctcgggttctacatgatgtatcggcgtgtccttccggttctgcttgaggcgcttaaatcacagaaataa

SEQ ID NO: 1731 - DNA, 615 bp, Unknown
  Unknown gut bacteria
ctgtttctgttttccgggatcaatttcgggctgtactatgtactccagacggtcatcggcaagaaatttctggaggatttctgcttcatgggagaagtccgcgcggcatggattctctccctcatgggagtgttctctgcggtgtccagtttcttcgccgcctctctgagccgtctcctcggcaaccggcgcagggtcttcgtccggaccgcaggactgggctgtattctgtcctttctcgctctgctgctggcaatcgggtttgactgccgcactcaatggatcgccctgttcttctgcaccttgaccattacggcgaatgtcgcgcctgtcacgatttccctgctccgggagacgaatctcccgaatgtggtaggagtctccgtcagcttcatgaatttctatgcgtatattacagtcgcaatcctgggcagtctcaccggaatcctgatggatctcttcccgcctgtgctcaaggacagtgttcacatttacggcaggaattcctatcttgtcgttttcacctttcttttcctgctctcatgcgtcgtcgtttacaattcattccgtctgcgtgaaacaaacggggaaaactgtgctgaaaccactctctaa

SEQ ID NO: 1732 - DNA, 1422 bp, Unknown
  Unknown gut bacteria
atgacagaatttaaggtttccagcctgatcaggcagtaccgcggactgattttactatcagctctgacctccgtaatgttttccagtctggcactgaccatgccgatgatgctgaaagtcgtgatcgaccgcgtgttgccgtcgcgcgactgggcgctctttttcctgctggcggcagtcatgatcgccatctatattctgtgtttcacgatgcgcatcatcacgggaaatctcggcacgtataccgtgacgcgcatcctgctggatgtccgtcagcgtattttcaagcacctgcagaatctttccctgcgtttctataaggagtaccgcactggaaaactgatttcaaacgtcatcagcgatgtggcgctgctccaggggctgatttctctctgcatcagcatggtggaccagtttttcacgatggcattcattacctttgcggtgtttttcattaactggaaactcgctctgattgcgatgtgcgcacttccgattcatttcatcaacttttttattttcaataagatcatacgcaagaacgccttgctgatgcaggaaaaaatgtccgagatttccgcgaatctggctgaaacgatcaacggaatccgcgttgtgaagtccttttccaaagggcgcgcggaaagtctgcatttcttcaagaacatgcgtccgactcttgagcttgcgatcaagatgaatcaggaggggaacgtctgccacggcatttatgagatgctgacgctgtttacctatctgattgtgatctgcggggggatttttgcggtcggaaatgatttttccatcggcgactttgtggcattttatacttatatcggtctgcaggtcggaccgattgcggtgctggcggctcagatgaatgtcctgtcgcaggggctcgccggagcgcagcgcatcatgaaactgctgaaagtgattcccgatattacggatgcgccggatgcggttgacgcagggcgcctgaccggaagaatcagcttcgaccatgtttcattcaaatatgcggatacgcctgtcctgcgtgatttttcgctgagaatcgaacccggagagaaggtcgcgctggtcgggccgtccggctgcggcaaatcgacgatcagcaatctgctgttgcgtttctatgacgtgtgtgacggctcgatcaaggtggacggcgaggatatccgcacgtttacgcaggattcctaccgcgccaacatcggcgtggttctccaggagcctttcctgttcagcggcacgatccgcgacaatctggcgtatgcgcgtccgaacgcctccatggaggagatcaggaaagcggcggaacttgcgaatgttgcggaatttgtggaaaaactcgacaagaaatacgatacggtcatcggtgaaaacggcgcaagtctttccggcgggcagaaacag

SEQ ID NO: 1733 - DNA, 1077 bp, Unknown
  Unknown gut bacteria
atgaaacctgtaaaaatcgcaatgatgtccctgacccacggtcacacacgcaaatattatcagaccctgcgcgagaactccaagctcgactgggtcgcatcctgcgcggaagatcagaccgcaaaagatgtttatgacctctacgacaacggcgtcccctgctatctcagcacggaggagatgttcgagaaacatcccgacatcgaagccgtcgtgctcgcctccgccaatgacaaacatctggaacaggtcaaggattgcgcacgccgaggcgttcacatcctttccatgaaaattccgactttcgatccgaaggaatatgacgaaatgatcgaggtcgtcgaaaaagcggacatcatctgccagatcgaactcgaaatgcactacaaccccgtggtgaaacgtcttcagaagctgatcgcggacggtgaaatcggcaaaattctttccgttcaggcgaccaatatcacgctgtcgccggtctgggcattcccgtggcagggcgtgccggaagccagctacgggaaacgcgtcccgctcaaagcggcggacaaccgtttccgcggcggcgccctctgcgaccatccccatatcttcgacctgatccgctggctcacgaaatccgacttcgatttcgtctattccgaagtcgccccgaatctccgtcccgacatcccggtggaagacatgcttctggtcaacggcaaaatgaaagacggcacctcatttctgttcgatccctcgtggtcgcgcatggaggaacgcctcaaagtgccggctcccggctgggaagtcttcccgaaacgcatggaggtcaatgtcaccgtgaccggggaaaagggaaccattgtctgcgactgtttcgggcccaatgtctatcataacggcgcgccgaacgaccgctacacggttcaatacacctacttcgacgagtgggtcgggctgatcgacgagttcgtcgactgcatccgcaatcacaaacagccgaagatcaatctccgctggcaccgtcagaccatcgactgcatgaacgcatgttacaagagcatcgaatcgaaaatgcccgcgaaggtctga

SEQ ID NO: 1734 - DNA, 864 bp, Unknown
  Unknown gut bacteria
caactgctgttcggcaggaatttcgtcacgcagaatctggacagatacgacccgctgacctatcaggcggtccggacctacaacagcgccctcgcccgattttacgcctatctcgacagcaaagggcttcaggacaacgcctcctactgtctccagacggcggacggcggaaacataatattccaaaagccgctttaccgcctcccgtttccgcgcacatcttataaaagcttcctgttatgctcggatttcaaaattgaaaacctctcccatttcactcatgaattcgggctcggcgttcccgtgattgccgtaaccggtgaaaaaaacaactatgaatccctgaaaaccgaatcaccgatcgctcacggcgcgaccgtgttcctgcgtttccggcgcccctccggcgaaccggacaccttccatgcggctctcgagttttacgacaatgacaaagtacgctccgtcaaggttgcaggcgaggaacacgttccgctgattttcgattattccacgccgttcgccttttatgtatccaccctgcccgatgtgaacctgctccgctatatgctgaatcccgccggggcaatcaccgcgccgggactctatacgctggaaccgtacaatcctgacaagattcccgtggtactgatccacggtctcatgtccagcccccacacgtggatgcaaatggtcaacacgctcaaaaatgatcctgtgatccgtcagaactgccagttctggttctttacctattccagcggtaacccccttctctattccgcctctcttttccgccagagtattctggatgctcaaatggaactggcgcaaacacccgaagcaaaagcatctttcaataaa

SEQ ID NO: 1735 - DNA, 744 bp, Unknown
  Unknown gut bacteria
gccgccccgctggtcaactcatttctgaaacagaagaagacagccgctctgaccgtggattccctgaaattcgatatccggacgaaaggttttactccggactccgtcaggaaaaacctgaacgggtcttttgtggtgaatgcgtcgaatatcgcggttcctttggaacttgatcagtccagcgacctgctgaaagtgattatgattccgctgaaaagcataccggcgctgctggaaatgctcggaggaagcgagctcaggaaccttgccgttgaaaagacgcaggggctcaacaacgtgttgagcggagcggcggatcttcgttttaccactgccagtcttgatacctctttcctgaatggagtggttacattgaaggatctgactttgaccggagacctgattctctctgaaacattgctcggaaccgtgaatctcgtgaacaatgagatcgacctcaagacccggaccgggctggagcttattacgataccgatgaatttcaagggaacaatcaattcgcctaagccggattatgcgagcgccgttacggatttcctgaaagtcaatgcgaccgccacgctccagaaatctgtggacaaacttctggacagagctttggattccgggaagaaatccaccggagagaatacgcttcagaaagaggaaaagattttggacaaggcgattgacaagggcgttcagaaagggcttgaacgactgaacaaatggctgaacaaataa

SEQ ID NO: 1736 - DNA, 1281 bp, Unknown
  Unknown gut bacteria
gaaggatggaaacgctggcgcgacttgaaactttcccgcgacaactggcaggaaatcgcaaaaggcaatatggcggaccgtcttgattatttgaaaaacgcgaaacccggcgaagttctctattccgccgatctgacaaagaaaccggagggattcatggaaacctgctccgttgaaaaggatgcggacggaacaccgtatattgcctatcgtccgcagagaaatgcgaaagggcagcttgcgcacgacggttttctctacggtaatcatccgcgtattttcggacgcccctgcaactggatcaactatgaactttctttccggttccgctttcccggcaatcagacgaaaaatggaatttttgtaaaagtccgcgccggcggagaacgtttcggagaggatttttatgccctcgacgtttcgatcaacaaacggtggattaccggcagctaccggttgaaagcaggaaataaagaggttccgatcgcgaggaaaagactgaatgaggaacttgcggaaggctggcacaaggcggaaatccgggcagtggacaactggttgatggtaaaaattgacggacagctcatgtttgagggaaaagcgccgctcggcaggggcataatcaatctgtgcagttaccagcctgtcgatgtcgcggatattgcggttcacgaaattccctcgccgtctctggcggaacgctggcacatcaaggttccgcttgtgacgaccgcccctgctctcgacggcaaaggaacggaccctgtctggaagcagggctgtcaaatccgttccttcatgaatagaggccctgtgaagccgaaaacggaagccgttgtcctccgcacagacaaggctctttacatcaaagtcgactgttacggagagatggaaaaagtcaggacgaatcagatggaacgcgatgacgaccagtggaaagatgactgtattgaactctccattgacccgaacaacacccgtacggattatttctatctggtgacgaattcggcaggggtgccttatgatgcgcttgcttccatcggcatgaacatcaataaggcatggaacggcaaatggaaaaccgccgcttccagatcggcggaaaaatggacggttgagtttgaactgccttttgaaaccttcggggaaccgaaacccggcgtaaactggctgatcgggctgaaccgttccggggaaaatatccgtcaaagctggactgacggctcttatcacagtcccaacagcttccggacagttcaaatgacggaggaaaaataa

SEQ ID NO: 1737 - DNA, 537 bp, Unknown
  Unknown gut bacteria
atgaattttcagggcaggacagccatcgtcaccggcggaaacggatatatcggaggaacaatcagccggaaattgctggaacaaggcgcatcggtcgccatattcgacatcgcactggaaaatgcacggaaaactgcggaggaatttgaaaatgcgtatcccgtttccgttgacctgaccaatcccgattcagttcaggctgcagttgccggaacaataaagcatttcggaaaagcggacctgctcgtgacatccgccggaggcagcgccagaagcaggatgaaaccttttgcagagcaggacatgaatgtcatccgcgggatcattgaaatgaatctgttcggggcattgcatgtaattcacgcggtggttccgcatatgttccggcagaattacggcagaatcgtcaatctctcctctctggtggctctcggaggcgtggaaggatgtgcggattacgccgcggcaaagagtggaatcatcgccgcaaccaaaacacttgcaatggagtttggaccgcataacgtcaatatcaac

SEQ ID NO: 1738 - DNA, 1026 bp, Unknown
  Unknown gut bacteria
atcgccgatccggcacgcttccagcaggtttacgcggaaaatcttccgcagaaactgaagctgcgcgtcaaagccggaacagggaccgccttcattcagccggagctgaagctcggcggcaatccgctcaaagtcaggatcggcaggatgacattcgggaaatatgtgccgaaaccgcttttcaagggcatttacggagaaaaagatccgatgcctccgcgtgtgttcgccctgaaagatatggcgaaactgaaaacctccgaaagctggatcgcgcgggaggcggggcgccctgtcctttacatcaatggaaagaaaaacgcctacaaagcctataaaggcggaacggattaccggctgatgtgcgaaaacggcgccaatatcatcgtcactcacggaggcggcggggcgctttactggggaaaggaatgggataaacaggcttatgccggaaacggagaatttgacttcaaacgtctcgaagacaatcttctgagaatctatgccgccaatccggatgcaaaagtaattgtcaccgtcgagtgcgacccggacaacgcatggctagaggcacacccggaaaatatctgtctgaatgaaaaaggagagcgcggaatcgcccgttatacgggattcaagggcttcggcagctccatcgatcagaaaaaacaggaacggtgggcgtggacttatgcctcggaagcctatcagcggcatgtgattcaggggctcaaggcaatggcggagtttctgaagcagagtcccgccggaaatatcgtgatcggattctgccttgcgggagggcacgacgggcagtatgtgcaatggagatacggtgacgaaacagccgggcatgccgattactccgagtcattccaggccgctctcagaaaatggctgaaagaaaaatacggaacggacgaagccctgcgcagagcatggaatgacccggaaatcacgctggacaccgcacgggtcttcaccggaaaagagtggcggagcaaaccgtatttcgatacagagccc

SEQ ID NO: 1739 - DNA, 534 bp, Unknown
  Unknown gut bacteria
atgatggaactgctggctcctgcgggaaatctggaatgcgctcttgcggcgttcgacgccggagccgatgccgtgtactgcggcctgaaacgtttcaatgcgcgcgaacggacggaaaatttcacatttgaagagatgtccaggcttctggcatatgcgcataaactgaaccgtcatgtctatgtcacattcaatactctgatcaaagaggacgaactggatgaagccgcacaggaactggcacggcttgaacagctccgcccggacgcgatcatcattcaggacctcggaattgcacgaatcgcacgggaatatttcccgaaactcgtccttcacggctcgactcaaatggggttgcacaactccgccggactcgcctatgccggaaagctgggactctcccgcgtaattctcgagcgtcagacgacacttgcggagctggaacagatcatgcgttcaaaaccgccggtcgaggtggaaatcttcattcacggcgcactctgctgctgcatttcgggaacctgcctgctctcc

SEQ ID NO: 1740 - DNA, 2991 bp, Unknown
  Unknown gut bacteria
atgattgtgccgcttgccgcttccacggcatgtattttactcaccgcatccggaacggaaatgcctgattccggtctgttcgagatgaagagcggagattatacggtgacactgctgccgaaacgcgcctgttcgctttccggattcgcatatgacggaattcagctctttacatcggatacggcatccgccggaagcgttgtccagcccctgcggacgccggaaaaggtgttgtccgtggagttggaggcggacggggctaagatttcccgtgcggtttctccggtaagcggaaaaaaactggtcttcacaaaaacaagccttctcgacggtctgcgcctgaagacggttatgactctgacgccgtccggtttgatttacagcgtttcctatgaaatcgtatccggtgagaaaccgtcttatttctatcccgtcacaatgccgtggaatacggcgtttacggactggatcatgaatacgccgtccggcggcgcgtccgggaatctggtttccgacggctcatggtgtctcaacgccgatttatcctcttatgcgctctaccgccagaacggtgaagtcggggtggcggcaggcgtgaagactcccattccgacggctgtgcggaaacatgcgatatgggatcacaagacctatcataaatattttctgtttcacaaactgcccgaatggaaaaagggatatcggtcgccggtttacaccatggagttccgcgcgttccgctccaatgttcccgcatggaggaaaactgcgtcggaaaccatacgtgaaatggggctggcgccgtcggagtccaatgtgcgcatgaagaacaacgtgacgatcgtggaggcggggcccgtgtcggggcggcgcgactggaacaatccgaggcgcggcattgaagcattggatccggattatgtgctgccgccgttccgcccggtcgaggcgaaaggagatactgcgtcggtgtggaaccgggaataccgcatttctccgtatgggttgattgcggaagccggaattgccggcggaaactttctggcggaaccgatgacattccgcacggtcgtcaacggcagggagaccatttacagaaccggagcgccgcgtcttgtcgagagccggaaagggcgtgccgtgtttgcaggcagagccgattctgatttactctctctggaagtcaggactacggtcgagtatgacggcatggtgcgtgtggaccttgcggtggagccgaagcgcgaagtcgttgtcaaccgtctggaatacgctttcagcctgccggaaaagaatgccctttacatgcactttatcggctgtccgaatgtgaacgggctctctattatggtgccgtccgaatccatgagtttcaaggtgccggaacgcgacgggatatttttcagggaaccgttcaagacgctggtgtggttcggggacaacgacaagggttttctctggttttccggttccgagaagaatttctaccccgacgaacaggctgaccgccccggggctctggaagccgtgaaaaaagacggaaaagtgacctttaccgtctcgcctgtcacgaagccgctgaaaacaagccgccggctggattatacgttcggcttttttgcgacgcctgtgcgtccgatgggcagccgatggcgcaactggcttttcacgacgcggcgcggcatgtacggttctgaaaaatcgcatggcatctgcggttccatgccgatggtctggccggatgaataccgttccaccgccgcccctctgttcagcagggaaagcgaggctgaaatgaagcgttttacagaagaacttcataaaaaggggcgtccggcgctcggatatttcgatcccatccgcgtgcatatcggatatctcagatatctggaccgtcagccgaaagggcagcaactgaatgatctgttccttgccaggcctgcgggggaggacgcctttctttaccgtgtcccgattctgcaggagaatatgaaggcatggcagacgataccggagctgatttacgcttacggcgcctccaaaggcggacgcgaggtccgtgtttccagcgattccggctgggctgatttcgcctgttttctcatggaatgttatgcgaaactcggtttcgacggaatgggggatatcgacaattgtttcccgatccgggacatgaatccgcttcacggagccggttatgtcgggtttgacgggaaacgacgctgcgaatgggactggtttgcgcggcgcgatctgatgaaacgttttgccgcggtgttcctgaaggagcgcgggcgtgccattctcgttgcccatgcgtcggcgacgtggtccattccgttcatgagcttctgcgacgccaacatgacgtttgaacattccaattccggctacgtggcatcggaaagatacttgtctgagtatgcctcgcacaatcgtgaactgcgggagaagctcgcaaaaggcgatcccgcgtttctgcgttatgcgtttcctccggaacgctggcgggcggaactcacggggcgccagttcggcataccgtgcgtcattatgtcgaatctcacgaaaagcccgcaactggacaagaaatcggcggagggactcgccgccgcccgtgagctcactgggcgcattgccgcgcacgactgcatcatgtggccgatctggtgcgacacggcaccgatgataacgcttcagaaaatccgcgatgcgttcgggaccgcggaacctgacgtggagtttcatccctactggtcacagaaaaaagtcagggccgaaggctttgccgcgggatactataaacggcccggcaaggcgctggtcatcattgtcaattttgcggacaggcctgtatccggcactgttgatttttctgctctcaaacccgcaggcatacgcaatgccgaaaccggaaagtccttccgggacggcggcgtgctttcgctggcggcaggagattatgcaatatttgaaactgcggagaaatga

SEQ ID NO: 1741 - DNA, 1077 bp, Unknown
  Unknown gut bacteria
aaccgttacagcaaggcggcaatcagcatgcacgcccatatcaccggcgcaatcctgaacgggctcaatgcggcaaagctctggctgacgaatctcggctggcccgatccagccacggaaaaaccttatgatgaaatcatgggaaaacatgccggatattaccaggcattggaagaaaccatgcgcaccgcaaaacttcagggaccgatcactccgattcacaactggggaaaattctggcatccggtgaaacccgaaaaagcgttctggaaatccgactggcagccacaggttctgggacagacaggaattcccgcacgttatgaatttcccgccgaacccggaatcagaatgctcgcaggggaagacagcgtggcatttttctctgacgatgaactcagagatatgctgtccggctccctgcttcttgacggcactgcggcaaaagagttctgtaaacgcggtttttccaaagagatcggcgtcaatgccgaaacccgggaattccgcttcaactatgaacaggaatgcgagacgaaagagcagttgagtctgatgaacgactttgtctgcccgttccttacggtcaacagccccgatacggagatactgacacagcttgtttcgattccttaccggaagtcttcacaggaaaccgtcatcgctccgggcactacactctatcggaatgctgccggcggaaaggtcgcggtttatacggctcatttgcagatgccatggtacaattatctctcccccggcaggaaacgcctgctgatcaaagtgctggacaaactgaacggaactcccctgccctatatcgtcatggagggacagaatatttacgcacttcatgcgatattgccggaccagacggatctgctggcaataatcaacctgaatttcgatgcgctttccagcattcatatccgagtccagaaagcgataaggggcgttcaatatctttccggcagaggaacatgggaagcattggaatggaaacagaagggcaattccctcgaaattttccaagggctggcggactatgaaccaatcatactgaaaatcgaaggatga

SEQ ID NO: 1742 - DNA, 843 bp, Unknown
  Unknown gut bacteria
atgaaaaaggtgaccattctgggcagtgccgcggcggaagggattcctgcaatgttctgcaactgccgggtgtgcgtggaagcttggaaaaacggcggaaaagacatccgtatgcgtacggcatacaaattcaatgagcatgtccgtgtggatttcggaccggatactctggcgcaggaattcaagtatcagctccattccgagaatctcaggcatcttttcattacccacagccacgaggatcatttctattcctgccttctgaattaccgtatgccgggattttcggttgtgccggagggcaatctcctgaacatctacggcaatccgggcgtgatggatgcaatgaatgtgcatttcgcgaaacaccgctgcgattacgggaaattccgtctgaatccggttttgatcacggcgtttgaacccgtggaactgccggaggaggatatgacgttctatcccatgcacgcaaatcacatgccgacggaaaaaccgatgatctatgcaatccgctatgaggacaaatgggttctgatcgccaacgataccggagtgtttccggaggaagactggaagttcctggaagagaagaaattccgtttcgatctggtgatcagtgactgcaccggcgggcttctggactaccgtgacgggcatatgagcgggaaattcgtcctggaaacgaaacggcgtctggaagctctgggctgtgtcgacggcaaaacgcgatacgtcatcaaccatttttcccataacggcagggcgactcacgcggaactcgaagcacattataatccgtatggaatcgaggtcggtttcgacggaatggaactggcactttaa

SEQ ID NO: 1743 - DNA, 990 bp, Unknown
  Unknown gut bacteria
gtgatatggcccctgttcccggaaattgcgctgaaaccgcttgctccgacctggaaaccggatttcggctacagcggcgatgtgatcggggaatgcctcggcaaccatactcttgaagaggctgtcatactgacccgcaggatggcggacggctgggaaaaagggctgaaactctggcaatcctgcggcagtcacccggatatcggcgtggcggaggcattgtcgatccagttcagaagcgcatccgacatcctgaatttttatcttctgcgggaaaagctgattgcgggaatacgtccggcggcaacacttgacgcgatggaggaaatcgtccggcgggaaatcggaaattcggaacggctgatcccgttatgcaaagcggacagccggctcggttttcattcggaagcggaatcgcatcaatacgatcccgatcgcctgcattggagaatatcgcagttgaagaatctgctcctgcatgattttccggcaatacggaggaaccattgcatcccccgttccgcagaagtcccgtcttatcgcggcggctggatcgccgtcggcaccatgcgctggtgcgccgaatggaaacaggacgggctgcacttccgtttgcaatgcagggaaaatgcggattgcgaaacggacaaggtgttgatcgcaaccctgaaccggtcggcaaccggtatgccgtggttgatagaagcattctccgacggacggaaaaccgacaaccggggcggcagcgaagtgcagatatccagacgccccggaggctgggatgccgaagtgttcctgccatgctcccgccgggcagatgaccggatgaagctccccttctatttcctgctgatccggcagaatcagaccatcggaaaggaagacaggaactactgctggcccccaagccgtgtcgttccccggctgcgtctcaatttcagcatttactcaccggaaaatttcggctgttttccggaaaacaacggataa

SEQ ID NO: 1744 - DNA, 1092 bp, Unknown
  Unknown gut bacteria
atgcggtcgaggaaagatcagacaaagacggaactcgtcgtcaatactttgcgggagggcatccttcacggtcaattcccgaacgggaatctgccctcaaagctcgaactggcggaacatttcaaggtcagccacaggacaatcgactgcgccttgaaactgcttcgcacagaagggctgatccgcggggtgcggggaaccggaatcttcatcaatcagaagatgtccgacgtttccaacctgacgcaccggctgattctgatggttcttcccaaggacaccttccatgaaagcgaaccctattcctcgctccgggcggaagtgttccgcaacggactgttcccgatcaatctttccctgctgagcggtccggaggaagaaacgacgctttttgaacgcgccagcctgacgcaactgctccggtcgccgatccgcggagtggtctacagcggacgaagctactggcgggcgccgtttctggattcctggaaaaatctccgctccgtagggctcgttcacttcgacgcggagggagaagcgccgggaagcaccgtcctgatcgactttgaatccggcggctacaagatggcgcgccacatgatcgaaaggggctgcaaaaaactgctggtctttttcagcaggatcagcgccgatgtcccgaaatccgcagattactggagacggcacccgagtcactgcatgcttcgcggcgcggagcgcgcggcggcagaggcgggaattcgcccgccggagcttttttaccaaagtaaaaccacttttccgccccggttgatcgaaccggaggaattccggcatgtcaaagcgtatgacggcatactctgcggttcggacggcctggcatacagtgtcatcaagatggcggagcaatccggcatgaaagtgccggaagatttcatggtgtccggcattctgaacacggtctggagctctcttttcgactgtcagatatcgaccatcgaccagaatccggcggaattgagcaggcatgttgtaaggattctcgaagaaggcggcagacagagtgtcacgattgagcctgatctgattctgagaaacagtacggaacgttga

SEQ ID NO: 1745 - DNA, 1023 bp, Unknown
  Unknown gut bacteria
atgtggatgcaatggcgcatcgtttacatgttcgcgacattttatatgagtccctaccgccaggaacgctggttggaaatcgcgaggcagggatttgattttctcacgaaacacggcaaatccggggacgggacctactattttgccctgaaccggcaggggactccgacgatggcgccgtccaatatcttttccgactgtttcgccgcgatgggcgccgcggcgatgtacaaggcgacaggagaggcacgctacaagcgggaagcggacagcgccatgcacaactatatccgccggatggacaatccgaaaggacgctgggaaaaagcgatgcccggcaagccgaagcgtttgtcacatgggcatttcatgattctggcaaatctcggaagcgtgatgaaggattgtctcggaaccgacgaatatgatgcggaaaccgagcgtgccgtgaacactgtgctcggcaaattctggaatgaggaatatcacgttctttttgagaacgtcaacccggatggaacttttgacctggactcctgcgagggtcgtttcatcaacccggggcacgggctggaatccatgtggttcgtgatgaactatgcggagcgccggaaggatcaggcgatgatccgcagggccgccgatattgttaaagccctgcttgagttcgggacggacagggaatacggcggaatttattatttcatggatgttctgggaaaacctcatcttgaattgcagtgggacatgaaactctggtggccccataatgaagcgacgctggcgacgctgtttgcctgtcggctgaccggagacaagtattactgggagcgtttcaaggagatcgatcggtggtcgtggtcacacttcaaggatcccgagtatcccgagtggtttgcatatctgaaccgccgcggggaaccgacgcatatgctgaaaggcggaaaatggaaaacgatgttccaccttccgcgctgtctctataccgccgtcaatcagatgaagctcatggaggcggaataa

SEQ ID NO: 1746 - DNA, 1296 bp, Unknown
  Unknown gut bacteria
tacatcacggggcagtacggcggcgggctgttcgtttttctgtatctgtttttcctggcggttctcggctttccggtcatgatgatggaactgtctctcggccgcgccgggcgcagcacatttccgggagcgttccgcaaccttcagaataaaaacgtcagattccgctgggactttcccgcatatcttcttttctccggaaacatgttcctgctgatgttctataccgtcatttccggctggcttctcgcttacgcctgttacttcgcagtcgggaaattcaggacgatggacgccgcgcaatgccaggcattctttgaaaacttccttgcctcgccggggcttcagacgctgttcatgctgatcgtgctcggtttgacggtattcgtctgtatgggcggagtccggaagatgatcgaaaaagtcatcaaagtcatgatgatcggtctttttcttctgcttcttctcctcgtggtgcaatcgctccgcctcccgaatgccatgcagggcgtccgcttcttcctctatccggatgtgaataaatttctcagcgacggagtctgggcgacggttcacgccgcaatggcacaggcattcttcacattgagcctcggagtgggaagcatcgcaatctgcgggagttatatcgggcgcgaccgctcactgccggcggaaggcgtctggatcatcagcctggacactctgatggcgatctgttcgggactgatcatttttccctgctgcgccgcttatgcaatcgcaccgaacgcgggtccctccctcattttcattaccttgccgaatgtctttcacaacatggagggcggtccgttctggggttttcttttcttcctgtttctttccattgccgcggtatcaactctgatcgccgtgtttgaaaaccttgcggcattcggcatggacgaattccgctggagccgtaaaaaatcctgttccatcttcggtatcatccttgcggcgctttccatgccgtgcattctcggattcaacctctggcagaagttccgtccgcttggaaaagattccaacgtgctggaccttgaagacttcatcgtcagcgacaatcttctgcctctcggcgcactctacctgacgattttctgttccaaccgtttcggctggggcagcgagaatttttataaagaactcaataccggaaaaagctggaagttccctcatttcttcataccctatatgcgctggggacttccggcaatcattctggcaatctgggtaatcgggatcgtcaagcggttccatctgttcgaattctga

SEQ ID NO: 1747 - DNA, 2313 bp, Unknown
  Unknown gut bacteria
atgaaaaaaatcttgtgcgctgcgctcggagcgttgctgttgaacatgtcggcttacgatgtcagaaatccggcactgaacccggtggaatttcagacgccgcttcaacatcaaaatctggaactggtgaaagacggcaggctcaattttgcaatcgttttcgataaaaatgccgaaaaacatctgcgttatccgaatcagaaaggaatccggtccgcagtggataccctgatccgggaaattgaaaaatccaccggacagaaacctgaagtgttcgatatctccgaactcgaaaaggcgaaaaaatatccgtatcgccttctgatcggggaaagcgcattgacaaaacagctcggaattgatgtctcgaagctgccgcgggaaggatttctcatcaaaacctttccggagggcgtcgcaatcgccggaaacgactcctccctcgacagggaattcaacaaaagcccgcttgaccgggcgggagcacagcggggcacgctttggggcgcatatgattttctggaacggttcttcggatgccgttactactatccgggcaagtacggctcacttcatccgcaggtgagaaatctggatatcgcgccggttgcctatacggattatccgcgtttccggaaccggtcagaacagtggttcatctggagtctttacggatggggaggagaaaagaagatcaaaaaagaatggattgaacttctgggtccgttgaccgacggggatcttcagttcacagaggcatggcggcttgcgcggacctctcccttctgggcggggcataatccgcgcccggaaaaattcctggcggcatacccggaaaaaaaggagaccattttttatcgcgccccgaacggaaatcagtattataacgagaaacagcacatcggcaactattttgatgtgacgaaactcgaattcgcggatcttcttgtggattcactcaaaaaatattatgcctcgaacggaaaagaaaacgatggctggagcaatgtcaacaatacatatattccgttcggacagtgcgattccgaggtgccgcttccggatatgatcaacaatccggttgtgaagaaggaaaatctgatcacgcaggaaaacatcaggcgcggattttcctacagcgatatttacgggcgtttctatcaatatctcggaaaccggctcaaaaaggaacttcccggaaagaaactggttcttcttccctactccaactatacccgcgctccgttgaatccgaaatggactctgccggacaacgtcgagctccgggtctgcattttcgattttcccgcatggacgcgcaacagggaaattgccgcaaagtggcaggaaaacatgaacgaatggtacaacgcactcggcagacgtccggtcgtttcactctggctctataatgtgccgggcaatccgtttgcccgcgcgatcgccccgcagctgatcgcggatgtcccgaaggtgctgggaaaaactctcggcaatacagaactctttttcgatcagtacggcggattggaattttattactattacgccaattacgcaggcgtccgcggcatgtggaaccccggtttcaatgttgacgccgccatcgcggaacattgggaacccttctacggaaaagaagccggagcgtatctgaaacagttccataaggtgctgttcgacagttacatgaaatattttgtcccgcagaaggagcgcaatccgctttatcctgtaacggtgatcaatgaactggaatcccttttgaagaaagcggagagttccatcccgccggattcaatcgaaatgaaacgcttcagaatattcgcctttccgtggaaaaaggcatttgagtcccaacggaaccgtcatgcctatgcccgcccgctttacggcgcacatcaattgctttccaccgaaaaaattactgtggacggcagaccggatgaagtctggaacagagtgaaatccatgccgacgcttgacccgcgcgggagcagcgaaaaaccgaaatatccttccgacatcaagcttgcatgggataaaaaaggcatctacggactggtcgtttccccttatccgccgcttgccgatgagaacaagtccatctggaacaattccaatgtcgaaattcttgtttctcccggaacaaagaaagaggactatttccattacgcggtcgatccgttcaacaaacggcattccggcacgaaacagcttgttcccgtggacaagccatacaacggatactggaagagccccggtttccaatcggcggtcgacacaacggaaaaaggctggacactggagttc

SEQ ID NO: 1748 - DNA, 630 bp, Unknown
  Unknown gut bacteria
atgtctgtctacatccgctgtaaagttgagtccggcctcgtcattctggaaagtgacgaaaaactgacggagccgaaaatcgtcactttgacgggtgccgacaccgattgccgtcagcttgactgcatccggaaagacggcaggtatcatatcacttttgaagcctcctcccttgaaaaatggtcgccggacacgccggtgctttatcagttgaaagccggttccctcacagaacggttcggattctgtgaactcaaaactttttccaacactgacgttctgctgaacggagaacgctgttatctccgcggctacatccgcggaatcgttgcgcatgaacatcccaatatgacgggcggaactctcaaagacgccgccgtcaaaaatatccgtcaggcaaaaaaatacggattcaacctcgttcgtttccacagcacgataccgacaccggaattcgtcgaagcggcggatgaagaggggcttttcattcatatggaaatcggtttcgcctatgaatatgatgaaaaaggcgacaaaaagagactttccatggacaatgcaagctggaaagagaccatcctccgctaccgcaatcatccgtctgtggcgattttctgcatcggcaatgaa

SEQ ID NO: 1749 - DNA, 1551 bp, Unknown
  Unknown gut bacteria
atgccggaaaaaccgaagttcgatcccatacagtccgcgctgcgcgtgcgcagggagctgatcgcttcgacacagtatgagctggattcgattgtgaatgctttttccggcggatatcttgccccgtcccccggcggcgatccggtcggcaatccggatacggttccgacgggacgcaatctttacggcatagatcctgagcggacaccgacgaaagagagttatgccgtcggaaagaaactgggcgaggcattgattgcggcgaagctcaagagtaccggcaaatatccggaaaaggtcgcgttcacgctctggggcggtgagttcatccggagcaagggaacgaatatcggagagattttcttcctgctcggagtggaaccggtctgggattccagaggcagggtgcaggatgtcagactgattcccgatgaggtgctcaggcgtccgcgcattgacgtgcttgtgcagacgtcgggacagttccgcggcgccgccaccagccggatgcgtctgatcgacaaagcggtcaagctggcgggcacggcgccgaaagggcagtatgacaactttgtgcggaaaggttccgagaccgtcatacgcgagctgattgcaggaggcatgtcccccgaacaggcgaaaagccttgccgacgcccgtattttcggcggagtcaacggcaatttcggaaccggcgtgaccggtatggtgcagtccggcgacaaatgggaggattccaaagtgattgctgacctgtatctgaacaatatgggagcgctttacaccgaggatcactggggagaatccattcccggcgtgttcaaggcggcgatgcagaacacggataccgtggttcagccgcgttcctcgaattcgtggggaccactttctcttgaccatgtctatgaattcatgggcggcatgaatctggcggtaaaaaatgtgaccggaaaggaaccggatacttatttcaatgatctgcgcacgcccgggcgcgccaggattcaggaggcgggcgaagcggcgatgggcgaggcgagaagcacggtgctgaatccgaaatacctcaaagagatgatgaaggaaggtcccggaggagccgggacttttgcggaagtcctgcgcaacagttacggctggaaagtgatgaagccggatatgctcaaggatcatcttttcgatgaatacaaagccgttttcgtggatgacaaatacaatctggacatgaagaaatatttcgaatccaagaatccgtacgcgcttcaggagatcaccgccgtaatgatggaaactgcgcgcaaagggctctggaagacggatgcggcgacgctcaggcagcttgcggaacttcacgccgagcttgtgaagaaccacggcgcggcatgcagcggatttgtctgtaacaatgccaaactcaaggagttcatcgacgcaaagctttccgatgtccgggcgaaacagtcttacaatgatgaaatcagaaaagtgagaactccgtccgccgcgcctgcctccgctcaggataaaaagagtgagcaggtggagggaatg

SEQ ID NO: 1750 - DNA, 1227 bp, Unknown
  Unknown gut bacteria
cctttcggtattgcgggcagtcttttcgccgctctgctgctgaacaatgatttccggtgcagccgcatgaaacgtgtctacggggctgtggtgctgaccgtggtcctgattgtcgcctgcggaatgctgatcctcgccggagcgggttccacggcgatgacgctgctgatctgcgggatcgtcgggacggttctcgtgctgggaagcgtcggcgggcaaaccgtctaccggacgctgttctatttcccgagttttaccgccggcgtcgcgacctatattctatggaaaaaactttacagcccggaaaacggtcccatcaacaatgttcttcagccggtgctggaccggattacgcctgttgcggcatccatctctccgacgaccgcccatgtgctttccgcggttttcctggtcgtcatgggactcgtttattcctatgccctgttccgtgtgattgtcagttggaaaaacggggaaaccggcacgttgagttatatgatcgcgcttgtcgtgctttcgatcccgatgctgtgctgccagctctggtgcagtctgccgtggggcggcgcgctcggattgtcgctcgtcactctggcagccattttcacgcttctgatgttcctgaccgggcgtgaatacaagtgcgcttacgattatggaatgtcgaatgcgatcgtgcttgacggtattgtcatggtcggacttttcatctgcctcggcatttccaatgtgcttctggcgatgcccggcatggcgggctcgccggacggtctgaccgctccgaagtggctttccgactattactgggcgaagccttcgctgatgatcatgggcttctgggcggcgatcggttccaacaacatgctgctttatctcgcagggctttccggtgtttcgcaggaactttacgaggcggcggatatcgacggcgcttctccgttccagcggttctggaacgtgacctggcctcagctctccaatgtgacgttcttcatcctgatcatgtcgatcatgggcggattgcagggcggatttgaaaccgcgcggaccatgacccggggcggtcctgccggatcgaccacgactcttgcgtattacatttacagcgagggttttgaaagcggacggctcggctatgcctcggctgtcgcatggacactgttcgtcatggtgttctgcgtgacgctgttcaactggaaattcggcaataaatacacgaacgattaa

SEQ ID NO: 1751 - DNA, 3393 bp, Unknown
  Unknown gut bacteria
gtgaagtggtttataaaaccgcttgaagagattgcggattatcggtatatgcttgaaaatataaaatcgaaaaatactcctgttttggcaacaggagttattgacgtgcagaaaacacagcttatatattccctgtgcgaggagcttgactgcggtgcgcttataataacggacagcgaaacctcggcaaaggaaatccatgaaaatatggagttttttgatgacagggccgtatatctgccggcaaaggattttattttttacagtgccgatgtccattcaagcgatataacaagacagcgttttatggcaatggataagtgcataaagggcgaggcaagatttgttacggcaacggcagaggcactttttgaaaagcttatgcctaaagaactgcttgaaaaaaatataattgagctttcggcaggagatgttatagaaccgaatgagcttattaaaaagcttgtttatatgggctatgaacgcagtgaaagtgttgaaggtgtaggtcagtttgcggtaagaggcggaatagtcgatatattttcgcctgtgcatgatatgcccgtaagaatagagttctgggacgatgaggtcgatctgataaagacctttgatgtaatgagccagagatcacaggcaaatatcgaaacggcaagaatattcccggtaaaggagatacttgcagacagcggtatgcttttgaaggctgccgaccttatggaagccgatatgaataaagcggcgaaaaactacgaaaagaaggaacgctttgaggctgccgaaaacataaggaacacaataggcgaaattgtcgataagctcagaaacggagccgccggcggaaacagctgtacaggctaccttgacattgcaaccgaaagcttttttgattatattccgaaaaatacgcttgttttttatgacgagcctaaaaagataaaaagccatgcggaaacgcagtattccgaatttgcagagagcatgaaggaaagacttgaaaacggttatatacttcccaaacaggcagagccgatatacggaattgacgatatttacagcttttcttctaaattccgagaggtgcttttgtgcgcggtaacgcagagcataaccgactttaaaataaaggcaatagcgaattttaaggttaaatcttcactttccttcaatggaaagctggatatgttctatgatgaaattaagtatcttaagagtgaaaattatcgtgttattgtttttggaggcggcgaaaacagatgtgaaagaatagtttccgaaatgcgagatgccgaaatagaggcggctcttattgattacgataaggaatttgagcctgttgccggcagtatatatgtctgccgaggaaaaatttcaaagggctttgaatatcccgatattaaatttgccgttttttctttgagcgagataaccggagagatggcggtaaaacgcaaacgcaagcgtgcaaagaagggcaaggcaatcgaaagctttaccgaccttaagataggtgattatgttgttcacgaaagccatggtatcggtgtttacagaggccttgaaaaaataaccgttgacggaataaacaaggattatcttaaaatatcctataacggcggaagtaatctttttgtgcctgtaaatcagatggatatggtgcagaaatatataggcagtgacggagcaagaccaaagctcagcaagcttggcggccaggactggaacaaaatgaaatccaaggtaagaacggcggttgctattcttgcggaggatttgataaaggtttatgcaaaacgagaggcggcagaaggttacagatattcccccgatacgtcatggcagagagaatttgaggaaagctttgatttcaccgaaaccgatgaccagcttagtgccgtagaagacataaagcatgatatggaaagcggaaaagttatggacagacttgtctgcggtgatgtcggttacggaaaaaccgaggttgccataagagccgcttttaaaaccgtacaggacggaaaacaggtggcatatcttgtgccgacaacaattcttgcacaacagcattttatgaccttcattaaaagaatgggacattatcctgtgcatatagagcttctcaaccgtttcagaacggcaaaggagcagaaggcaacaatcaagaatcttgaggcaggccttacggatatagttataggaacacacagattattgtcaaaagatgttaagtttaaggatctgggacttattattgtagatgaggaacagcgtttcggcgtagctcataaggaaagacttaaagcaataaaggaaaatgtaaatgttcttacgcttacggcaacgcctattccgagaactctgcatatgagtctttcgggcataagggatatgagccttcttgaagagcctcctatggaaagacttccggttcagacatttgttatggaaagcaatgagcaatctgtaagagatgcgatacacagggaaatatcgagaggcggacaggtatattatcttcataacagaatagacaatatatttgaaacagccgcaaaaatatccaagcttgtgccggaggcaagagtgcagtacgcacacggaagaatgagcgagcgtgagcttgaaggcattatgacggatttcattgaaggcgaaatagatgttttggtatgcacaacaataatcgaaacaggtctggatattccgaatgtaaatacgataataatacaggatgctgacagaatgggactttcacagctttatcagctcagaggacgagtcggcagaagcaacagaacatcgtatgcttactttatgtacagaaaaaacaaggttttgcaggaaacggcggaaaagcgtttgcagacgataagagagtttactgagttcggttcgggctttaaaatagcaatgcgtgaccttgaaataagaggtgcaggctctctgcttggtgctgaacagcatggacatatggaaaccgtcggttatgatatgtactgcaagcttcttgaggaggccgtttcaaagctgaagggcgaagagcatacggaaaactttgaaacgacaatagatctgaatgtaaacgcttttattccggattattatattcaaaatgaagagcaaagacttgaaatttataagaaaatatcacttataaacagcatagacagctttaatgatgttcaggaggaaatagaggacagattcggaaacattccgaaaagtgttcagacattacttgatgttgcacttattaaaaacgatgcacataatctggatataaccgctatatcggaaaagaataaaaatatagttgtgacattcagagcaaatgccgacataaatacggaggttctcaccggactgcttacgcagaagaacagcccatat

SEQ ID NO: 1752 - DNA, 2226 bp, Unknown
  Unknown gut bacteria
atgtttgcacaggttattttgagcatatcccataatgacatagacagagtttttgattatgccgtcccggaaaaatttgaaggaaaagcaaagcttggcatgcgtgtaagagtgcccttcggaaaaggcggaaatataacagagggctatattgtcggtttaaaagacactaccgatgttccggaggacaaaataaaaaatattgtatatatgccggatgattttcctgtgtttaatgacactatgttaaagcttgcttattggatgcacaggagatatttcacaacactttcaaggtgtattcagacaataacgcccagcggcataaaggacaaaaccgattactataaaaatgttaaatatataaaaattggcgataattttgctgattcattgattaaatacgaaaacagcaaaaagagcgaaaaaaagcgtttgattttaaaatatgtgcttgaaaacggagaaatgccgctttctgtacttagaaacagcataaatagtgcggattatgcaattaaaacactcagagaagagaaagcacttgaggtatatgacaaaaaggttcttgctgagccttatataaacagcctgaatgaagaaagctcggttgtagagcttaatgatgagcagaaagccgtcatagataaatgggacaaagagcgtattgccgaaaacaggccgatactgattcatggagtgacgggaagcggaaaaaccgaaatttatatgaatatgattgagaaaattatttcggaaggcaaacaggcgatagtacttgtaccggaaatatcgcttactcccatgatgacgggaaggtttatgaaaaggttcggaaacaaagccgcagttactcacagcaagatgaatttcagagaaagatttaactgttggaaaagagtacaggacggtaatatatcggttgtaatagggcctcgttcagctttatttatgccatttgaaaggcttggaattgttataatagacgaagagcacgaaaaaagctatgtgtcagaaacttctccggcttatgatgcggttgaaactgcggaaaagctatgcagttttacgggagcatcgcttgttatgggtacggctacgccatctgtaagaacatattacagatgtacggaaaataaggtcgtgtatattccgcttgaaaaaagagcggttaagggcagcagacagccggaaatagaaatagtcgatatgcgtaaggagttggaggaaggcaacagaacggtattcagcagaagtctttttgaaaagatgaccaaaaatctggaaaacggcagacagacaatgctttttataaacagaagaggatattcaacctttgtttcgtgcagaagctgtgggtatgttatgaaatgtactcattgcgatgtatcatataaatatcatgcaacaagcggaaagcttgtgtgccactactgcggagaaaccgtagcaaggccggaggtatgtccggtatgcggttcaaaatacatcagatatttcggtacgggaacgcaaaaggttgaggaagaggtcaaaaagtattttccgacagcaagagtgctgagaatggacatggataccgtgagcggaaaaaacggatactcaaacatactgaataagtttgccgacggtgaagctgatatacttgtcggaacacagatgattgctaagggacatgattttaaaaatgtaacgcttgtcggaatacttgcagcagatatgtcgctgaataccggtgagtttgattccgaagaaaaaacatatcagcttattacgcaggttgccggaagagccggaagagcagagttggaaggaaaggttgttgtgcagacatattcaccggataatgaggcgataaagcttgccgtaaaaggaaatgcaaaagagttttacgaaagagagattagcttcagaaaaactctcggttatccgccatgcaaagcaagtatttatatagaattcaacggaaaaaatcaaaagaatacagccgaatgtgccgttatggcggcatatgaattcagaaaaaacgaagaatttgagattctcgggcctgttcccgaatatatatctaaaataaaggacgagtacagatacaggctcatagttcattcggcagatgatttaatgttaatgaacagagcaagagaaatatacgataaactcagagatgaatttgaaaatctcggtgtatatatgaagccgaaaacagaaggaataaggatatga

SEQ ID NO: 1753 - DNA, 2292 bp, Unknown
  Unknown gut bacteria
atgagcaaaaatgacaacggggaagaaaagcagagctttattgaaaaagtagcggcttttattgttgataaaagaaaggctttttatttggtttatatcggtcttgccatattttgtgtaatttcaagcggctgggttaaggttgataacgaccttacggattatcttccggactcaaccgaaacaagacgcggtcttacactcatggatgaggagtttactacattcgctacggcaagtgtaatgatagacaacatatcatattcgcaggctgaaaaaatatccaaagacatagaagatatagaaggcgtaaaacaggttgaatttgatgaaacagaagatcattttaaagatgcgtcggcacttttttcggttacattcgacggagagagcgacaaccctttgtgccagacagctttggacgaaataacaaatgatctcagcgattatgacttatatgtaaacagcgacgtcggtgaccagcatgcggaagaaatagacaaagagatgcagacggttatgatgattgccgtttgcatcatacttgcggttcttatatttacatctcatacatatatggaaataccggtgctcggccttacattcggtatggcggcacttataaataaaggtacaaactatatgtttggaacaatatcctttatttcgaactcggttgcgatagttcttcagcttgcacttgccattgactatgccattattctctgccacagatatacagaggaacgtgagcatatggaggcaagagaggcaacaataacggcactcagtaaggctattccggaaataagcggaagttcgcttacaacattgtccggtcttgcggctatgacattcatgcagttcaaaataggctacgatatgggtatcatacttataaaggctatcataataagccttttgtgcgtattcactcttatgcccggtctgcttatgtcgttcagctcgcttatagacagaactcatcatagaagctttgtgccgaagataacaaaatggggacattttgctgttaaatcaagatatgtcatgcctcctatttttgcggttttgcttattctcggctttgtattttcaaataaatgtccgtatgtatatggttacagtactcttactacatatgtggaaagcgattcgcataaagcggaacgaattattgatgaaaccttcggaagtacaaacacaatagctatgctcgttccgacaggggattatgataccgaaggaaagctgttgcgagagcttgaaaaaatggacgaggttgattcggttctcggacttgctaatgtggaggctatggatggatatgtacttaccgataagcttacgccacgacaattttcagagctggcagatgttgatattgaagttgcaaggcttttgtattcggcatatgctgttgacggcgaaacatacggaaaaattgtaagcggaatagacagctacggtgtacctcttattgatatgttttcgttcctctatgaccagatgcaggaaggatatgtttcctttgatgatgatatgacaaaggatattgaggatcttaacgatcagctttctgatgcaaagctacagcttaagggtgaaaattacagtcgttttgtaatacagctcaatatcccggaggaggatcagaaaacctttgatttccttactactctccatgaaacagcggctaaatattatgatgagggctgtgtgcttgtcggagattcaacaagtgacttagacctttcttcatcatttgcgacagataacgtaatggtaagtgttctttctgtagtattcgttataataatactgctgttcacattccagtcggcaggtataccggtattgcttatattggttatacagggaagcgtatggataaacttctccttcccttatctgatgaagagcaatctgttctttatgagttaccttgttgtcagctcaattcagatgggtgccaatatcgactatgctatcgtaataacaaaccgttatacggagcttaaaaaacatatgcccattaaagaggctattgttgaaacgcttaatcaggcgtttccgacaatcattacatctggttcgattcttgcggcagctggtatacttatcggtttcctttcatcggacggatgtatttcatcaatcggtatatgccttggacgaggaacaatcatatcaataggacttgttatggctattcttccgcagctgcttatactcggtgatattatcattgaaaaaacagcgtttacgctcaaaaagcctgctatcatacag

SEQ ID NO: 1754 - DNA, 2598 bp, Unknown
  Unknown gut bacteria
atgaattggcacagcaggacaacggacgaaatatcggtgttactcaatactgatcttagaaacgggcttacggaagaaaaggcagaaatgattaaagccgaatgcggaaaaaatataattgaaacagaagtgaataaaaagagtattttaaggagattttttgaacagcttaatgatgttatgataataattcttctggcatcagccgctgcatcttttgttgtttcgtttattaacggcgaaaatgattttgcggattcattattgataattatgatagtcattcttaacgcggttcttggcgttatacaggaaaacaaagcagaaaaagccattgatgagttgaaaaggctgtctgttccgcatgccagagttttgagaaacggacatataaagcttattgactcggaggatgttgttccgggagatttgcttgtgcttgaggcaggcgacagagttgcggctgatgcaaggcttataagctcggccaatcttaaggctgatgaatcggcattgacaggcgagtctgttccggttgaaaaggaaacggtgcttcgtctgcctgagaatgcacagacagccgacagaagaaacatggtctttgcatcggcatatataaccaacggaaaaggaacggctgttgttgtggaaacaggaaaaaacacagaggtcggaaaaatagcaaggcttatttcaaacaaggaaaccgaagaaacacctttgcagaaaaggctcgacagtacgggaaaaatactcggtctgtcggctcttgccatatgtgcggttatttttgttataggtattttgagaagatattccgtattcgatatgtttatgacctctgtaagtcttgccgttgccgcaattccggaaggacttccggcaatagtgacgatagttcttgcgataggcatgcagaagatgtcacagcagaacacgatagtaagaacactgccgtctgttgaaacactgggctgtgcacaggttatatgcaccgataaaacaggaacgctcacaaaaaacaaaatgacggtagtgcgaattgaggacggaaacgaaaaaacgacaatcaattcaaagagattcatactgcggcttgcggttttgtgcacagactgcttttatgaggacagacattatataggtgatccgaccgaaacggcgatagccgaggccgccgaaagaatgggcgagcacaaaatacggcttgatgaaataatgccaagagttgacgaaataccattttcatcggaaacaaaatttatgattacggtacataaatttgaagacggaaaaaagatatgtattattaagggagcaccggaaagagtgctgtcaaaatgcggtaaaatttatgacaatgtgagcattgacaggaatataaccgaaagaatatataaaataaatgccgatatgacaaataaggcgcttagggttattgccgttgcatataaggaaataccgaacaacagtcgtgaatatgacagagattttatattcgcaggctttattggcatggcagatccaccgagagaagaggcaagacaggcggtaagcgaatgcagaagagccggaataaaggttgttatggttaccggtgaccatatgctgactgccaaatccgtagccgaaaaaacagaaatatattccgacggagatattatagttgaaggaaatatgcttgataatatgtcttcaacggaattgaatgaaaagctggacaaaatatcggtatttgcaagagtatcgccggagcataagctgaaaattgtcgaggcatataaacgaaagggcatgattgcggcaatgaccggtgacggagtgaacgatgcaccggcgttgagagcggctgacataggctgtgcaatgggaaaaacgggaacggatacggcaaaggcggcggcagatatgattattgcagatgacaacttttcgacaatagtctgcgctgtaagagaaggcagaataatatataaaaacataaagaaagctgtgcattttcttttgtcgagcaatgtcggagaaatacttaccgtatttacggcaatggtttttggctggagtacgccgttactgcccatacatctgctgtggattaattttataaccgattcgcttcctgccattgcattgggacttgatgttccggaggaggacgttatgacggaaaagcctgttgcaccggacaagagcctttttgccggaggcatgggaagccgaattatatatgaaggtgttatgattgcggctctggcacttacggcattcggtataggccacaaatattatgacggaaacgaaatgcacagagtaagcagaacaatggcgtttgccgttttgagtatcgcacagcttattcatgcctttaatatgagaaccgataaatctttattcaaaatacatatattgagaaataaatggctgtgcatggcttttgttataggcattatacttcaagcgtcggttagaatgctgccgccggtggcagagatatttacggttgttccgctaaatgtgaaacagtggcttatcgttatgggactttcctttgtgcctgttgtattttcggagattgagaaggctgtattcagaaaataa

SEQ ID NO: 1755 - DNA, 1875 bp, Unknown
  Unknown gut bacteria
atgaagataaaggttaagaatataatcagtaaaatagccgcagtcggcgttatgatactgatggtgttctctgcaatgcctaatgttgcctttgcggcagacagcgcaacggcactggaaacagttaaggcattgggaataacaacaggagaaaatctcggctcaagcgtaacaagagccgagttcgcaaagatgctcgtttcggcatctacatttaaggatgaggtcggaacagattccgcaaactcactttataaggacgtaaagaagaatcattgggcagttgaatatatcaaaattgccgttgaacagggctggatgacaggctattccgacggcacattcagaccgtccaatacaatccgctatgaagaggcggcaacggcagtgcttaagcttttgggctatgatccttctacatttgccggaaacttcccgtctgcacagataagcaagtttgaatcactcagccttgcggacggaacaagtcttaaaaaaggcacaacactcacaagaaacgactgcgtaaatattttctataaccttatgaacgcagacgacgtaaacggagctaagtatgcaactaagcttggctatacggtaacaagcacaggcgaaataagctattcatcactcgtatcaaacgaccttaaaggcccttatgtatacgaaagcggcgatttgttcgcaaatattccgttcagctcggcagatgcggctatatacagaaacggagtttcaacaacacttgcatcggctcagatttatgatgtttactattataatactgctcttaagacagtatggctctatgcaaacagcgtaacaggtacatttacggctgcacagccttcaacatctgcacctacaagtgcaacggtagccggaaacacatacacactcgaaagtgcggcagcatataagctttcagaccttggcacatacacaatcggtgataaggtaacactccttctcggcaaggacggaacagctgttgacgttatatcaacaagccgtttcagcggaagttttacaggtgttatcacaaagattggcacagactcatacacaaatgaggcaggcgcaaaaataatcgaaaaggtactctatgtaacctgcacagacggagtacagagaacatactcagctaagacagatgatttcgaggtaggccagacagtaagcgtatccttcaacggccagaccagctccgtaacaagagcgtcaggcagaagccttacgggagcattcaactccgacggtacaaagctcggctcaatgacaatagctaagggctgcaacataattaatatcaatcaggacggctctgtaacaaagacatatgtatcaaagcttgcaggcaaaaatatgtcctcaggtgatgtaagatactacatcacaaacggcaataacgagattacagacctcatactttatgatgtactcaacgaaggcaagcagttcggtgttatcgttgatacggataagataataacaggctatgacaatgacggcgaagaaacctgccagataacatataaatacctcatcaacggtgttcccggcgaggcaaccttcacaggtgatgactacggcgcatcaagaggcccggcatacttccagttcaacaacggcaagcttgtatatatcggcagacttagcggaacatcgcttacaaatgtcggctacggcacagcatcaagccagacacagaaatataacctcagcgaggacgtacaggtatatgtcaagacaggcgtagaaagctatgaaatgacaaatatcaatacggcaagcaatacagaccagtataccgtaacaggatatgtatacggaaacgaagttgttgtaattgttctcgttccgagaagctaa

SEQ ID NO: 1756 - DNA, 2280 bp, Unknown
  Unknown gut bacteria
atggacgatacgatagtgctcgaaggtactgttgaggatataatatttcagaataaggaaaactggtatactgtttttaattttaacagtgatgacggcgacgaagtaacatgtgtcggaacaataccgcagctcagtaaaggcgaatcgcttaaattatcgggaactatggttatacatccgtcctatggcttacagcttaaggttgatattttcgaaaaggtcgtgccgacaaatgccgccgcaatagaaagataccttgcctcgggaacaataaagggtataggagcaaagacggcaaagaagattgtggacaagttcggtgcggctacattttatgttatagaagaaaagtttgacaggcttgttgaaataaagggaataaattacgacaaggcactgaaaatacacacagccttctgtgctcagagagatgtgcgtaaggcaatgctttatttgcaggattacggcgtttcggcggcaatggctgttaaaatatataaaaaatacggttacagaaccattgagattataaaggaaaatccgtacaggctggcagaggatattataggaataggctttaaaacagcggacagcattgccgacagcatgggaatttccaaagactcaccaaacaggattaaatccggaatacgctatatactcaatatggacgttgctgacggcaatgtatttatgccgttcaacaatcttacggcaagagcggaggagatactcggagctgacagtgaaacggttgagcactgtcttaaggagctccagattgagcataaaatatttagggaaaaggtagaagatattgatgctgtatatacaatgcagatgtattatacggaggtatctgccgctaaaaaaataatagagctttccttttaccatgatgaggcagatctcaaaagcataaacgagaaaattgaaagacttgaggacagatcgggaatatatcttgcggaacagcaaagacaggctgttgtcgaggcaatgcaggaaggcgtccttgttataaccggtggcccgggtacgggaaagacaacgataataaacaatattatatccctgtttgacagcatgagtcttgaggttgttcttgcagctcctaccggacgtgcggcaaaaagaatgaccgaggcaacaggcaaagaggcaaaaacaatacacagacttctcggagtttcctataacgataacgacaatgcaaagcagaagtttgaaaaaaatgaggaagatccgatagatgcggatgttgttataattgatgaggtttctatggtggatatgcagctttttaatgctctgctgaaagctattgaaccgggaacaaggcttatacttgtcggtgatgctaaccagcttccgtcggttgcggcaggaaatgtgcttaaggacataattaagagcgaaatagtcaaggtcgtaaggcttacgcagattttccgacaggcacaggaaagtgccataataatgaatgcacataggataaatgccggaacagatcctgtgatgaatgaaaaaggcaccgactttttctttgtcaatgagccatatgccgcaaaaataccgcagacgattgttgagcttataacaaagcgtctgccacagtttaccggagtggattccttctgggatatgcaggtgcttacaccaatgagaaaaagcgatataggtgcatcgggactgaacaaaacgcttcaacgggcgttaaatcctccggcgtctgtcaaaaatgaatatgaaacacagaacggtgtttttcgtgaaggcgataaggtaatgcagataaaaaataattataatcttgcatggaaaatgctttcggaaacaggcagaattacctccgacggaacaggcgtatataacggagatatgggtataatcaaaaagattgactcggtaaatgaaacggttacggttgagtttgacgataagagaattgccatatatgaatttaccgcactggaggagcttgagctgtcctatgccgtaacaatacataaatcgcagggcagtgaatatcctgttgttattataccgatacacagtggcccgcaaatgcttttgtcgagaaatcttctttataccgcagtaacaagagcaaagaaatttgttatcgttgtcggactacgaagtgccgtaaaaaagatggttgcgaacgatagggagataagccgatattccggattggcatacagaatgtgttcgctatatgagtttatggcggaaacgaacgatatggggagaagtataagtgaagacagttga

SEQ ID NO: 1757 - DNA, 1839 bp, Unknown
  Unknown gut bacteria
atgtgcggtattgtcggatatgttggtaaaaatcaggcaccgtctattttgttaaacgggcttgaaaagcttgaatacagaggatatgattcggcgggtattgctgtacatgacggagttaatataaactttcttaaagcaaagggcagacttgaaaaccttaaaaagctttatgaagaaaatcctattacgggaacacttggtataggacacacaagatgggcaacacacggagcaccttccgatgttaatgcacatccacatgtcagtgacgataatataatcggtgttgtacacaacggtataatcgaaaactacatggagataaaggaagagcttcttgcaaagggctatacctttaaatcggaaacagataccgaaacggttacttatcttattgatgataactacaaaaacggtatgagctttgaagacgctgttttcagtgccgttgacagaatagaaggtacttatgcactcggtatcatctgcaaagatgaacccggaaagcttattgcagtaagaaagggcgcacctcttataatcggcaaaggcgaaggcgaaaactttattgcaagtgatattcctgcaattcttcatcatacaagagaggtttattttgttgaggacaatgaggttgccgtaatcacagaaaatactattaatatttataataaggacagacagcctgttcacagagatatattccatgtaacatgggacattgaggctgccgaaaagaacggctttgctcatttcatgcttaaggaaatacatgaacagccgagaatagtaagagaaacaatacttaagagaatgcctgaggacaaaaattttgttgacctcgacgatattaagctcggaaaagaagagcttgataatatagacagaatatatattgttgcctgcggaacagcttattatgccggtcttgtgggaaaatatcttattgaaaagatatgccgtattcctgttgtaagtgatgttgcaagtgaattcagatacaaggaccctattcttgacgaaagaacacttcttattgttgtttcgcagtccggtgaaaccgctgatacacttgaggcactcagaatagcgaagaaacacaatgcaagagttcttgcgatagttaatgctgtcggaagctcgattgcacgtgaagctgatgatgtattttatattcttgccggaccggaaattgccgttgcatcaacaaaggcatattccgcacaggttgccgcaatgtatatacttacagcacatattgcacttacactcggaaaaatttccgataaggaatttgaagagattagggacgaaatgtatcagttgccttcgaagattgagtacattctccagaaggaaaacgaagaaaagagacttgccgctaaatataaagacgtacacaatgttttctatataggcaggggccttgattatatggtatcacaggaaggctcacttaagcttaaggagattgcatatctccatagcgaggcatatgccgcaggagagcttaagcatggcccgatagcaatgattgatgataattcgcttgttattgccattgcgacacagaatgatattattgaaaagacaataagcaatattaaagaggtaagggcaagaggtgcaaagaccatagttataacaatggaaggcaataagatgattaattcggaggttgccgacgatatattctatattcctaagacattggatatacttgctccggtgcttgcaaatatacctaaccagctttttgcatattatgtagcattaaatctcggaacagatattgacaaaccgagaaaccttgctaagagcgttacagttgaataa

SEQ ID NO: 1758 - DNA, 2022 bp, Unknown
  Unknown gut bacteria
aatacacagcttgcacagaatataattgcggcatattttgccggagcaagattttttgagcttaaaaccgtacaggagatggacggagatgagcttgcaaagtgcatagcaagaccttgtattcttgccgacgacgaaggctataactgcgagtggtcaacagagcttacggttacacaggcagtggacgaatatgttaaggcatggatgcttataaaggttctaagcgatgcactcggaatcggtgacgctgacggagttgtgttcaacatgagtgtcggctatgaccttaagggcataaagggtgaaaaggtagataaatttatagatggattaaaaaatgcggaaacattgccttattggattggctataaggctattttaagagaggcatttcccgataaaggaatgcttataagtaaaatttcacctaatatatgcagtagtgtaacgctttcgacacttcatggctgtcctcccgatgaaatcgaaagaatagcttcatatcttatcacagagaaaaagcttaatacctttgttaaatgcaatcctactcttctgggctataaaacggcaagagaaacacttgattcaatgggctatgactatatagcctttgatgaacaccatttcaatgaggatttgcagtatgaagacgcaattcctatgtttacacggcttaaaaagcttgcagaggacaacgggcttgagttcggtcttaagctttcaaatacattcccggttgatgtcaaggccggagagcttccttccgaagaaatgtatatgagcggaaaggctctttatcctttaacaatagaaatggcaaacagaatttcaaaggcgtttgacggaaagatgagaataagctattccggcggtgctgattattttaacataaataagctttttgaggcaggcatatggcctgttaccgttgcaacaacaatacttaagccgggcggataccagagattgacacagatggcggaaagccttgaaaaatgcgagtttaaggattttgacggtgtaaactgcgatatggttgcagagctttcggaaaaagcaaaaaccgatattcaccatgtaaagccggttaaacctattcccaacagaaagcttgataaggaagttccgcttattaactgttttacagcaccttgtaagggtggctgtccaataggtcaggatattccggaatatatagaattatgtaaaaaaggtctttacacagaggcgcttgaggttattacggctaaaaatcctcttccgttcattacgggaacaatctgttcacaccgctgtatgagcaaatgcacaagaaacttctatgaagagtctgtgcttataagaggaacaaagcttactgcggctgaaaacggatatgcacagttaatggaaaagcttgatacacctgtggcttcatcggataaaaatgtagcgatagtcggcggcggcccgacaggtattgcggcggcgttcttcctcggaagagaaggaataaaggctacaatattcgagaaggaaggcaagctcggcggtattgtaagaaacgtaattccttctttcagaataagtgatgaggctatcgacaacgatattaagcttatggaaaaaatgggtgccgaaattaagcttaatacacctgctccgtcattaaatgagcttaaggaagcaggctatacacatattctttattgtgtcggagccgaaaagcccggtaagcttgatatagacagtattaatgtaatagaattcctcaaaaaggttaaagccggagaaacagccggatacggtaagaacatagccgtaatcggtggtggaaataccgcaatggacgcagcaagagccgcaaaacgctgtgacggtgttgaaaatgtatatattgtatacagacgtacgaagaaatatatgccggccgatgaagaggagcttatgcttgcacagtatgacggagttaagtttgttgagcttgccgcaccggttaagcatgaaaacggaaagcttacagtcagaaaaatggtt

SEQ ID NO: 1759 - DNA, 1908 bp, Unknown
  Unknown gut bacteria
gtcgaaagtacaaaaatgagcatggtaaacggatttttcgaaccatgggacactatgcgaaggctcaaaaagatatgtgaggacaacggctttaatatagaaaaaactatatgccttgaggaatgtcacagatttaataccgaaggcatgaaaaatattgaaagaaaatatttcagctatgcttttgccgacggaaaaaacagcagtgacggcgtcaagcttatgactgccgaaagccttgatgatgaaataaatatgtgcgcctcggaaataattcatcttgtgcgtgataagggacttcgtttcagagatattgcacttacttcaagaagcttaagtgactgtgaagaaacggtaagaagagtattcagccattacggaataccgtttttcatggacagcaaaaaatccgttatgggacacccgtatacggaatttgtgcgttccgttatagaaatgactgcggataatctgtcatatgaatcgattttcagatgtcttaaaacggagcttactccactggaaagagatgacagagataagcttgaaaactatgttctccgttacggaataaagggtgatacatggacagatgcccactggcaatggggctttgaaaaggaagaaacaaccgaaaaggaagacgaaataaatgctctgcgtgagcttgcaataaatccatttaaggatttttataaaaaatataaaagcggaaagcactctgcggcagaaataacctcggatttgtacggaatatcggtttctctggaaattgccgacagacttgcacagaaagcggaagaggacgatacggcaggcaacgcagtaaaagcacaggagcatatacgctgttttgatttgataagcggactatgccagagcatatctgaactgcttggcgatgaaaccatgacaatacgtgaatacggtcagatattcgaggcaggactttccggccttaaaatgggtattgtaccggagtgcatagacagtgttacggtcggtgatatagagagaacccgtctgccggaaataaaggcactttttgttataggggtgaatgaaggcgttcttccgtccaacgatactgatattaaaggaatacttaccgaaagagaaagaacggcgttggaggagcttggtgcagagctgtcccatagcggagcaagacttgcttttgaagagcagtaccttatttatatgggaataacaaagccttccgattatctttatatttgcagaaatcttacggactcatcgggtatacagacaagaccgtcgtcggttataacaaggcttgaaagaatattcggcgatatagaaacggaggagtttaatccgtattcggtaaaggctgttgacagacccattcccgtacttcacagaattggcgaaaagcttgccgaaggcggagatatggacgctctttggaacggagcatacaaatggctcgaaaacaacagcgagtattcgtctgcggctgaactgctgaaaaaaggtactgaatataaaaataaagaaaataatcttggcaaggccaacagagaaaagcttttcggaaacgaactgcatacaagtatatcaaggcttgaggctttctcggaatgtccgttttattactatgcgaaatattcgcttaaggtatcgccgagaagaatatacggcttgcagacgccggatttaggctcgctgtttcatgcggtgcttgaaaaattcacttccgatatgaaggcaaaaggctatgactggaatacgataccttccgaagaggcaaatgagcttatagaatctgctattgatctgcttgcaccggatacggcagacaaggttcttttcagtacagcggcaaatgcctatatgcttaggcgaataaaacgaataacaaagagagctgtttcggtgctcaaa

SEQ ID NO: 1760 - DNA, 1986 bp, Unknown
  Unknown gut bacteria
atgaatattgatcagttgactataaatacattaagatttttgtcggttgaagcaatccagaaggcaaaaagcggacatccgggacttcctatgggtgcggctccggcagcatatactctttgggcaaagaatatgaagataaatcctgccgattcaaaatgggcagacagagatagatttgtgctttcagccggacacggttcagcacttctttactcacttcttcatgttttcggatacaatgtaacaatcgacgatattaaagaattccgtcagctttcaagcattacacccggacatcccgaatacggaatgacagacggtgttgaaataagctcaggtcctctcggacagggcattgccgctgctgtcggcatggctattgccgaaacacatcttgccgctgagttcaataaacccggctatgatgttgttgaccactacacatatgcgatgtgcggtgacggctgccttatggaaggcgttgcatctgaggctgcttcacttgcaggaacattaaagctcggaaagctcattcttctttacgactgcaacagcataacaatcgagggagatattaagacatcatttgatgaagatgttctcaagagatttgaagcttatggctggcagacacttacagttaaagacggaaacgacgttgatgcaatcgacgcagctataaaagaaggtaaggctgaaaagaataagcctactataatcaaggttataacagaaatcggctacggtgcacccaataaacagggcaaggcatctgcacatggtgagcctctcggagaagaggaaattgcacttgcaaagaaaaatctcggctgggaatacgaagaaagcttctatgtacccaatgaggttaaggaacacattgccgcaatcaatgcaaagaatgcggaaactgaaaaggcttggaatgaactttttgccgcatacgaaaaggaatatcccgagcttgcggctcagtggaaggaatggcatagtgaaaagccttctgcagaccttatgaataatgaggattactggacatatgaaggaacaatcgcaacaagagcatcttcagagaaggttctcaataagctttcaaagcttgttcccaatcttatgggcggttctgctgaccttgcaccttcaaacaagagtgtaatgaaggacagagaatattattcacctgaaaacagagcaggctcaaatatgcacttcggtatcagagaatttgccatgactgttattgcaaacggtatgtatctccacggaggcttaagaccttatattgcaggcttctttgtattcagcgattatatgaaggccggcttaagaatgtcagcacttatgggacttcccgtaatcagcatattcacacacgacagcatcggcgtaggcgaagacggccctactcatcagcctgttgagcatcttgcggctctcagaagcattcccaactacactgtattccgtccctgtgattcaagagaaactgctgctgcctggtgtgcggctcttgaaagaacaacaagccctaccggtattgtgctttcaagacagaacttacctcttcttgacggaacaggaaaggctgcacttaagggtgcttatgtgcttaaggacagcaagaaagatgttcccgacgtacttcttatggcaacaggttcagaggttgagcttatttataacgcatgggatgttcttcaggagaagggcattgatgcaagagtaatcagtatgccttcatgggaagtatttgaagaacagtcggatgaatataaggaaagcgtaattccttcggctgtaagaaaaagagttgctgttgaggctgctgttgatttcggttggtataaatatgtcggacttgacggcgaggttatttcaatgcatggctatggtgcatcggctcctgcggctaagctttttgaaaaatacggatttacggttgacaatgtagttgaaactgttttaaaagtagtaaataaataa

SEQ ID NO: 1761 - DNA, 2718 bp, Unknown
  Unknown gut bacteria
gcacttcccgacggatttaaaacaatcggagaagcagctttcgccgactgcaaagctctcaaaacagttgaggcaggaaattcacttgaagaaatcggcacagaagccttcaagcgttcaggtcttgaatcaatcaaccttcccgcaacattaaagacaatcggcacagatgctttctacgaatgcaacagccttaaagcaataaatgtttccggaacaggagcatacacaagcgaagacggcgttcttttatcagacagaggcaaaactctcttagtttaccctgctgcaaagacaacaacagaatacactgttcccgattcggtagaagcaatcgcagacaaggcattctacggaaacacaagaattatcgaactcaacacaggtaagaatacaaagacaataggcaaaaatgctttcggaaacatgagtgctctcacaacattaactatggaaaactccgttgaatccttaggagagatggcattctatttcagcagctggagcagctcaagtaagcttgaatcggttactctttccgaaaagcttaaatctcttccgaagtattgtttccgcggctgcaactcattggaggaattaacaattcctaagagcgttgagcttatcgacagcgattcgattccttcatcggttgaaaatgtaacaatcaaatcaacaggcgaaacaagcgaaagcttagttgtaaaatcagccaacacatctgctaaatacagagttgctacagaatccgttaaagcaaagcttgttgaatacggagttcccgaagcaaacataacagttgacgatactcttcttgaggacggcgttaaagagccttcattcacaaagaacggtatttcatacacagttacggcagatcctaccgaaacagaacccggtgtggtttctatcgaaagcgttgacaaaacagttattgacaaagccggagattatacaatagccggaacagtaagaaataacggttataactatgtagtaaaagaaatcaaagcaagtgctttcaacggttgtgacaacattgaatcaatcacagttccaaacacagttgaaaagctcggagtaaatgctattgccggaaacttaaaccttaaatcaattacatttgagaccggcagcaagcttacaacaatcgaaaacggtgctctttccgacaacggaaagcttgaagcaatcacaattcccgcaagcgttaaaaatatcggtgattacatactcggttggaattacagcttagcaacagttgaattcgaagaaggaacaactctcgacaacatcggcaagggaatgttcttcagagatgaggctctcgcttcaattactcttccttcaacagtaacagttataaacgacgaagctttctataactgcaaggccttaattgaaattgatttaagcaacattgatgaaatcggtgcgtatgctttctataattgtgcatcactcaaggaagcaatattatcaaatgatgtaacagaattaaacgatgctgcattctatggctgctcatcacttgagaaagtaaaattaagtgaaaagcttactaagcttggcgaccttatcagcgaggacgcagaagaagatgttaagggcgtattttccggctgcacttcactcaaggaaatcgttattcctaagggagtaaacaccatcggcaagaacacattcaacggctgcgaaaatctcagaagagttataatcgaaacaagctcacttaagaaggttggagcaaacgctttcaacgatgtgtcacccgaagcagtattcgttgttaaaaacaatgctgcaaaggacgagcttataagcggtggaaacatcagcaaggataaaataatcgtaacagatgagcttgaaagcattcttaaaaaagccgaaaacgctaagaaatcaagctacacaacagataaatacgaaactcttgtaaacgaaatcaacaatgcaaaaaatattcttgcaagccttgacacagttacaccggaagagttcaacaatgcggttgattcattaacaacagcattcaacgacaaaaagaaggacaacaacagcggtagccacggcggcagttacacacttgacaacataacaggtgaaaataagaacaacaataacaacaagccttcaacagaagagcctgacaatgcatacgatcctaaggacgcttcaaactatgtagacatcattaaccactatgcttatacatatgttaaggacgctatcgaagaaggtcttataaagggcgacacagcaacagctttcaatcccgatagagcactctcaagacaggaggcagtttatatgctctatatgcttgacggtgcggattacagcggaaactctgtattcacagacgtttacaacaacaatccttatgcagacgctattatgtgggcatatgaaaacggcattgtaagcggtatcggcgacggtttatttgctccgacagcaaacgtaacccgtgagcagatggcagccttcatatacagatacttcacattcaagggcattgatgcatcagacagagccgcagttacaggcttcaacgattattcatcaatctccgaatatgctattgataatatctcatgggcagttgcaaagggaatctacaaaggaagaacggacaacacaatcgctcctaaggataacatcacaaaggctgaggctgcaataacagcacagaacattaaaggcattctttaa

SEQ ID NO: 1762 - DNA, 2058 bp, Unknown
  Unknown gut bacteria
tggggtgtgtatatgaggcttgaagatcctataagtacagtaaaaggcataggtgcggaaagagaaaagagattcaaaaagcttgggatagaaacggcagaggatttgcttaattattatccgagagattatgaggacagaacaaaggctgtccttatttccgagcttaaggaggacgaaaccttcgttatactggcggcatctaaagaaacggcaaaaacagcatatgtcagaggcatggcaattacacaggtaagagtttatgatgcaagcggaagtataactgtcgtctggtacaatcagccctatgcaaaaaatataataaagcccgacattatgtatgcaattataggaaagcttacggtcaaaaacggcagaaagcagattatatcgcccgatgtggaaaaaattcctgacgatgaggaatggaagggcagtatagaacccatatatccgttgtcggcaggtttaagccagaaggtattccgcaaaacgataaagacggtgcttgatgaaacagaggcatatataaaggactatcttccgatggatataagaaaaaaatataagcttgccggaagacagttttccataaaaaatatacatgagccggaaagcatggaaaactacgcaatagcgagaaaaaggcttgtatttgaagaattttttatgctccagatgatgcttttgagaatgaaaagcgtgagcgacggaaaaataaccggagcaaaaatgaaaaaggttgacatgaaaccgtttttcggacagctaaccttttcctttaccgatgcacagaataaggtttttaacgaaataagaaaggatatgtcctccggaaaggttatgaacaggcttgttcaaggagatgtcggcagcggaaaaaccgcagttgccatggcggcggcatatacggcggtcaaaaacggatttcaggcggttatgatggcaccgacagaggtgcttgcggcacagcatctggaaagctttaagactgtatttgagccgcttgggataaatacggttctgcttacaggcggacaaaaggcaaaggaaaaaagagaggttctcgaaaaaataaaaaacggtgaggctgatattgttatcggaactcatgcacttatacaggacagcgttgaatataaaaaaatcggactggtaataaccgatgagcagcaccgtttcggagtaagacaaagacagatactttcggacaaaggagataatccgcatatactcgttatgacggcaacgcccataccgagaacgcttgcattgatactttacggagatctggatatatcgataattgattcacttccgcctggaagaaaagagataagcacctatgcggtaaatacatcatacagaacgagaatatataattttattaataaggaaatagaaaagggcagacaggcatatataatatgtcctatggttgaggaaaatgaaaaaatagaagcagaatcggttatggaatataccgataagctttatgatacggtgcttgcggacaggagaataaaatatgttcacggaaaaatgaaatcggtcgaaaaggacgaaatacttaaatctttttcggaaggaaacatagacatacttgtgtccacaacggtaatagaggtaggcataaatgttcccaatgcaacggtaatgcttgtggaaaatgcggaaagattcggccttgcacagcttcatcagcttagaggacgagttggaagaggcagtgaaagctcctactgcatacttgttacagacggaaaaagcgaggtcacgaaggagcgaatgaaggtaatgaagtccacaaccgatggctttaaaatatccgaaacggatttaaagctgagaggtccgggagaatttttcggagtaagacagcacggactgccaagtcttaaaatagcgaatatgtataccgaccttagcattctgcggtatgcacaggacgccgccgtcgagcttataaaaaatgacagacttcttgaaaaagaggaaaatattgaccttggaagagagcttgacagatatgttacaataagcaatatcggtatctga

SEQ ID NO: 1763 - DNA, 2016 bp, Unknown
  Unknown gut bacteria
atgaaaatggctttatttgcgggaacaacagaaggacgccatatagcaatggtatgtgacgtttacggaataaactgtactgtttttgttgcaacggcacagggctgtgaagggctggaatgtctgagcagtattgagctgagagaaggaagacttgacgaacaggagatagaacaggtattaaagaatgaaggcttcgaatatgtctatgatgcaacgcacccgtatgcaagagaggtaacggacaacgtaagaactgcctgcgaaagaatcggctgtgaatatatacgagttgtaagggaaagcgtaccgatagatgatgatgcggttgtaaccgaaagctttgaagaggctgtaaacatattgaacagtatggaaggcaatattcttgttacgacaggaagcaaaaatgccgcagactatacaaagctgaatgattttcaaaacagggtatatttaaggacacttcccgatgaacagacggttgccgctttatgcgaaatgggatatgaccgaagtcatatcataacaggaaaagggcctttcagtgaggctgaaaacatagacacaatagaaagaaccgaaagccgtatacttgttaccaaggacagcggaagagccggcggccttgcggaaaagctttctgcggcaaaaaaatgcggctgtaatgtaatagttgtaagacgtccgaaagaggaaggcttgagcgaaaaagcggcagttgccaagcttataagggatagcggagaaaacatggataacagcgccgaaagcaccgaattaaagaaaatagagataaaggaagaaaagccaaaggaaaagatatatataatcggtatcggtatgggcgatataagccttatttcatcaaagaaagccgaaataataagaaacagcgaccttataataggtgcgtcaagaatggttgacgcctgcaaggaaaacggacttatcagcgacaaaacaaaggtattcaagcatttcaataccgataagatagccgaagaggcagaaaaaaacgaaggaaaaactgttatacttatgtccggcgataccggattttattccggagcaaaaaagcttgcagaaagactgggcgagcgtgttgaaataatgccgggagtttcgtccttgtcttatatgtcggcaaagataggcatttcgtgggaggatgtatataatgtcagtcttcacggaagaagtgcgaatattgcctttgccgtaagaacacataaaaagacattcgtgcttacggacggctctgtgaacgacatacttaagcaccttaccgaatacggacttggtgctgtcaaggtatttataggctgtcgtttgtcttatcccgatgaaagaataatagaaacaacacctgaaagctatgacggaaacgatacggattcactccagtcattgtttataattaataataattatgagaaccgaatgagatttatttccgatgatgagtttataagaaacaatacgccgatgacaaaggcgtctgtaagaaatgcggttgtttccatgtttgatgtaagcgaaaacagtattatatatgatatcggtgcaggaacgggaagcgtttcggtaatgctttcaaggcttgttcccgaaggaaaggtatatgcttttgaatataaggaaaaggcctgtgaggtcataagtgccaacataaagaaattttctgccgacaatgtttcgattgtaagaggaaaagcacccgaaagcataaaaaacgcaattaaaaacgatattccttatccgtctgcggtattcataggcggaagcgaaggaaagcttgcggaaatagcaggctgttttgaaaacagtggaattagggtggtaatttcctgtgcgacaacggaaaccttcggacaggcattacagcttattaatgacggagtaattaaagacagttcaataatgcagacagcggtgtcatcagccgaaccgctcggaaaatatcacattatgagagcggaaacacctgtctggcttgttaagggaacattataa

SEQ ID NO: 1764 - DNA, 1632 bp, Unknown
  Unknown gut bacteria
atgacaattaaagaagccgatgtactttcatattatcttaacggtatagagaatgtacatcaggcaacagtatatgaaagaacatgcgatattgtggttttatataatgacgacaaaaatgcggttctggctgctctgaaaaactataacggacaggacgaagagcttattaaacaggttccggaaaacacaggacgagagctcaacagaatgtatcaggacaagctcgtaaatatgattttgttcaaagcagcaagaagtatattccttcctgcaccaattatagctgcatatactgctgttaaatcggttaaatacatatggaagggcattaaatgtctgtttaataaaaagcttgaggttgaggtgcttgatgccgtatcaatcggtgtgtcaatagcaagattggatttctcgactgccggttcggttatgttccttctcggaataggcgagcttcttgaagaatggacaagaaagaaatcgatagatgacctcgcaagatgtatgtcactcaatgttgacagagtatggctgaaaaaggacgatacagaggtacttgtacctgttactcaggtacgtcccggcgaccttattgttgtacatacaggcaaccttattcctcttgacggtaaggttgttgaaggagaagcatctgtaaaccaggcatctcttacgggcgaatcaatcgcagttatgaaatcaaacggtgcatatgtatatgccggtactgttgtagaggaaggcgaatgtgtaatatgtgttgaaagccagcagggctcaagcagatatgataacatcgtttctatgattgaaaattccgaaaagcttaaatcggcaactgaaagccgtgcaattaatcttgctgataagcttgtgccttacagcctcggcggaacagcacttacataccttataacaagaaatgcaacaaaggcactttcaatacttatggttgacttctcatgtgcgcttaagctttcaatgcctcttgctgtattatcggcaatgcgtgaatgcggtacatataagattacggtcaaaggcggaaaatatcttgaggccgttgcaaaagcagatacaatagtatttgacaagacaggtactcttacatatgcttcacctaccgttgcagaggttattcctttcggcggtatggacagagatgaagttcttaaggttgcggcatgtcttgaagagcattatcctcattcaatggcaaatgccgttgttaaagaggccgcaaaagaacatattaaccatgaggaaatgcactcacaggttgaatacgttgttgcacatggtatttcaagtataattgaaggtaaaaaaaccattatcggcagcaagcattttgtgtttgaagatgaacatgcaactgttcccgaaggtgaagagtataaattcgaaaatcttcccgaacaatattcacacctttatcttgcaatcggcggcgttcttgccggagttgtctgcatatccgatcctctgagagaagaggctgcggctgtgcttacaagccttaaaaagctcggtataaagaaaactgttatgatgacaggcgataatgaacgtaccgctgcggcaatagctaagcaggtaggtgttgatatgtattatgccgaagttctt

SEQ ID NO: 1765 - DNA, 1626 bp, Unknown
  Unknown gut bacteria
atgaaaaagaaacttatttcccttcttacagctgttgttatggctctcggcgttgcagttcccgcaatggcagaggacacagcttctatgaagggcaagcttgtagttatccacacaaacgatatgcacggttattatgaaacaaccgacacagctatcggtatcgccggtgttgccggacttaaggattactatgaagctcagggcgccgatgttcttctcttagacgcaggcgatttttcacagggcaatactcttgtaggctattacaaaggcaaaaatgctgccgaatatatcgcagcagcaggctatgacgcagtatcaatgggtaatcacgaatttgactacacattcgatatccttcttgacaacatgaaggttctcacagatgcaggcgttaaggttgttgattcaaacgtaatcaacaaagaaacaggaaaagcatatttcgatgcaaacgctatctttgagaaagacggaatcaaggtcggagtattcggacttgatacagcagaaactctcacaaaagcaagcccaagcaatgtaaagcttgtaaacttccttgataaagaagatatgttcaaagcagctcaggctcaggtagacgagcttaaagcagccggctgcgactatatcatcgctcttactcatctcggtgttgacgaagaaagtgttggcagacgttctgttgatgttgcatcagcagttaaaggcatcgaccttatcgttgacggacacagccacacagtaatggacggcggagaaaaggttaatgacacacttatcgtaagcacaggctcataccttgctaacgtaggtacagttgttgttgacgaagcttctaaagaaacaacagctaaacttatttctgctgctgattatgcagcaacaatcggcaaatatgacgatgcggttgctaaacttgtagcagaagacagagccgaagttacagcagcttactcaaaagtatttgcaaagacagaggttcatcttgaaggaacaaaagcaattgttcgttcggaagaaacaaaccttggtgatttcacagcagatgcttacctctacacaggtaaaaaatatgttgaagacaacaaacttggtataagcgtagactgtgctatatcaaacggcggcggtatccgtacttcagttgaacccggagatatttcaatggatactcttgtaacaatattccccttcggaaacaatgtatgtcttgttacaatcacaggtgctcagctccttgaaattcttgaagcatcaacattctgcacacccgaaacaatcggaggattccctcaggtagcaggtatcgaatatactcttgatacaacagttccttacgaaaacggagctcagtatcccaattcaacatactatgcacctgctaaacccggcagcagagtaacaattacatcagtaaacggacagcctttcgatgcagctaagaactacacagtagtagtaaacggcttccaggcagaaggcggagatacatattaccagcttacacagggatcatatttcgctgatacaaacgtacttgactgcgattcacttatcgaatatgttcagtcactcaacggcgttatcggacaggaatatgctaaacctcagggacgtatt

SEQ ID NO: 1766 - DNA, 1671 bp, Unknown
  Unknown gut bacteria
ttggcttcaaagaaaccaaagttaaaagttatatctttgggcggattacaggaaatcggaaaaaatatgaccgttttcgaatacgataacgatataataattgtggactgcggtcttgcttttccggaggacgatatgctcggtatagatttggttatacccgatatttcgtaccttgttaaaaatatggacagaataagaggtattgtgcttacgcatggacatgaggaccatataggtgcattaccgtatgtgcttaaggagataaatgtgccggttttcggtacattgcttacgctcggacttcttgagaataagcttaaggagcatggcataaacaagcttgttactctccatacggttgttcccggggaaatggttaagctcggacagttcaaggttgagtttatccatacaaaccattctattgccgatgcggtagcactggctataacaacaccggtaggcgttgttgtccatacgggagatttcaaggtggattatacacctatcgacggcggagttatggatctccacagatttgcggagcttggcaaggcaggagtgcttcttcttctgagcgacagcacaaatgccgaaagaaaaggctttacaatgtccgaaagctcggttggcggtgtttttgacgatatattcagcgaaacgcctaaaaaccgaataatggttgcgaccttctcatcaaacatacaccgtatacagcagatcgtaaattcggcatacaaatacggacgtaaggttgcgataatcggcagaagtatggtcaatgcggttaagacatctatcgagcttgactatctgaatatgcctgataatacactcatagatataagcgaaataaaaaattataccgatgataagctggttataataacaacaggcagtcagggcgaaactatgtcggctctttcgagaattgcatcaaacgagcacaaacaggtttccataagacctggcgataaaataataatcagtgcttcatctatacccggaaatgaaaaaaatatttcaaacgtaataaacgagcttatgcgtaaaggtgcggatgttgtatacgatggcattgccgatatacacgtttccggacacgcaagacaggaggagcttaagcttatgctctctcttgtaaagcctaaatatttcatgcccgtacatggcgaatatgttcatctgttaagccacagggatttggctttgtcactcggtattcccaaagaaaatatatttgtaatgaatatcggtgaggttttggaaatatccaaaaaagatgcaaaggtgaacggaacagttccttcgggacaggtgcttgttgatggccttggcgtaggcgatgtcggaaatattgtgcttcgtgacagaagaaacctttcggaaaacggcttgatgatagttgttgttgccattgattctgcgtccggctgtattgtttccggaccggatattatttcaagaggctttgtttacgtaagggaatcagaagaccttatggatgaggcaaagagcgttattaacgatgcacttatgaaatgcgaggctaaccatatttccggctggtcaaatataaagaatacaataaaagatacgcttaaaaatttcctttggcagaagatgaagagaagtcctatgatactgccgataattatggaagtataa

SEQ ID NO: 1767 - DNA, 2238 bp, Unknown
  Unknown gut bacteria
atgtaccgtataattaatgaagaacacagaaaccctcattctgtgctcggaatgcatgaggtgcttaacggcggcaaggaaatgctttcggtaagagtgtttgctccgggtgcaaaggctgtaacggttatagaaaagaagggcagaaaaaaggagtttgaggctcagctgatacatgacgacggcttttttgaggcggtaatcacaagccgaaaaaaatggttcccttatacattaagaatagaatacaacgatggtaatatttacgaaacagcggataaatattccttccgtccaaccgtaagtgagtacgacagatatttatacggtgccggaacgcattacgaaatatataaaaagctcggtgctcacctgtgcaatgttgacggtacggacggcgtttcctttgctgtatgggcacccaatgcaaaaagcataagcatagtcggttcgttcaattactgggacggaagaacggcacagatgcgtatgctcggcaattcgggaatatgggagctttttgttcccgaagcggcagagttcgataagtataaattcagaataaaggacagaaacggaaaaacagttgataaaagcgatcccttcggattttattccgaaataagaccgatgaaggcatctatcgtttatgatttgggcgtttaccactggaaggacagcgaatggctcgaaaaaagagaaaaaagcgacgtatatcgtgagccgctcaatatatatgaagtaaatctcggaagctggatgagagttccggaggaaaacaacagatttcttacctataaagaacttgcggataagcttgttaaatatgtcaagaaaatgggctatacacatatcgagcttatgccggttacggaatatccctttgacggaagctggggctatcaggttaccggatattatgcaccgacaagccgctttggtgagcccgacgattttaaatatttcatagactgctgtcacagaaacggaatgggcgtaataatggactgggttccggcacattttccgaaggacgaaaacggccttgcacgctttgacggaacggcactttatgagcatgaggactggcggaagggtgagcacaaggaatggggaacctatgtattcaattattcaagaaatgaggtttctaattttcttattgcaaatgcgttgttctggataaaggaatatcatctggacggcatgcgtgtagatgcggtttccagtatgctttatctggattattgccgaagggacggagaatgggttccaaatgaatacggcggaagagaaaaccttgaggctatcgaatttttaaagcaccttaattctgtaatatcgggactgaacaaaggaataatgatgattgccgaagaggcaactgcatgggaaggcataacaaaaggcttggacagaggcggccttggctttaccttcaaatggaatatgggctggatgcacgatattcttgaatatgcaaagacagatccgttgtacagaaaatatgtacacaattacattaccttcggaataacctatgctttttcggaaaactttgtgcttgtgctttcgcatgatgaggttgtgcatctcaaaaattcaatgataaacaaaatgccgggagataaatggcagaagtttgccggattaaggggcttatacggatttatgtatacctatccgggcaaaaagctactgtttatgggcaacgatattgcacagtattccgaatggagcgaagaaagaagcatagactggcatttgctcaatgaggacgaaaacatgggaataaatctgtatctgagagatttgttcagactttatttgaaagagccggcactctgggaaaaggacacatatccggaatgctttgaatggataaactgtgatgatatggacaacagcattgtttcctatataagatatggtaataaggaagaggagcttgttgttaccgttgttaattttacgccgaatacggtaatgggatatacaatgggcgttccttacgaaggatactataaagaaattctcaacagcgatgacgaaaaatacggcggcagcggcattacaaatccaaaagcggtaaaaagcagaggcattccgcaggacagatgtgccaacagcattacaataaatcttccgcctctcggagcggcaatgtttgtgctgacgcagaacagtaaaaataaattggcaaataagttaacagagtgtaaaaatgatgttgactaa

SEQ ID NO: 1768 - DNA, 2232 bp, Unknown
  Unknown gut bacteria
atggataacgaaaaagatgaaaagtttttaaatgacattggttcaaatgatgatgaaagtgctgttgaagccgaaaattcttcatcaaatgatgaatcaacggaagaaaacaaagctgaaaattttgaggaaactcccgaagaagcttcgtcaactgaaactgaggaaactcccgaagaagcttcgtcaactgaaactgaagaaaaagctgaagatacttcggctgcggaagcggatgtggataaaacagaaataacggaaacggaagacaaagaaaatacatctgagaaaaaatcttttgtcggcagatggatagaaaaagaaaaggaaaaagaaaaaaataaacgagaacgagaaaaattaagcgaagaaagaatgaagcgtgtgcgtgaagaacgcagggcggcaatgtatgctgacggaaaagagcctaacgcacttcagaagttccttatgtccgaaggaaagttcattaactatgaaaataaagcaatggtaacatttgccgctgttataatattgggaatccttgtatttatagctgtattcagaggcggatatttctcaaaagaaaaattcggactcggcggagataagagcagagctattgtatattcggtaggaaacgagctttattgctacgacctcaagaaagagcctgtgcttatttcagatacgctttctgccggcggctctgtatcttacagctatgtaggaaacggaattactgttgcgaatgacggaacaagcgtatattttactgatgaagtcggtgctgacggaacattcagattaaattattatgaggcttcaagcagtaaagaaccggaagtaatcggtacatcggtaagcgattatgaagtaagcaacatgggtgacggtgctgtatatattgttgccaatgaaacaggaaacagcggtactctttacggatatgacaaaaagaacaataaatcaagcgaaatagcaaacgatattgcggtaaacagcagagaatatgcaatatcatcagacggaaaaaaggttatatatattaaagaagaaaattcttcaacaacactttatgttgctaatattgacggaacaggcgaaacaaaaattgacggagatattgcacagtatcttgtacagacagaaggaaacagtgtttactatattaaggctgtcggaactgataacggaacaagtatgtacagtgtatatgagtacgacctttcaaacggaaacagcaagcttatagatgaagatgttatcgcagtaacactttcgcagaacgaaaatgctgttatatattacaaaaacagcggtaaaaaagtaaaagcatcaagtgtactcaatgatgacggtgataactctgagaaaacagaagcactcagaaaagaactcgaaaactatgaatttaatgatattacatgtgcattataccgctatgaaaacggtaaatccgaacttgtaaacgatgaaatatttacagcaatgcctaccgatgcggacggaaaatatattgcatatacagttccttcgggacttggaaaaatcaaagtaaatctttctgatatatcatctcccgatgatttagtggcttcatattatgaacaggctgctgcggctgatgttgatacatatatatataagacaaatggcttcaatgattatgttgtgtttgacggctcatatatatattcatatcagaactccggaaacaatgcacaggttgcctgccttaaggattatgacagaacaaatcagaagggacagcttgtactttcaacatatgacgaaaacggaattaaatcctatgcagagcttgaagatgatgttgaatcctttgagtttatgggtgacggttcaagaattgtatacctcagaggtgtagatgacaacggcttcggaacacttacttatatcgaaagcaatgttcctgatgaagtaagtacttccgcatactattatgaggtaacaaaggactttaacagaagcttattctatcttgataattatgattcttcaacatatggcggaacattccattattatcagcagggtaaggacaccgttgttgatgacggagtgtatatgtttgcttacagaaataacaacaatgcactttatatgaagaattatgactcacttactgcaacaggtgatctttactatttgaacggaaaaacatctaaacttgttgcagaaggtgtttcaagcgtatttgatttttatgataccggcaggtga

SEQ ID NO: 1769 - DNA, 2046 bp, Unknown
  Unknown gut bacteria
atgataggatatgacgaactaaatccgatgcagcagaaggctgtcaaacaaaaggacggtgctgtgcttatacttgcaggagcaggatctggcaaaacaggcgcacttacggtaagaatagcggatatgcttgagcatggaataagcccttataatatacttgcaataaccttcacaaacaaagcggcaaaggaaatgcgtgagcgtgttgataagcttgcaggcccttcggctgagcatgtgtggataagcacattccattcaacctgtgtacagatattgagaagagagatagaaaagcttgattattcaagagatttttcgatatatgatgccgatgaccaggaaaaggttatgaaggaagtatttaaggagcttaatctttcaataaccgataagacctatacggtcagaggtgcggtttctgcaataagccatcttaaggaagaaatgatttcatgggaggactatgcaaaagaagttgataaggcagatatgagagcctataaaacctcaagagtttatgagctttatcagaaaaggctgagaagaaacaatgcactggattttgatgatctgatatataaaacagttctgcttttcagaacaaatcccgatgtgcttaacgtataccaggagcgttttaaatacataatggttgacgagtatcaggacacgaatacatcgcagtatgagcttgtaaggcttcttgccggaaaatacggaaatctttgtgttgtcggcgatgatgaccagagcatatacggctggagaggtgcaaatatacgaaacatacttgattttgaaaaggattttcccaatgcggttgttataaaactcgaacagaattatcgttcaaccaaaaacatacttacagccgccaatgaggttataaagcacaatagtgcaagaaaggacaaaaccctttggacggaaaacgataccggaagtataatacatgttttcagagcggataatgatattgaagaggcagtttttgttacggagattataaacaaaaatgcacttaagggcaaaaaatataaggattttgccgttctgtacagaaccaatgcacagtccagagccattgaggacagatttgtgagaaagggaataccatacagacttttcggcggagtaaggttctatgaaagaaaagaaataaaggatattcttgcatatcttaagctgattgataactcggcggacgccgttgcaattaagcgaataataaatgttcccaaaagaggaataggcgacaagacggttgaaacagcggaaaatgcggcttcaaagaacggaactacactttttgaagcactcggctgtgctgcggaatatcccgaattgaaaagcagaggcaaaaagcttggtgagttttatgagcttatctgttcattcaagcagaaggcagaggagctttctgtacatgagcttattgaatatgttgtaaatgcaacaggctatcgtgatgagcttgaacaggacggctcagatgatgcaatgatgcgtattgaaaacatagaggagtttgcatcaaaagcggccgagtttgaaaaggaaaacgaaaatgccacattgtctgcatttcttgaagatgttgcacttgttgcagatattgattcatacagcgaagatgatgacgctgtcgttcttatgacattgcacagtgcaaagggacttgagttcccttatgtgtttatgataggcatggaggaaggactttttcccagcggaagggcaataaacacaggagattctaaggagcttgaggaagaaagacgactttgctatgtcggcataacaagagcaaagaaagagcttttccttacctatgcaagacagagaatgcagcatggacagtttgtttataatgcaccgtcaagatttctcggagaactgccgccggagcttttggataatcctttcaaaaaggttcagacaagagaaataccgagccatgagccgccgaaggcatcgccttataacttcggtgcaagatttgccgcaagcagggcaggagttgccgcaggaaatatgtcg

SEQ ID NO: 1770 - DNA, 2688 bp, Unknown
  Unknown gut bacteria
atgcaggaacagataaaagagttcaagaaggtgcttgttgccaaccgtggtgaaatagcaatccgtgttttcagagcccttaatgagcttggcatacagtctgtatgtgtattttctaaggaggacaaatattctgctttcagaaccaaagcagacgagagctataagctcaatccaaacaaaggtcctattgatgcgtatcttgacattaacgaaattattaaaattgcgaaggaaagaaatgtagacgctattcatcccggttacggacttctttccgaaaatcccgaatttgtagaagcctgtgagaaaaacggaattactttcatcggtcccacagttgcaactatgaatgcgatgggcgacaaaatctcctctaaacagattgccattaagtgcggagtgcctattattccgggtgttgaccatgcacttaaatctctcgaagaggtaacggaaattgccgaaaaaatcggctaccctgttatgcttaaggcatcaaacggcggcggcggacgtggtatgcgtatcgtaaactgtgccgaagatatgccgagagaatttgaagaagccaaaaacgaggcaaagaaagccttcggcgatgacaaaatcttcattgaaaaatatcttaagagtccaaagcatatcgaagttcaggttatgggcgataaatacggcaacgtaattcatcttttcgaccgtgactgttctgttcagagaagacatcagaaggtagttgagtttgcacctgcggattcaatcagctatgaaacaagaagaagaattttctctgatgcggttaagctttcaaaatatgttggttacagcaatgccggaacacttgaattccttgttgatgccaacgaaaattattactttatcgaaatgaatccccgtattcaggtagagcataccgttacggaaatgataacaggtgttgaccttgttacaacacagatacttgttgccgaaggttacagccttttctcggaaaaagtcggcattaagtcacaggaggatattcgttgcaacggtcatgcaattcagcttcgagttacaacagaagaccctgcaaacaacttccttcccgatacaggaaagattacggtttaccgttcacctgccggaaacggtatcagacttgacggtggtaacatatttgccggagcagaggttacaccttattacgacagccttcttgttaagatcattgcatatgaccgtacatttgaaggaacagtacgtaagtgcgtaagagcacttaaggaaacacgaataagaggtgttaagaccaatattcctttccttatcaatgttgtacagagcgaggttttcagaagcggaaaatgtacaacaacattcatcgaagaaacacctgagctttttgacatcactctttctaaggacagagcgtcaaaaatcgcagaatttgtcggaaataaaattgtaaatgaatcaaagggtgataaaccggatttcggtcccattgatccgcctaaatatgacggaagtattcccgtttacggtgcaagagatgaattccttaagcttggtgcaaaggatttcacacagaagatacttaacgacaaaaaactttatgttacggatacaacaatgcgtgatgcacatcagtcacttgttgctacacgtttccgtacaaaagatcttgttactgccgcacctgcaacgaacgttgcaatgagaaacgcattctcagttgaagcatggggcggtgcgacattcgacgttgcatatcgtttccttaaggaatcaccttgggtaagacttgaaaaactcagagcggcaatgcccaatacacttatccagatgcttcttcgtgcgtcaaatgcggtaggctaccagaactatcccgataatgtcgtaagtgaatttatcaaggtttctgccgaaagaggcgtcgatgtattcagaattttcgattcactcaactggattgaaaacatgaagatgcctattgaggttgctctttcaacaggaaaaatcgtcgaaggtacaatctgctacacaggtgatattttaaatcccgatgaaaagaaatatactatcgactattatcttaaaaaagcacacgaaatcgaagatctcggatgccacatattcgctatcaaggatatggccggactccttaaaccttatgcggctaaaaagcttttcacagagcttaagaaagaacttaagattcctgttcaccttcatacacatgacacaacaggaaatggcgtttcaacagtacttatggcagcagaagccggagttgatatagttgaccttgcaatcgaatcaatgtcaacaatcacaagccagccttcaatgaattctgttgtttatgcccttaagggaacagaaagagatacagagcttgttcccgacgagcttaacgaattaagccgttactatgaggacgtaagaaagatgtacagcggttttgagagcaatatgagaactccaaataccgaaatatataaatacgaaattcccggcggccagtattcaaaccttcgtttccaggttaaggaaatgggctctgccgatgaatttgaacatatcaaagagctctataaacagtcaaacgagcttttcggaaatatcgtaaaggttacaccttcatcaaaggtaatcggtgactttgctatattcatgcagaagaacggccttacaaaggataat

SEQ ID NO: 1771 - DNA, 1737 bp, Unknown
  Unknown gut bacteria
cataacagggcattgaatataaagaaagaggcagtgggagaaaaaagtctgcattatacggcaacacttttggctttgtccgaggtttatgaaaatataggcaaatatgacagagctattgagatacaggataaggttcttgagcttaagagagatatgtttggtgaagtgaatgagcagataccggaaattcttattaatctcggaagaattaatatggaaaagggcgaactgcttaaggcacagggctttataatgcagggtttgattatgagcaaggagcttatgcttataactcctggcaaaataagaagctatacggaaaacgtcagaataatggctgaggcctgctgtaagaaaaaagatgttgataaaacgatacagttctgcaacagatatttggagctcagaaaatcaaaatacggtgacgagcaccctaaatatgcaagagcactgcatttttgtgccgagctttatgaacagctcggcgaaaacgagaaggcctccgaatgtcttgacactgcctgcgacattgctgaaatgatgatgggaaacgatacggttttctgccgtcagtgctattatcacagcggtgcattgttgtataaggttaaaaaatacaatgaggcggcagaaagactgagaaaggccgcatcaatgtataaaagatataacggcagtgaagaggatttaataaaaataatgtatcttcaggcaaaaacgcagtatatgctcggatttccgagaaaggcagacgaatgtgccttcagagccgaaggggcggcatcaagagcaggctgtaataccgatttcataataaatgagcagattgcttatgcagagcttatgctgaacggcggagattatgacaaggctgcggaaaaactttcggctgttgaacagaaggtaaaggaaaacggcgaaaatgccgttatttatgaggttatgagcatatatgcggaggcatgctataacgctcagaagtatgaagatgcggcattaaaggctgaaaatgcacttgagtatgccaaaacaggcattgaaaaagcggatatgctgctgcttatggcagaggcacagcttaagcttgaaaaatatgacaaatcggtggaattgcttgagaaaatcaagagcctgattgaggcagacagcaatgtgttggagaaatataaaagcattgtatattgtatgctcggtgaggtatatggcaatcttaacgaaacggagaaagccgacaagcattttgatgaaggcataaaagaggcgaaaagcagagaaaatattgatgtcgagaattactgtatgtttctggatatggcggcgtctgtggcagaaaaaatcggcaaatactcaaaggctgttgaatatataagcgaaaatgcacttatgataagaaaaagcgaaggcgagtcgataagatttgccgaatatatactcaattccgcaagactgtactgcattcagaacagatatgaggagtccatattgctttatgaaaaggctttggaaatatactcaaaggtttacggagaaaaatccgataagtacataaatgcttttactgatatgtgcaaggcacttgcagcactcggaaaaaacggcgaagtgattgagaaaatcgaaaagctcgactcatacggaaaccataaaaaagaattaaccggtatgcttgcagaggcttataaaaacacaaaggcatataaaaaactggttatgctgaaatttaaagaaaagtaa

SEQ ID NO: 1772 - DNA, 1938 bp, Unknown
  Unknown gut bacteria
atggacggtattgtctgcatgatagacaacaaaaaagccggaaaagaaacagatgtcgaggagcttatggaatacatcaaaggtcccgactttcctaccggtgcaacaattctcggaaaaagcggcataagagcaatgtacagaacaggacgaggcaagcttatagtccgttctcttacggaaattgagcctatgcacggcggcagagaaagaatagttgttacggaaattccgtatatggtgaataagctccgtcttatagaaaagattgcagagcttgttaaggataaaaaaatcgaaggaataagcgatctttatgacgcttcctccggtgatgacataaaaataattattgagcttaaaaaagacgttaatgccaatgttattttaaaccagctttataaatttacatctctccaggaaagctacggtgcaattatgattgcacttgtggacggaaagccaaaaacacttaacctcaaggaaatacttgaggaatatttaaagcatcaggaagaggttgtaacaagaagaacaaaatttgaccttgataaagcggaaaagagagcccatatactcgaaggcttaagaattgccattgataatatcgacgaggtaatccagattatcagaacaagctatgacaacgcaaaagaaagattgatggaaagattcggtctttcagatgttcaggctcaggctattcttgatatgcagcttaaaagactccagggactcgaacatgaaaagattgatgaggaatacagacagcttatggcactcattaaatcactcaaggaaatacttgccgatgaaaataagctttttgatgtaataaagagcgaaatcatcgaaatcaaaaataaattcaatgatgaaagaagaacccagattatccagaatcccggtgaaattgatatagaggatcttattgaggaagaggcaagcgttattgcaatgacaagccttaactatatcaagagaacacctcttgcaacctacaagagccagaacagaggcggaagaggaataatcggaatgcagacaagggaagaggacgcagtaacaagattgtttgtatgctcaacccatgattatctgttgttctttacaagctttggccgagtatataagattaaaggatatgaggttccggaggcaggaagaacagcaagaggtcttgcaatagtcaaccttctcaacatatcacagggtgagaagataaccgctgttgttcccgtcagggaatttaacgacgacagatacctcgttatgataacaaagagcggcgtaataaagaaaacaagcatggaaagcttctcgaatataagaaaagcaggccttacggcagtaaatctccgtgaaggcgatgagcttatttcggcattcgttaccgacggaaaggacgatattatcgtggcaacaagaaacggtatgggaatacgtttcaatgaagaagatgtccgtcctatgggaagaacggcaacaggtgtaagagcaattcttctcagtgatgatgattacgttgtttctgccgacattgttagagaaggagataagcttctcaacgtaaccgaaaaaggttacggaaaacgtaccgacgaggctaacttctctgttcagcacagaggcggtaagggtgtaaaaatacatcagattaccgataagacaggaaagctttcgggagtaataaaggtcggagataacgaggagcttatgattgttacatctgaaggtgtaataataagactcagaggaaaagaaatttcaaccttcggaagaatttcacagggcgttaagctgattaatctcggtgcaggaataactgttgccggtgttgcaaaaatatcggaggacgatattatggagcaggaagaggccgaaacggaaaatgtgataggtgaattttctattcccgaagaaaatacggacgaaacc

SEQ ID NO: 1773 - DNA, 2430 bp, Unknown
  Unknown gut bacteria
atgtcaattacaataaaaccggagctgcttgcgccctgcggttcgcctgaagcactaagggcagctgttataaacggtgcagatgcggtatatctcggaggaaaaaagttcagtgcaagaaaatatgccggaaatttttccgttgaagaacttagcgaggcttgtgattactgtcatataagaggtgttaaggtatatgttaccgtaaacacactttataaggattcggagcttacggaatttataaaattcgtaaaggagctttatatgatcggcgttgacgcacttatcgtacaggacgccggtgcagccaatcttataaaacgctcatttccggatatgaaaataaacgcaagcacacagcttaccgccaatactgccgaggacgttctgtttttgcagaaaaatggctttgataaggtaatattgagcagagagcttacacttgaagaaattaagaacataagaaaaagcactgatgtggatatagagtgctttgttcatggtgcattatgtgtgtcattttccggccagtgcataatgagcagtattctcggcggaagaagcggaaaccgaggctgttgtgcacagccttgccgtctgccttatgagctgtatgaaaatagggataaggtatgcgacggctatcttatgagcccaaaagatgttgaaacgcttgagatacttccccagcttattgaggcaggaataaattcgttcaaaatagaaggacgtatgaaaaatccggaatatgttgccggagttacatctatatatcgtaagtatatagacctttattttgatgatccggaaaattataaagtagacagaaatgatataaaaatactcacacagcttttcaacagaggcggctttaccaacggatatttcacatcgccttccggcagtgaaatgatgagcattgaacgtcccaaagcatggggacttaaaaccggaattgttgacagctatgacgaaaagcatggcagagccaacataagaacgagagaaccgcttgttcccggtgacggcatagaaatatggacgcagacagagccgcacataggctgtggcatatccagaccgtccaaggccggagaggtaataagcattcccataaagggaaacatatcgaaaaatgactttgtgtataaaacctttgataaggcactcatggattccatgaaaaagacctatgaaaaggacacacgaaaaactaaaatattcggaaagcttaaggctgaagaaggcgaaccgcttgtgcttaagctctggcttgaaaagggtacaagcatttccgttgaaggcaatattgttcagaaggcggaaaacagaccgacaacagaggcagacctcagaaaacagataagtaaaatgggttcgacacccttcgagcttgctaagctggatattatctgcggtgacggcatatatgttgatataaagagccttaatgagctcagaagaaacgcctgtgaggcactcgaaagctctatatgcaaaaaatataaacactccgagccggaatttgttgcacttccggaggtcagtgtaagcggtaacatgaaaaacaaggctttaaatgtccgcgtaagaacaatggaccagttcaacgcagttgtcggcattgacggaatagagagaatttatttcgatatgggtgaggacttaagcgaaaatcttgaaagagccataaaatccgcacatgaaagagaaattaagctttttgcggcattcccgagaatatacagggaaaatacagccgatatttattccgagcttatcgcaaagcttaaaaacagccttattgacggtttccttgttacatcggtcggactttttgatatggtcaaaggctggggatttgatgcggcaatagattacaacatgaatgttttcaataatgaggctgtggaatattacagacataagggtgcggacagcattacaatgtctgtggaaatgaatgtaaaagagcttcagacagccgcagacgaaagctgtgaaatggttgtctacggttatcttccgcttatgacaacggttcagtgtcccataggaaattatgtcggcggaaagaaaaacggacgctactgcaaggagcgttacaccgacagcgactatgttcttaaggacagaaaaaatgtggcattcccgttgcttacggattgtgagcagtgtgtatgccagatacttaacagcaaacctttgtttacacttaaattttatgatgaaatccttgatacaccgacaggaagcgtaagacttgattttacaagggaaacgccgtccgaagccgccgacataacaagggcatatgcggtaatgacaagaaataacggacgagcagattcttctgtaaaatcgttcatggctaaaatggataaaaaatcggtgactaagggacatttcttcagaggagttgagtaa

SEQ ID NO: 1774 - DNA, 2625 bp, Unknown
  Unknown gut bacteria
aagggctcgctcaatacatatcttaatgcactgacatacagcgataaaacggtttatccaatagccagcagaaacgaaaaggatttccagaaccttatggacgtataccttgatgcggtgttcaatcctatgatgcttaagcataaggaaatatttatgcaggaaggacatcatcttcatcttgaaaacaaacaggacagcctttgcgagaagggcgttgtttataatgaaatgaagggagcttattccgatccggacagatatatcgaaggtgcggtaaatacgtcacttttcacagaatcgccttataaattcgaaagcggcggagatccggataaaattcccgagcttacatatgaaaaattcatagaattttataaaaaccattatcatccgtcaaacagctatatttatcttttcggaaaaatggatatagaagaacgaatggaatatattgaccgtgaatatctttctgcatttgataaaatttcggttgatacggaaattaagcctcaacagcccatagaaaaagcggttaaaaaggacgaagaatatcccgtaatacagaaggacggaagtaataaagaggctatgtatgcggctgcatggatgacaggaaaatcctatgatgcggaaacaacaatgggtttaagcatactttcatatatacttcttgatacaaatgcctctccggttaaaaaagcacttaccgaaaacggcttctgctccaatgcggaaagctggtacgattcatcaatgcttgatacggtgtttatgatttcggcaaagggtgcaaaggaaaattcagccgatgagtttgaaaaaataattacagattcattgaacggaattttagccaaaggtcttgataaggagcttgtggagtctgcggtaaatgcttttgattttatgttcagtgaggaaaactacggctataaaccgagagggcttgcttacggacttaaggcaatggatatatggcttcacaaggataatccttttgaaagcttccgtttcaaaaaacagatttcttccataagagaaaaggcagaaaacggatattttgaagagcttatcagaaaatatcttgttgataacaatgcaaaggtgtttgtttcacttcagccgaaggaaggtatgcaggcagaggcagaccttaaggaaaagcagaagtttgatgctattaaatcagcaatgagcgaaacagagcttgaaaacattgtgaatgaaacaaaggcacttttgagcttccagtcacaggaggacgatctttcggttatgccttcgcttaagcttagcgacatttccaaaaaggcggatataataaagaaaacggttaatgacaatattatttttgttcctcaggtatcaaacgatatagtctatacggaaatgctttttgatgttaattcaatgccgaaggaaagctatggctggctcggacttctttcggagcttttcggcaagcttgataccgaaaaatacagctttacacagcttccgacaaaaatatatatgtataccggcggaataagtgcatcatgtaattcatatgtagcaatggatggaacagttaaaagggtttttgccgtaagcggaaaggcgttgtcaagaaacataggaatgcttgcggagcttatagatcagtcggctaatcatatggattttgaaaagaaggaaaatatacatataataattaacgatataatttcaaagcttgagaactatcttgcacagagcggacatatgacttccgctttcagagcattaagctattataacgaatcctttaaattcaaggacgaaacaggcggaataggcttttttaaattcctctgcgagcttgaaaagagctttgatgaaaatattgatacaattatatataaccttaaggctgtcgcaaaagcggtattcagctttgacagattaactatggcaataagctgtgacgatgttaattttgaaatggcagaaaagagccttacagaaatattcggttcttccgatgaaaattgcattatcaaaaacggaacaatatcggaaacggtaaaatcggagggtattataactcccggaaagatacagtatgttgcaaaggctgttgattttggcaaaaacggctttaaatacaacggaaagcttcttgtgctcaagaatataatcgaccttgaatatctctggaatgttgtaagagtacagggcggtgcatatggctgtggctgcaatttccttaagagcggaaatatgtatatgtattcttacagagatccgaatttaaagagaactcttgatgtatatgacaaatccgctgaatttataagcggcttcaatgcagatgaaaaggcaatgacaaactatataatcggagcaataaacagccttgacagacctctcagcagagagcagaaaataaaacaggcgatagtaagacatatagccggaataaccgacggggctgtgcagaaagaaagagaagaagttctttcttcgacaatagaagatatgcacggttttgcacctctgcttgcgtcaatcaaggacagcggatatatatgcgttatgggaaatggagaaaatataaacagcagctcagagctttttgagaagataattaatttgaaataa

SEQ ID NO: 1775 - DNA, 2682 bp, Unknown
  Unknown gut bacteria
atgcttgcaaatacggcatatgcggctaatgtacccaaagaggaaacgcctgattataaggtggctttttatgcatttgattgttttaatatgcaagacaaaaacggtatgcgttatggatacggatacgaaatgatgcagaatttgtcaaaatatatgcaatgtacattttcctatgtcggatacgacaagacagcaaacgaatgtgtagatatgctccgaaatggtgagcttgatatatatactgcggcaaaaagtacaccggaaagacaaagtgaatttgcaatttcaaagcacctgtcaattacggccacaacatgtatgaatgttaaagtcggaaatgacaaagttgtggaaggcgattattcaacatataacgggctgcgtatcggtctgcttgcaaaacatacatataatccgcagtttcttgaatgggctgactcaaagggctttacttatgaaataaaatactatgaaacacagaccgagctttctgaggctcttatagataatgagattgacgcacttgtcaacagctatatacgtacaccggaggatgaacgtatcattgagaacttcggacagacaccttattacattatggctcgaaaagaggatcaggctcttattgataaaatagatgatgcgatagacagaatgaatgtcgaaaatcctaactggagagttgatctttataatagatattacggaacacaaaacgccagtattgaatttactaatgatgaacaggcattgcttgataaactcattgccgacggtacagttattactgccgttatgaatcccgatagaaagccatattcgttttttgataacggaaccgcatcgggaattgatgctgaaatttttatcgcaacggctgaaaaactcggacttaaatatgaaataatgccggttgccagccgacaggagtatatggacattatcttaaatggcaaggccgacatatggattgattccgaatatgattacatagacgacaatcagtttaaatataaatttactgatccttatcttacaagctccgtatcggtactgcgcagcagaggtgcatcgggaaagattaaaaaaattgcagtggttgacaataatgttgatgtcaaagaaattttatcatcaaattggcctgatgtggaaatagtcagcgttacaagcacggaccggtgtatacagcagatagtttccggaaaggttgacggtgctttgcttcctacctatactgcacaaagacttgcacgcgatgatgttcagaacagactgagagttgacattgttccgggagtagagtttgatttatgtatgggcataaatgcaaatgttgattataatttttacggtatctggtcaaaaacgctttcattggtttctgctgatataagatctgaaattgttcagtcatatgttgaagaagcatcaacgactacacctattgaatatctgtttgaccatccgactgtattcattataattgttgcggttgtattgttgataatattcctgattgttttgtatttccagtcggtaaaaagcaaaaatatccagacggaaatttcaaaaaagcttgctgttgcgcttaatgatgcaaaagcggcgacagaggccaaaaatgaatttttttcgaaaatgagccatgacatacgaactcctcttaatgttgtgctcggaatgactcagattgcacagaaatataaaaatgatatgccgagattgtcagaggctctcgacagtataacatcggaaggtaattatcttttggtgcttattaattcgattcttgatgtaaaccagcttgagcatggacatatggaattggtaaatgctccgtttaatgttaccgaatgcgtaagacagagtacggatatacttaaaccactcgcggataaaaaagaacagaagcttaatgtaaaatacaactgcgataattttgttgttatcggagattccaaccgattcagccagataataattaatattgtttccaatgcaataaagtataccgaaggcggaggaacaataaacgtaagtcttgaatgttctccggatttgagatgtaaatttatctgcaaagataacggaataggtatgactgaggattttgtaagccatataacggaggattacgtaagagcggaggacagccgtgtttccaaaatacagggaaccggtcttggtatgtcggttgttaaaggctttaccgagcttatgaacgggacattatcaataaagagtaagctcggggaaggttcaacattcgttgttgaaattcctttcatgcaggcaacaaaagagcagatagaggatatattaaatcctgccgaaaacgaaactgatatttatgaaaaatttacgggcaaaaaggttcttctggcagaggataatgaacttaatgctgaaatcgcaacagagcttcttcagagtatcggcttgacggttgactgggcagaaaacggtgctattgcggtagatcgtttcaataattcaaagcttgatgagtattttgctatattcatggatatgcagatgccggttatggacggtgttgaggcaacaaagactatccgtaacagcaaccgacctgataacggaatacctatctttgcaatgacagctaatacatttgcttcggacagaaaacgctgtcgcgatgccggtatgaacgga

SEQ ID NO: 1776 - DNA, 2163 bp, Unknown
  Unknown gut bacteria
atgtactcaaacgcatcaaaaataacagctgttatagttgttcttctggcaagccttttggcttgtaccgggcttgtatatgtttctgatacacgttatgaatccggacttaattacagcagctattatgatacggaaaccttttatgcccagtacagtcagcttgtaagggacgttgttaatgtgaaccttgtttataaaaacgaggaaaatattaaatccggtgcggctttgaacgaagaaaaggtcatctataattttgcactttccaactcgctcggtgaatatacaatatattcgtctgttggtcagcctgtgaatgtaaaatttacggattataacgaccaggcgtattttgatgagaggtacgaaacctataaacagcaggccatacaggatcagctttatgaatatgacgattccgtaaaggagctggagagatacagtgatttctgttataatcttgtaagctcgaaggataatatatcaataggaaatctctcggtaaatgaaattgataatcttgaaatcaattcgttccttgacggaagatattctaaaggaaaaatggtatatgatactgaaaattattatacctacagtgacgaaggtgagcttataaattatttctattatgacaactatcttgattcggtttcaagaatacttcttaataacggatattcacttcatgtcggagtaaaaaccgatgatgatggaagcggagtattcaacaaacagtgtcaggcatacgacaagcgaagagagtttgcaccgaaggcagtcggcgtagcggttgcctgcgcggttataatggttgtcggaattgtgttccttgcatatgttgccgggcagacaggcaaaaacagccaggttacacttatggctattgataacatattcaacgatgttcatttaattatttttatcgcaatcgccggactttcgctgtttttggccgtacagcttatgacaagcacatactatatgcgtgagcaatgggtaaaccttgtaaaagggcttatgtgtctgttgtttgttgttgatacgattgtgcttacaagctttgtaacctgtatgtcaagacagattaagaaaaaacagcttttttcgaatacatttatagctgcaacggtaagatttatcgcatcgttcataaaatattcgaacataagaatgtggacaatattgtgccttattctgtttgccgttgcaaatgcaattctcggaggctttgcttatgcaagcgaaagctttgtgccggttgcgtttatggtcattttgaacataatagcggttatatttgtttcaagggctatgagatctataaagaaaataatgtttgccgttaaggaaacatcggaaggaaactttgactgtaagatagatatgaaaaacatatctccgtcaatggtgaactttgccgaggacgtttccaatatgcagagcggacttaagcaggcggtcggtcgtgcggttaagggcgaaaagatgaaaacagagcttataacaaatgtttcacatgaccttaaaactccgctgacttctattatcacatatgtagacctgctcaaaagagaagagcttgataacgaaagagcgcagaactatgtggcaatacttgatgaaaaatcaagaagacttaaacagcttatagaggaccttgttgaggcaagcaaggcgtcaagcggaaaccttgcggtttcaaaggctaaacttgattataaggagcttatggaacaggcactgggtgagtttgaggaaagaatagaagattcaggcgttgaatttaagtttaatgccgaggacggagtatatatatatgcagacggaagccatatgtggcgaatagcggaaaacttgataacaaatgcgattaagtatacaatgaagaatacaagagtatttattgatatttccaagaacgaaaaggaaggcatacttgttatcaaaaatgtttcgagcattcccattgacgaagtagacgtaaagagccttacggaaagattcgtaagaggcgacacatcaagaacgatggaaggctccggattaggtctttccattacaaagagccttacggaaatacagggcggaaagcttgatgtttcggttgacggagatgtgtttaaggttactgtcaaaatgccgttgtatacagaatga

SEQ ID NO: 1777 - DNA, 2721 bp, Unknown
  Unknown gut bacteria
atgaaaccggttaaattaaaaattaagggcataaacagctttaccgatgaacagattgttgactttgaaaagctgtccaaggaaggcttgttcggaatagtcggaaacacaggaagcggaaaaagctccattcttgatgccatgaccattgcactttacggagagctttccaaaaacacaaatgaatttatcaataaggaagcatcaacggcaagagttgtttttgagtttgttattgaggacagtgcaggcgaaagatattatacggtagagagatctttcaaaagaaccgataaagaagaaaagaaggctgtgcttgcaaggctgaccgaaggcaaagagaacataacggtcatcgcagagaaaacgagagaggtcgataaaaaaataaaagagcttatcggcttatcctatgaggatttcacaaggacggttgttctgccacagggcaaattcagtgaatttcttctccaaataaaaggaaaagaaagaagaatgatgcttgaaaaaatattcggacttgaaaaatacggcacacttctttgggataaaatacgtgatgaattttccaaggaatcggataagcttaattccataaaatccaaaatagaggtttacggtgagctgaacagcgaaatatacagtgaaaaggaaaaagaacttaacggaataaaaagcattttagaaaagacaaaaacggagtttgccgcagaaaaagaaaagcttgcggacgcagagaagatatttgagcttgcggaaaatataaaaaaatataattccgagcttgaaaagctggaaaaagagaaaaaacagcttgacgaatatgcggagaaaaataatatatctgccgacagtcttacggtaaacggtcttaataaaattttgaacgattttaaacaggctgaaaagctttcggaaaatataaaatccgaggaaagcaaaaagaaaaatgcgattataagcaaaaaacattctgaggaaaattataagacatcggtcgaaaataaaagtgctttacagcttaagttagatgagttaaaggaaaatgaaaaaagtatttccgaagggcttgaagagcttgaaaaaataaaaagtgatattgcaaaaaggctttttgaatcttctgacaggcttaattcagccaataatctgttaaatgccaagaaaaacgaatattccgaggcagacaaagcagtcaaaatgattgccggattgaacgcagaaataaatacaaagaaaaaagagcttgaaggaacaaataaaaatattgcaaagggaaacggaataatagaagaaaataataacaatattgataaaaccgagaaagatattgaaaatttaaaaaatgccaatattgcggcggtgctttcggcaaggctttcggaaaacgagccatgtccggtatgcggttcttatgtccatccaaatccggcaaaggagatagaaaccactgtgatttcagcatatgaaagcagactgaaaaagcttaaatcaaacggagaaaaatatataaaacgtttacgggaattgcaaggagaaaagggtaattcggaaggaattataaaaagcaaaacagaggaactttccaagtacagtacagttattgaaggaaaaaacattgatgtgttaaaagctgagtatgaaaccgaaaaggaaaaatattcggagcttataaatatcaataacagcctgaaaaaggaaaatgacgatgtaaccgaaaaatatgaaatgctttcaaagcagaaaaagacagcagaaagaaatacagaacagtatgaaaacaaaataaaagctttggacgaaagtatcaaaaactgtgagtccgatataaagatatgcgaaaacaaaattataagctgtgatgaaataatatcaaacaacaaaaacgaaataagaaagcttatgggcgaaagaaatattgataatataggtaatattatcaaagaaacggaatatgcactggaatttgtttcggattattcaagacgaaaaaatcttgcagaggataatattaaggattataaatcacagctcggagaaagatatataacgaaagaagagttggaaactgtaaaaaacaatgtatttgagcttgaaaacaagcagacagctttatccaacagctatgcggtcgtttccaaagagcttgtcagaatgaaagaaaatctttcggaggttgaaaagctgaatgccgagcttaaaaagagcagtcacagacatgatatgctcaatgagctttcaaagcttgtacagggcaacaaatttgttgagtatatggcggaaaaccagttgagatatattgccgccgacgcatctgaaagactgaaaaaaataagcggcggaagatatgccatagaaatacttgacggagaatttataatacgagatgatttctgcggaggcagaaaacgctatccaaatacgctttccggcggcgaagtgttccttacgtcctttgcattggcactttcgctctccaacagaatacaaatgagaagcaatgcaccgatgaggtttttcttcttggacgaaggcttcggaacacttgatcataatacacttgaaacggttatgaactctctgaatacattaatcggttctggaatgactgtcggtgtgataacccatgttgatgcggtaaaggagcagctgccggttaagcttgaggtaattccggcatctccgggagaacacggcagtatcgttaaaatgatttgttaa

SEQ ID NO: 1778 - DNA, 1659 bp, Unknown
  Unknown gut bacteria
atgccggaggatattaaaaaactgaatataggtcaattaaacagacttgcacttgagctgagaagctttgttttggaaaatgtatcgaaaacaggtggacatcttgcctcaaatctcggaatagtcgagcttacgctggctctgcactattgctttgatgcacctaaggataaaattgtatgggacgtaggccatcaggcatatatccataaaatacttacaggcagaaaagataaatttactacattaagacagcttgacggactttccggatttccgaagccttccgaaagcgaatacgatacgtttacggcaggacacagctcaacatcaatatcaatagcactcggttttgcctgtgcaagagatatgcgcggtagtgacgaaaaggttgtcgctgttatcggtgacggttcgctgacaggcggagttgcctttgaggcattgaacaatgccggaagatcaaacagcaatattattgttgtgcttaatgacaaccagatgtctatttccggaaatgtaggtgcattaagcagacatttgggtgagctgagaacggaacgaggctatatagaggctaagaatgacgttaaaaagcttcttaatagatttccggacagcgaaaaaatggtgaacaagataaaaagaaccaaaaacagaataaaatatctgtttattcccggagttatattcgaggagcttggttttaaatatatagggcctgttgacggcaataatatcgaaagcctcattgaggttataaacagggcgaaaaacattgaaggtcctgtgcttatccatgttaagacgaaaaaaggaaaaggctataaatatgccgaaaacaatccttccgcttatcacggtgtaagtgcttttgatctgtcaacgggagcatcaattaaaaaatcaaataagccgacatattccgatgtattcggaaaaacaatgtgttcaatggctgatgaggacgataagatagttgcggtttctgcggcaatgggcaacggaacgggtttaagcaaatttatttcaaagcacccatcaagattttatgatgtaggaatagcagaacagcatgcagtgtctttttctgcggcattggcaaaaagcggattccgacccgtgtttgctgtttattccacatttcttcagagagcctatgatgagataatgcaggacgtatgtctgcaaaatctacatgtggtttttgccgttgacagagccggaatagtcggtgcggacggggaaacacatcagggcatatatgatatatcttatttcacacatatgccgaatatgacggttatgatgcctaaaaacggtattgagcttgaaaaaatgctcagatatgcggtttacaacatagacgggcctgttgcggtaaggtatccgagaggtaatatatccgatatatattcggaaaatacgtcggaaatagaatttggaaaagccgaattgcttgaagacggagaaaaaattgccgttatttcagccggagcggtctgcgacaatgccgcaaaggtatgcgaaatgcttaagaatgacggatataatccaatgcttataaacatgagatttgcaaaaccggttgataaggaaatgcttaagcttgccgccgaaaaatgcggttatatatttacgcttgaggataatgttatc

SEQ ID NO: 1779 - DNA, 1683 bp, Unknown
  Unknown gut bacteria
atggggttaaaaaagaatttgcttatagttgataaaaacgatggtaacagaaaaatattaagagaaatgctctacaacacctataatattttagaagctgataatagcggtgacgctatcaatatgctggacaatgagacagaaaaaattgcctgtattatactcgatcttgttacaccggaagaaaatgattttaattttcttgaaaccgtatcggaaagcaaaagattttctaatattccggttcttgttgcaacacttgataatgaaagcgaaagtgaaaaaagatgttttgagctcggtgcatgggacgttatacataagccgtttaatcccgagatagttaaactcaggcttaaaaacataatcggcagaagtgaaataaatgcactggaaagaattaaatatgtcgctgagcacgatcagcttacgggtttgtataacagaaataaattttttgaatgtacaagaaagctgatagacgagcatgaggacacgctttttgcttttatacattgtgatatagacagattcagacttgttaattcatatttcggagaagaagaaggcgataagctcataaaatttatgggcagaaacgtaaaacaagctgaaaagagatttccgttttgcacatatggcagaatagaatcagatgtattttgcgttgttgttccttattttgaagatgttgtggaaaaagccatcaaagattttacggaggcattgattaattataatccttcgtactatatagaaccgtctttcggaatatatattatagatacaagaaatatttctgtggaaacaatgtattcacgttcggccatggcggcaaaaaaatgtaaggacaagtatatgacctatactgcattttatgataacggaatggcagaagagctttttaataaacaggagcttatcaacgatatgcaggaggctttggacaatgaacagttcgttgtttattttcagccgaaatacagccttaagaaaaaagcattttgcggagcagaggcacttgtcagatggaatcatccgagaaagggctttatatctccgggagaatttatcccgacatttgaacaaaacggatttattgcacagcttgattattatgtttgggaacatacatgtattctgttgagaaaatgtatagatctcggacttaatccggatcctgtttcggtaaatatatcaagagtaaatatgtataatacaagacttgttgaaataatatcattgcttacgaaaaaatataatcttcctaattctattcttaatcttgagcttaccgaaagtgcatatatggataatccggataccatgataaaaatagttatggcactccagaaaaaaggctttgttgttatgatggacgatttcggaagcggatattcttcgctcaatacgcttaaggatataccggttgattatcttaaagtagatatgaaatttcttccgacaggcaaaagcaacggaagaagcgagaaaatacttgtttcggttgtcaaaatggcaaaactgcttgacttgccggttatagttgaaggcgtggaaacggaagagcagaaggattttttggaaagcatttcatgtgaatatgttcaaggttattattttgcaagaccgatgcctccaatggattatgaagagatactgcgtgaaagcgtaatggcataa

SEQ ID NO: 1780 - DNA, 411 bp, Unknown
  Unknown gut bacteria
atcacatcagctcgtgaccaggatgactctacaacaaacaagaagatcatcatcacagttggtgcttcaacaatggcagtaggtacagaaacagttaaccttgacgctcctgcatacatcaacagcgaaaactacacaatgcttcctgtaagagcaatctcagaagcattcggtgcaacagttaactgggatgcagcatcaagaacagtaacagtactcagcggacagagaatcatttctatgacaatcggttcaagaacaatgtacatcaacggtacacctgttgctatgaacacaacagcagctatcgtaaacgacagaacatttatccctgtaagagatcttgctaactcacttggtatcagtgcaatcaactggacagaagcttctggcacagttactcttaactaa

SEQ ID NO: 1781 - DNA, 1167 bp, Unknown
  Unknown gut bacteria
atggatgttcagaagataaaagagcttgcggaaggctatcttgacgaacaggtcgaactgctcaagacatttgcggctatcgactgtgaatcaaaggatgtggaaggcaacagaaaaacggttgatgttgctgaaaaggttttaagaacaatcgacggaataaaaatcgaagaaatgttctttgaaggaaccggaacccatatcatagcaactatcaagccggaaaatcccgacggaaaaattgtgcttaactcacatcttgataccgtatttccgaaaggctttgcggaaaaatatcctccgtttattgatgatgaaaactggcttcacggactcggaacaggcgactgcaagggtggatttgcggtttccgctttcgccgtaaaaattgcatctgagcttggacttcttccgaataaggaaatagtcatgatatacagctgtgatgaagaaatcggttcaataacaagcagagaagtatttgaaaaagccgcaaaaggtgcggaatgtgcatatgtttttgaaagctcggtaagaacggacaagggcttgggcgttgtaaacgaaagacgaggagtaattctcggagcacttgacataaagggcgtagaggctcatgccggcggtgcatatcttgccggacacagtgcaacaaaggagcttgctcataaaatacttaagctttacagctttaatgattatgacagagaaatttattacaatgcggcacctgtttccggcggacgccccaacggagttgttgcaggagatgcaagaatggaattctgctgtgcaggtcttccgacgaatgattcatttgccgaagcagaggccaatatccgttcacttgccgaaagcaatgaagatcccggatgctcatcggaggttacatacagaactcttttcccggcacttgaaaagagcgatgcaggagataaggcctgcgaaatagcgtcagaagcaggaaagcttttaggacttacggttgaggctgttgcagagcctacggcaacagatgcaaactggttctgctattacggagttccggcgatagatgcactcggtcctgtacagttcggtatgcacacaacggaagaaaaggtttatatcccgtcaatcagcgaaatgacagagcttttcactgttatgctcgcaataatgaaataa

SEQ ID NO: 1782 - DNA, 1698 bp, Unknown
  Unknown gut bacteria
atggattttaaatatgaggctgcaaagcttatcgctaaagcggcggatatggaaatagatgaagttttgggaatgattgaagttcctgcaaataaagaaatgggtgattatgcttttccttgttttaagcttgcaaagaaattcagaaaagctcccaatttaattgccgctgatatttgtggtaagcttgaaggctctgacagctttacaaagattgaatgtgtagccgcatatattaacttctttacagataaaagcagttatgcaaaaacagtaatcgaaagcgttaataatgccggagctaaatatggcgaaagcagcgaaggtgaaggcaaaacaatagttatcgactattcatcacctaatattgcaaagcccttccatgtaggccatctccgttcaacagttatcggcagtgctttatataatatttttgaaaagcttggctataaatgcgttggcataaatcatctcggcgactggggaacacagttcggaaagcttatcgaggcgtataagctttggggcagtaaagaggcagtagaagaaaaaggtatcagtgagcttacaagaatatatgttaaattccacgaagaggctgaaaaagacgattcacttaatgacagagcaagagcatggttcgttaaaatgcaggacggtgacgaagaggcaatttctctttggaaatggttctatgatatttcgataaaggaatttgaaagagtatatgaaaagctcggagtaaaattcgattattatacaggcgaaagcttctataatgacaaaatggacgctgttgttgaagagcttaaggctaaaaatcttcttgttgagagcaacggagctatgattgttgatcttgaagatgcaaaaatgcctccatgccttatattaagaacagacggcggaacactttatgcaacaagagatataacagcggctttatatagaaagaaaacatatgatttcgataaatgtatatatgtaacagccattgatcagaatctccacttcgcacagtggttcaaggtaatcgaaaagatgggctatgattggtcaaaggatttggttcatgttccttttggtcttgtaagccttgaagacggcaagctttcaacaagaaaaggcaaggttgttttaatggaagaccttctcaatgaggctgttaagaaaacaacaggaattattgatgagaaaaatccggaccttcccaataaggaagaggttgcaaagcaggttggtatcggtgcagtaattttcgatgacctttataacggacgtattaaggatattgtgttctcatgggacagaatgttaaacttcgatggagaaacaggcccttatgttcagtatactcatgcaagagcatgcagtgttcttaagaaagccggatatgataaaaaagcagaaaacattgattattctgtacttacagacgatgcggcggcagatgtttgcaagacaatagctttatttaatgataaaattaaggaagccgcaaacagatatgagccttctgtaattgcacgttatcttgtcgatgttgcgcagtcgtttaataagttctatcatgataatattattcttgctgatgatgaaaatgtcaagaacgcaagacttgctcttgttgatgcagtaagaacagtaatcaaatcaggacttgcaattctcggaattgacgcacctgagcagatgtaa

SEQ ID NO: 1783 - DNA, 1773 bp, Unknown
  Unknown gut bacteria
atgtcccgtaaaaaattgcttattatagacggaaacagtatcgtaaaccgtgctttctacggtgttccgcttcttacggattcacagggaaggtatacaaacggcgtttacggatttatgaatatattttttaagcttatggacgatgaaaagcccgattatctcggtgttgcctttgatgttcacgcacctacattcagacatgaaatgtattccgattacaaaggaaacagaaaaggtatgcccgaagaattaagaggccagatgccgattcttaaagaggcacttgccgcaatgaatgtgtcatgctttgagcttgccggatatgaggcagacgatatactcggcacaatggcaaaaaaagcggaagaaaacggaataagtgcaaccgttgtttccggcgacagagatctgcttcagatatgtactgaaaatataaaggtaagaataccgaaaacagttaagggcaaaaccgaaatagaggattacggtccgaatgaggttgaaaataaatacggtgtaaatccaaaggcttttatcgaggtaaaggctcttatgggcgatgccggagataatgttcccggcgtgcccggaataggcgaaaagactgctgtaaaaataatacagcagtacggtgatgtggaaaattcgatagagcatgcggcagagataaagccgaaaaaggcgtctgaaaatcttacagcctttgcagaacaggcaagactcagccgaaagcttgtggaaattgaccttaatgtgcctattgaatgtaattttgacgatatggacgccttaagaccttattccgaagaggcttataatatatttaaacagcttggatttaaaagtatgcttggaagagttaagcttgaggcaaatatagaggacgaagaaaataaacagaagcatatgcttttgcttaaagacgccaacgacgttaaggaatttataacaaaacttgaaaacaagatgtctgcttatacgcttttgcatgaggataatgccgttgtcggaatggcgtttgcctgtgatgatgttactgcatgggcggaaacaggcgggcttatgtcatcggaggattttcttaatgccgtaaagtcttattttgagtccgaaagccttaagaaaataacaatagacagcaaatccgatatggcgtttttaagaaagaacggcattgaatataacggtttgtcatttgatgtgtccattgcggcatatttaataaatccgatgaaggatacttaccattttgatgatatatcaagtgagtttttcggagaagagataaaatccgaagaggaaatactgggaaaaggaaaatcaaagaaaagcctttgggcagtttctgaggaagaaagaagatatattgccgtaaagagtgcggaaacagcatttaaggctaaggacatactggaaaacaagcttgatgaaaacggacagcatagtttatattatgatatagaactgccgctcatcggcgtgctttcggatatggaatgggaaggtatacttgttgataaaaaagcacttgaggatttccagaaacgtcttgaggaaagtatgaatgaggtttcaaaggaaatatacgagcttgccggagaaaaatttaatattaattcgcccaaacagcttggagttatattgtttgagaagctcggacttaagggcggcaaaaagacaaaaacaggctattcaactgccgccgatgttctcgaaagccttaagagagataatccgatagtcgcaagcgtgctttattacagacagctt

SEQ ID NO: 1784 - DNA, 1254 bp, Unknown
  Unknown gut bacteria
atactcgtcaactcatggaaggtaaaagaaataagagataagatgctctacacacttcttattcttgctatcgtaagattgggagcgcatatttatcttcctggaataagtgctgcgacgataaaagcttatacagatcttaactcaacaggcactctgtacaatataattgccggtggtgccggttcgaattactcaatatttgcattaggtatcggaccttacattacatcgtcaattatcatgcagcttttgtgcgtagctattccgactttggaacagctgtccaaagaaggagaagatggacgtcagaaaatcaacaaatatacccgttatataactgttgtgcttgctgcacttcagggtaccggtatagcattgaattacaaaactatgatgactaatccttctactttaaaggttgtgattgcaataataacacttattgcaggatcaatgtttattatgtggcttgctgagcagataacacagaagggtatttcaaatggttcatcaatgataatcttcgtaaatatcatttcgagccttcctaatgcaattactgcacttgtaggatattgcaaagaaggtaaaacaggaatacttaagactgttggaatattagtacttcttttcatcgtaattgttcttattgttagggtaaatgatggtgaaagaagacttcctgtacagtatgcaaataagatgacaggaagaagaatgggcagtggcggaaacagcagtgttttccctattaaggttaatacagccggagttatttcaataatctttgcgatttcacttattcagttcccggaaacaatcagcggatttatatccagcgttcccggttggcttgaaaaagtgattggaatactttctatgacacacccggttggtgctataatatatgtaattttaatttttgcattttcattcttttatacatcaatcgttatcaatccaaacgaaattgccgagaacatgaaaaagaacggcggtttcattcccggtatcagaccgggtatgcccacagctaactacatcacaagagtagtaaacagaatcacatgggttggtgctgtttgcttcgcaggacttgcgcttgtgcctatcgttatgcagtggatattcaaaatgaatgtaggattcggaggtacaacacttatcatcgttgttggtgtttgcctcgatattgtaaaagcacttgagtctcagcttcttatgagacattacaaaggtttcttagattaa

SEQ ID NO: 1785 - DNA, 1842 bp, Unknown
  Unknown gut bacteria
atgtgtggttttgtcggatttacaggtcaccttgtaggcggcgatgaaatccttaaaaatatgatggataccattatccacagaggtccggacagtgccggaactcatattgattcagatgtttctctcggtttcagaaggctcagtataatcgaccttgattcgggtactcagcccatgtacaacgaaacaaacgatatagttattgtatttaacggcgaaatatataattaccaggaattgaagaaggaccttatcgaaaagggccatgtattcagaaacaattccgatacggaaacacttatccacagctacgaagagtacggcgaagcaatgcttgaccgcttaagaggaatgttcgcctttgtaatatgggacggaaagaagaaaaagctctttgcggcaagagatttcttcggaatcaagcccttttattatgcccttgttgacggacagcttgtttttgcatcggagattaagagtattctcgaatatacaccctataaaaaggaaataaatcctcttgcacttgaaaactatcttacattccagtattcggtacttccggaaaccttctttaagggtatttacaagcttatgccttcgcactgtcttacattcgaaaacggcgagcttacaataagacgctactgggagccggtatttgagccggacgaaaacgtaactctcgaggagcttacggacaaaatcgacgatgcaatgcaggcatcaatcaaacgccacaaaataagcgatgttgaagtcggctcatttctttcaagcggcgttgactcaagctatgttgccgcatgctttaagggcgacaagaccttcacagtcggctttgactatgccaagtacaacgaaattgactatgccaagtcattatcggaaaaaataaagattgacaattacagcaagcttatttcgacagatgaatactgggacatcattcctaccgttcagtatcacatggacgagccccttgccgatccttccgcaatagcactttattttgtaagccagactgcggcaaagcacgttaaggtttctctttcgggagaaggtgcggacgaattcttcggcggctacaacatatacagagagccgttttcattaagaccgattacaagacttccgaagggcttaagaaaggctttaggtgcctgtgcggctgctatccccttcaaaatcaagggcaaaaactaccttataagaggcagcaaggacgtagaggaaagatttatcggaaacgcctttcttttcaacgagaaggaaagagaaaagctgcttaaaaatcctacgggtaaatacaatcacacagagcttacaaagccatactatgacaaggttaagaatcttgacgatacaacaaaaatgcagtacatcgacattcatttctggcttataggcgatattcttctcaaggcagacaagatgagcatggctcattcgcttgaggttcgagttcctttccttgacagagatgtatttgaggttgcaagaaaagtgcctctcaaatataaggttacaaaggaaaacaccaagtttgcaatgcgtcaggctgcacacagataccttccggacatggttgccgaaaagaaaaagctcggcttccctgttcccatcagaatatggttaaaagaggacaagtattacaacaccgtaaaggacgcctttacatcaccggcggcggcggaattcttcaatgtagacgaaatcgtcaagctgcttgacgaccacagaaacggcaaaaacgacaacagccgtaaaatctgggcaatatatatgttccttgtatggtacaagagatattttgaaacagaaaaagcggcagcttaa

SEQ ID NO: 1786 - DNA, 1776 bp, Unknown
  Unknown gut bacteria
atcaacgatatgattgaggttgaaatcaaaaatcccgagctttgccccagatatattgcaagagtagttaaaaacgtaaagattgagccttcacccagatggatgagaaaaagacttcgttcaaacggcgtaagacctatcaataatatagtagacattacaaactatgtaatgcttgagcttggacagcctatgcacgccttcacaatcggaaacattgacggcaagaagattattgtcagaaatgcggaagaaggcgaaaagataacaacacttgacggaaacgaaagacagcttgattcttcaatgcttgttatttccgacgtaaataaggctgttgccgttgccggtgtaatgggcggcgaaaactcaaaggtaaacggaagctcagacacaattcttttcgagtctgcaaacttcaatggccctaatatcagaattacagctaagaagcttggcttaagaacagatgcttccgctaaatacgaaaagggacttgaccccaaccttgctcttgatgcggtaaacagagctgttcagcttgttgaaatgctcggctgcggtgaggttgttaagggaatggttgactgctatcccaataagagagagccttggacacttgaatacagccccgaaaagattaataagcttctcggcacagacatttccgaagacgaaatgattgaaatattcaagagaatagagcttgttcccgataaggcaacaaagactgttgtaatccctacattcagacctgaccttgagagcatggctgaccttgcggaggaagtagcaagattttacggatattcaaagattgttcctacacttgcggcaggtacacctacggtaggtaagagaacatacgcacagaatataacagcaatgattaagaattcgcttatatcaaacgggctttgcgaggctatgacatactcatttgaaagtcctaaggtatttgacaagctcagaattcccgaaggagataaattaagagataccgttactatttcaaatcctctcggtgaggattacagcattatgcgtacaactacgctcaacagtatgcttacatctctttcgacaaactacaacagaagaaacgaaacagcaggcttatttgaaatagctaaagtatatattcccaaggctgttccggttacagagcttcccgacgagcctgttaaaataacaataggtatgtacggaaacactgatttctacggaattaagggtattgttgagcatacgcttgacactctcggaattacaacagccgaatttgagcctcttacaactcttccctggatgcatcccggaagaactgctcagattgatgttgacggaaaagcagtaggctatgtaggcgagcttcatcctacggttgcaaagaattacggcataggagcaagaacatatatcgccgttcttgacgaggcagagcttattaatgcagctaagcttgtttcaacatacaaggctcttcctaaattccctgcaatgataagagatatatctatgcttgttaaggatcatgtatacgtaagagatattgaaaaggttatcgctgcaaacggcggagatattcttgaaaatattgaactctttgacgtatataagggtggacagattgcggacggatataagtcagtgtccttctcaataacattccgagctgatgacagaacacttgtcgatgacgaggtaaatgctgtaatggctgatattctcaaggctcttgaggaaaaattaggtgctgttttaagagataaataa

SEQ ID NO: 1787 - DNA, 1434 bp, Unknown
  Unknown gut bacteria
atgacggatttttacgagcttacaatgatgcagggttatcttaatgacggctctattaacaaaaccgttgtttttgacgttttttaccgtgttaatccttccggaaacggtttcgccataaccgcaggacttgaacaggtaattgattatattaagaatttacatttttcggaaagcgatattgaatatctccgttcgctcaacacctttgatgaaaaatttcttacctatctcaagggcttcagatttaccggagatatatatgcaattcccgaaggaacggttgtgttccctacagagccgcttttaagagtcaaagctcccataatggaggcacagattgtcgaaaccgcaattcttacgataatcaatcatcagtcgcttattgcaacaaaggcatcacgagttgcatggtcagccggaaatgacgccgtaatggaattcggcttaagacgcgcacagggccccgatgccggaatttacggtgcaagagccgcaattatcggtggctgtgccggcacaagcaacgtgctcacaggaaaaatgttcgatgttcctgttctcggaactcacgcacacagctgggtaatgagctttccgtcagaggttgaggccttcagatgctatgcaagaactttcccaaatgcctgtacattccttgttgacacctatgacacactccgttcgggcgttccaaatgcaataaaagtatttaaagaaatgcaggaggcaggaatcgagcttaaaaactacggtatccgtcttgacagcggcgaccttgcctatctttcaaaggaagcaagaaaaatgcttgatgccgcaggctttaccgatgcaaaaataactgcgtcaagtgacctcgacgaatatcttataatgagccttaagctccagggcgcaaaaataaacaactggggtgtaggaacaaagcttattacctcggacgactgtccttccttcggcggtgtttacaagctttctgccgaaagcgatggaaaaggcggatttattccgaaaatcaaattgagcgataacccgtcaaaggtaacaaatcccggtattaaaaaagtattgagattttatagcaaggatacaggtaaaataaaagccgatcttatctgccttgaagaagaagattataaggaaaccgatacaatcagactttttgaccatatggcaaaatggaaaaatatgattcttaagcccggaacatacacaataagagagcttcttgttcctgtatttatcaacggcgaatgtgtatacacttctccgtctgttatggatataaaagcaaattgtgagcatgagctttctactctctgggacgagcatagacgtcttgcaaatccacatactgttccggttgacttatccgataagctttttgagcttaaaaacagacttattgatgaactcagcggaatagattaa

SEQ ID NO: 1788 - DNA, 1404 bp, Unknown
  Unknown gut bacteria
atgatagcgttagaggataagaataatattggctcactttattttcagatatattcacagcttaaggacgatattcagtccggaaagcttaaggccggaacaaagctgctttcaaaaagaaaaatggcggaaaggctcagtgtgagcgtgaatactgtggaaacggcatattcacagcttgtttcggagggctttatagaggcagaggcaaaaagaggatattttgtctgcaaaatagacagacttaatatagataataaacctaaaatagaaaatgaaccggataatgaatataacaaaggaaataatataatcgtggattttgcgacagacggcgttgacggcgataactttccttataacacatggcgaaagcttatgaaaaactgttttaatgaatataatccggatatattgaaaagtgcgccgccggaaggcgattataagctgagaaaagccgtagccggacatatatatgcctcaagaggtgtaaactgctccgtaaatcaggttataataggtgccggagtcgataatctgctcaatatcataagcggaattataggaataaaaagtaaaattgccatggaaaatcccgtatactatgaagcatattcattgtttaagagtcttggacatgagataatatccatacctgtggacgataagggaatgagaacggatatgctgccggaagaggatagtattattgtgtatgtaactccgtcacatcagtttccgcttggtataacaatgcctgccggaagacgagtaaagcttatgaattgggcatatgaaacggaaaacaggtatgtaatcgaggacgattatgacagcgaattcagatataattcaaagcttattccgtcggttcagagcatagacagaaaaggaagggttatatatctcggaacgctttcaaaaaccattgctccgtcggtcagaataagttatatggttctgccaaatgagctgcttaaacgctataacgaaaaatacagaaaattcagctctgcggtttccgttcttgagcagaatatggttacggaatttataaccgaaggctattacgaaagacaccttaaccgtatgagaaagctttacggtgaaaaaagaacggtactgcttgcggagcttaaaaaattcggcagtgctgtaaagctcaacggcgaaaacgccgggcatcatatggcggtaaagctgacaaacggaacatcggaggcagacatggtaaggcttgcggaaaatgtcggagttaaggtctatcctctgtcgaaatactttgtggataaggttcccgataaatataaaagtacagtgcttatcggttatgcaacgctttctgtggataaaattaaaacaggtgcggagcttttgagaggtgtatggactgataatatataa

SEQ ID NO: 1789 - DNA, 1455 bp, Unknown
  Unknown gut bacteria
atggagcagagcttttcaaaagaaactattaaaaatgctgttgtagaatgtcttagaaatttgttcagaaagactgtggaaactgcaacagatgtggagctttacgaggcgtgcatatatgcgctcagaacggtttttactgaaaaatggataaagacacatgatgaatataaagagaaagatgtaaaaatggtatattatctttccatggaatttcttatgggaagatttttcggcaacggtgtaataaatctccagatgtatgataccataagagaggctcttgcggagcttggtattgattataaccttattgaaaacacagagccagatccgggactcggaaacggcggccttggcagacttgcggcatgctttctggattccctttctacaatggaatatcctgcatacggctgtggaataagataccgttacggaatatttgaacagaagatagaaaacggttttcaggttgaaaagcccgacggctggcttgaatcgggagatttctggtcaataaagcgtaccgaatatgaggttgaggtaaaattcggcggtgatgtccgaatagaagcaaaagaggatggagaatataaatttatacaggaaaattattcttctgtaattgccgtaccttatgattatccggttataggttacggaaataatacggttaatacactccgactttgggaggcaagacctaaaaatatgtttgaccttcagtcctttaacgaaggaaactatgcgaaggctgttgaagaggcaaacatagcaagaacaataaccgaggtgctttatcctgccgacgaacacatacagggcaaggagcttagattaagacagcagtatttctttatttcggcaacggttcagagagttattgcaagatttaaaacaaaccataccgatttcaaggaattgccggataaggttgctttccagctcaatgacacacatccgagcattgcagttgcagagcttatgagagtgctggttgacgaaaacgatgttccatgggacgatgcctgggacataacaacaaaggtatgtgcgtacacaaaccatactatcatgtcggaggcacttgaaaaatggcctgttgagcttttcagcagacttcttccgagaatttatatgattgttgaagagataaacagacgtttctgcataagccttgttcagaaatacggaaacaatcccggaattgtacacgatatgtctataatatccgatggacagataaaaatggcgtaccttgccattgtcggaagccactccgtaaacggcgttgcaaagctccatacggagattctcaaaaatcaggagcttaaaaacttctatgacttttatccggataaattcaataataaaacaaacggcataacacagagaagatggttattgcacgcaaataaaaagctttcggagcttattacagaaaatataggt

SEQ ID NO: 1790 - DNA, 1083 bp, Unknown
  Unknown gut bacteria
atggattttgaatttaatgaaaatcagcttgaccttcagaagatggtaagagagcttgccgaaaaggaaatcggccccagagcaaaagaaaatgatgaaaaagacgtattccctgtagatgtattcaaaatgatggcagacatgggacttacagcaatcggcgttcccgaatcatacggcggacccgaagcaacagacatcgaaagaatgatagctattgaagaaatcgctaaaaaagacggtgcggtagcaacaatccttgctgtacatggtatgtttgtacaggctcttgaaaaatatggtacagaggagcagaaacagagattctatcctcgtatcgcagaagaaggatactacacagcattcgcacttacagagccttgtgccggatcagaccctgcatcagcaaagacaacagcagtttatgatcctgcaacagatgaatatgtacttaacggaaacaaatgcttcatcacaggcggagcaagagcagacgctatcttagtattcgcacttacagatccttcactcggtgcaaagggtatgtcagcattcattgtagaaaaaggcatgaagggcttctcaacaggtaagattgaagacaaaatgggtatcagatgctcagaaacagcagagctcttcttcgatgactgccgtgttcccaaggcaaaccttgtaggccaggaaggcaaaggcttcggaatcgcaatgaactcacttgacggagcaagaatcggtgtaggagcaatcgcactcggacttgcagaaggtgcacttgatgaatcactttcatatatcgagcagagagtacagttcggaaaacctatttcaaagcttcagggaatccagtggtacattgcagatatggcaacagaaatcgaaacggcaaaatggatggtataccatgcagcataccttcgtacagtaggcaaaccttatacaaaagaggcttcaatgtgcaagcttcataactcaaaggtagcaagagaggtaacaaaccttgcaatgcagatccatggcggatatggttacatgaaggaatatcctgttgaaagaatgtacagagatgcaaagatcacagag

SEQ ID NO: 1791 - DNA, 1947 bp, Unknown
  Unknown gut bacteria
atggataatgatgattttaaaaaaagtaatgactttttgattattcttctttttgctgtgcttggtgcaataggtgttattgtcagcggtatattcggcataattattattgcggcagaggcggttattgctaccgcaatcaagagaaatcagcttatacaacagaagaaaaaaattgaggaacttaccgtagaagatgatgagccggaagtagttgttaaaaacgatatacctgtgccgtatgcggtaatcgacggagaatttaaccttataggctgtaatgaggagttttatcagcttatggggcttaaatgctttaaggatcttaatattaaagaaaaaataccggaatacaatgagcatctcaataaccagatagtaagtcttaatgacagacaataccgcatctattcttctcatgcggagcttacagacggaagcatagcaaattctttatgctttatggatgttaccgagcttacaacgctcagaaaaagccttgaaaacgataaaaccgttgtcggacttatatatatcgataactatgatgaggttatcgaaagtgttgatgattctgttatacctatgcttactgccattgtggacagaaagcttacggcaatggtacatgatgcaaaaggtatactcaagaaaacggaaaaggacagatattttttctgtattgcggcagaagagcttacaaagctccagaaaaacaagtttgaaatactcaatgaaataagagagataacaataggtgagcatattcccgttactttgagtataggtatcggaataggcgaagcttcacttgaagctgcaatgaagagtgcaaaagcggctatcgacctggctctcggacgaggcggcgaccaggcacttatcaaaaacggagagaaatatatattttacggcggaaaaagcggagaggtatcccataatgccagaatcagagcaagagttaaggcagatgcactttcggagcttattactgaatccgaaaaggtatttgttatgggacataaaattcctgattcggactgctttggttctgcaataggcatataccgtatatcaaaggcattgaataaggactgccatataataattgatgaagttccgacaataataagcaaaactgtttctaagtttactgccggtacggattatgaagggcttattatcgattcacagacagcatggcaggatcttaccgaaaacacactgcttgttattcttgatacgcatataaacagcagagttgaatctgttgatgttctgaataaggcaactaaggtcgttgtgtttgaccaccacagaaagagcacagatttcattgataaggcggttatggtttaccatgaaccgtatgcttcgtcaacgagtgagcttataacggaaatgatacagtatatcggtgaaaaggttaaaattaagccgcttgaggcagatgcactccttgccggaataactgttgatacacagaacttcagcatgaaaaccggaacaattacctttgaggctgctgcatatcttaaaagatgcggagcagatggcataagagtaagaaagcttttgcaggaggatatgagtgtgttccgtgcaagagccgctgctgcggcaaatgccgaaatgatagcagacggaatgtatctttccatatgcccttctgactacggaaattcagcagttacagccgcacaggcggcagatgagctgcttgatgttgaaggtgttaaggcatcatttgtgctttgtgacgacagaaacacaatatttgtcagtgcaagaagccttggtgaggtcaatgtgcaggttatacttgaaaaaatcggcggtggcggacatcagacgataagcggtgcccagtttaaaaatacgaatattgaggctgtaaaggagcttgtgaaagaggctgtacagcagtatatagaggaggcaaattga

SEQ ID NO: 1792 - DNA, 1500 bp, Unknown
  Unknown gut bacteria
ctcaaggcagaagacttagagccggctcttgacgaagacgaaaaatatgatgcaagagaaaaagagcttcttgttgaaaaaggtttcaagcccgaagaaatcgacaaggttcagaaatttacacgtcgtaaggctgccgaggaaaccgacagagccacatatcaggcaatggaggcatttatacacaacctcaacacaatgcattcaagagcaggcgcacagacacccttctcttcaattaactacggcatggatacatcaaccgaaggtcgtatggtaatgaaaaatatacttcttgtaacggaagcaggtttaggacatggcgaaacacccatattccctatccagattttccgtgttaaggaaggcataaactacaatccgggagaacctaactatgacttattcaagcttgcatgccgagtaagcgcaaaaagactcttccccaacttctcattccaggatgcaccctacaaccttcagtattacaagggaacacccgaaacagaaatttcatacatgggttgccgtacaagagttatggcaaatgtatatgatcctacaaaagaaatttcaaacggcagaggcaacttaagctttacaagtatcaaccttccgagaatagcaatcgaggcaaacaaaaacatcgactggttctatcaggagcttgaccgcaagattgaccttgttattgaacagcttcttgagcgttttgagatacaggctaaaaagaaagtacacaattatcccttcctcatgggcgaaggtgtatggattgacagtgacaagcttgatataaatgatgaagtgcgtgaggtacttaagcacggtactctttcggttggctttatcggtcttgccgaaacacttaaggcacttatcggttatcaccatggagaaagcgaaattgcacagaatctcggtcttgaaattatctcacatatgagaaaacgtatggacgatatttccgagcagatgcacctcaacttctcacttcttgcaacaccggcagaaggtctttccggcagatttgtaagaatagacaaggaaaaatacggtattatcgaaggtgtaacagacagagattactacacaaacagcttccatgtgcctgtatactaccctatcagtgccttcaaaaagattaagatagaagcaccttaccatgcactcacaaacgcaggacacatttcatatgttgagcttgacggagatccttcacagaaccttgatgcattcgagaaggttgtacgttgtatgaaggaatcaggcatcggctatggctcaatcaaccatcctgttgacagagatccatgctgtggatttaatggtataataggtgatacttgtcctaagtgcggaagacatgaggacgaaggtgtgcatttccagagaatcagacgtattacaggctaccttgtaggtgatatgtcaaaatggaatgatgccaagacaagtgaagagcacgacagagtaaagcacagcataaatatagaataa

SEQ ID NO: 1793 - DNA, 1395 bp, Unknown
  Unknown gut bacteria
tattataaccttgtcggtgaagtggaatatgataacgaatacggaaatttgacaacggattttatgaagattaagccgggacttatgcacagggcaaacggcggctatcttataatacaggcacaggatttgctgagcaatgtacaggcgtgggaggctctcagacgtataataaagactaaagaaattactattgaaaacctcagagatcaggttggtgcgattgccgtaacaacgcttaagccggagcctataccatctgatgtaaaggttattcttgtcggcggagcgtattattacgagcttctcagaggctatgatgaggatttctcgaagctgttcaagataagagctgattttgattatgaaatggacagaaatgatgagaatatatttaagattgccggctttataagcaagttctgtgagaacgaaaaaactcttccctttgattcctcggctgttgcatcagttatagaatattcgtcaagatcggttgaaagccagaaaaaactttcaacaaggtttaatcttattgccgaaatacttgcggaatcggcaacatgggcacagcttgacaatgctgaaatcgttactgccgaatatgttaaaaaggcggaagaagaaaaggcatacagattgtcaatgtatcaggaaaaaatgaatgaactgcttgataacaacactattatgatagcgacagacggatactgtgtaggaaaaataaacggccttgcagtgcttgatatgggagattattctttcggaagccctacaaggattactgcaacaacatatatgggtaaatcgggaatagtcaatatcgaaaaagaggctgaaatgagcggccctacacataataagggcgtacagataataacaggctatctcggaagaatgtatgcacagaaaatgccgctttcgcttagctgtcgaattgcctttgagcagaattataacggcatagacggcgacagtgcatcaagcacagagctttactgtatattatcaagcctttccgagatacctgttaatcagtcattggctgtaacaggttcggtaaaccagtgcggagagatacaggctatcggtggagttactcataagatagaaggttattttgatctttgcagcagaagaggacttacgggaaaacagggcgttgtaataccggagtccaatgtaaacgatcttgtgcttaaggacgatgttattgaggctgttaagaatggaatgttccatatttattcaatatcgaccattgacgaaggtattgaactgcttttgggaacggaagccggtattatggacgaaaacggagattatcctcctgaatcggttcatggcaaggtaatggctaagcttaaaaaattcaatgaatataacgaagattaa

SEQ ID NO: 1794 - DNA, 1275 bp, Unknown
  Unknown gut bacteria
atgagcgaagcagtagatttcagtacaatgacttcaaaacagttgttaggttatttccaggaaaaagcttattctgattcttataatgcacatgaaaacggacagcttatctgctggtcatcttcaattgcaccttcagaattttgtgaggttatggatatagttatgctttatcctgaaaaccatgcagcagctatcagtgctaagaaatatgctgaaacaatcattaacatatcagaaagcaaaggatacgatgttgacctttgtgcatattcaagagtaaatcttggttacatggaacttcttaaggaagaagctatcacaggcgttacacctgaagctcttgctaactgtccggcacctagaatgccccttcctgaccttgtaatcacatgtaacaatatctgtaacacacttcttaaatggtatgagaaccttgcagtttctcttaacattccttacatcatcatcgacgttccttacaaccacacaatgcctgtatcacagcatgctaaggaatacatcgttgatcagttcaagtactgcatcaaacagcttgaggacgtttgcggtaaacctttcgactatgacaagttcgttaaggttcaggagcagacacagcgttcagtagctgcttgggacagagctatgggaatgtgtgctcatacaccttcacctatgaacggtttcgatatgttcaactacatgggacttatcgtttgtgcaagatcaaaacatgatacagaagttacattcaacagactttacgaagaactttcagagcatgtaaagaacggtacatcaacattcaagggtgttgaaaaattccgtacagcttgggaaggtatcgctgtatggccttaccttggagctacatcaaagcctcttaaagctctcaactgtaacgttgttggttctacatatcccggtgcttggtcaatccattatgaagttggcgaccttgaagctatggctgctggttactcaaagatgtacagcaacacatgtcttgaaaacaaagttgatgttatcagcacagttcttgagacaacacattgtacaggtatcacataccaccttaacagaagctgtaagcttatggacttccttaatgtagaaacagctgaactcgttaaagagagaacaggcgtaccttatgtaagtttcgatggtgaccaggctgaccctcgtgcattctcacctgcacagtatgagacacgtgttcaggcacttgcagaaatcatggaacagaacgcacaggaatcagctaactaa

SEQ ID NO: 1795 - DNA, 1275 bp, Unknown
  Unknown gut bacteria
atgatgaacaaaagtaagtttaccaaggatatcggctggaaactgctttccctcattattgcaataggcttgtggtttactgtaatcaacaccgaaaatcctcttgaaacaagaacatatacggcggctatacagcttcagaacaaggaatcgcttttcgagagaggttatgtggttgtaaataatgatgagcttacatctaccagagttacggtaagactgagaggacagaggcttgcattggacactctttcaaagagcaatacaagagtgcaggcgatagttgatcttgaaaacgtaatatattcctatgacggaaatcctgtttccgttcccgtaagcatagtaattcccagtgttgtgaacaacagctttgaaatactttcaaaatcgctccagagcgtaacggttgatatacagccttatgtaaatcaggactttgaggttgagcccgttgttgaatatacacaggaaggcagctccaatactggcgagcttataaatgcggttgcttctccgggaacggtaaccgtatacggtgcgaaaagcatagtcggaaagattgcttcggttaaagcaacggtaaaaacagataatgtttccgatgatcttgtaataactgcacctccgattgcatatgatgaagatggtgttcctataaatgatgtgacattcagtgtttccgaggtatcaattaagataagtcttgatgatatgaaaaatgtggatataaacgagcatgttcagggaactccggcttcgggatacagtatttccggaatatacactgctccggataatattgatgttgccggcgatgaaagtgcgttgaggtcaataagaagtatagagcttcccgaaatagatataagcggtgcatctaataacataataagagagtttaagctggaagattatcttcctgacggagtaagagttgtcggaagcagtaattcaaccggttatgttacggttacaataattatggaaaaagatattcagaaaacaattactataccgacagataatatttccgataacggaacaactccggaaggcatgatagcccagatagaaagtggaaatattgtgttctccgtaagcggcacacaaagcgatgtaaacaatataagtgccgatgatgttaaggcttatgttgatttgagcggttacagcgaaggtacctatgagaatgtaccggtgcagatagtgcttccggacggagttatgctcgtcagtgatgaaccggtatatgtaagtgtaacattgtcataa

SEQ ID NO: 1796 - DNA, 1308 bp, Unknown
  Unknown gut bacteria
atgagcagagaagaaaacgaatttgaaattaccgaaagacgaagattgcgttcattggataaaaagaaaattataataggaattgttgcggttgccgttatagcggcggcagtggtttttgcaaacaacagaggaatgttcggagaaggtaaggcggcggttgttacatatgcctcggacagcaaaaccggttacagaacctacggaaacgaatatctccagtatacaagggacggagtgaaatatttcagcaaatccggagaacagctctggagcgacggttatgttatgacctcgccggttgttgtccaaaagggcgattgtacggcaatatttgaaacagatggaaggctggtaaaggtatataattccaaaggctcggtatgcagtgttcagacggacaacgccattgttgccgtttcggtgaacaaaaacggctatactgcggtaataacaagcggtgacagctatgcggtgtcggtttataattcatcgggaagtcttatattccagagaatagaggccgacagcggtgtttatccttttaactgtgatatatcgcccaacggagagataatagccattgcatatgtcgatgtgtccggcgttgagattgattcgaaaatcggtctgttttatgttaatgcggaaaagggtgcggcatatactgacagtatgtttgcggcagtggataaatccgatgaaataatatttgatgtgttctttatgggcgacggcggacttattgccgtaggcgacagaaatattatgtatgtttcatcaaacggaacaatgagctggaatatagaggtcactaatgaaataaacggtgcggctgtgtgcggagataatgttatgcttgtttacggcaacgagcttccggacaaggacggacaggagccgggaacgatagttattataagctccggcggaaagcagtcctttggatattgcataggaagcgaagccgattattttgaggtatccgacggcggagctgttgtcggaaacggctcggaatatttcggaataaattcatcgggaagtcttgtatgggatatgaacgattcgggaagcataaacggaatatatcctactaataatgttaaaaagtgtatttatgccgcaaaaacgtggtcggttgaggctgatatgaccaatttcaatccttcaagctatattaaaaacgataataatgcaggaacagagaatatggcagaggcagtacaggacacaccggaagacaataatgccgacaatgcaacggctgacgatggaacaaatacaactgacacaaatgcggataca

SEQ ID NO: 1797 - DNA, 1467 bp, Unknown
  Unknown gut bacteria
atgtaccttgacttagagggcaaaacgcttgcagagcttagagaagaagcgaaaaagctcggtatcaaacgcataagcggaatgaaaaaagacgagcttttgaaaaatattaaaatagcaatacatgaaataaatgtagcggaggcggccgaaaagaacgaaaaatcggctgccgaaggtgcaaataaacaggataaatccgaaaaaacggagaaaaacgagaaattcgaaaaaaacaataaacctcagcagtctgaatcacaggaaaatgaaaaatccgaaaaaacggatacgtcggataagaaagaaaaacagcccgatccggcatctgccgaaggcgaaataagccacggtattcttgaaataatggctgacggttatggttttctccgtacggaaaattttgaacagggcgataatgatatttacatagcgcagtcacagataaaaagatttgggctcagaaccggcgataacgtaatgggtgttacccgtgcggcaagagaaggcgaacgctatgatgcaatactttatgtcaagagcgtaaacggagataatccggataaagctgtcggaagacctgtttttgaaaatcttacaccgatatatccctgtgaaaagctgaaaatcgaaacaacaagggacgaaataagcggaagaattatagatctggtttcaccgataggcaaaggtcagagaggaatgattgttgctccgcctaaggtaggaaaaacaattttgctcacaaagcttgccaatgcgataaccaaaaatcataaggaagtaaatctcataatgctgcttatcgatgagcgtcccgaggaagtaacggatattcagcgttcaatcgaaggcgataatgtggatattgtttattcaacatttgacgaaaagccggagcatcataagcttgttgcggaaatggtgcttgaaagagccaaaagaatggttgaacaaggcaaggatacggttatacttctggacagcataacaaggctttcgagagcttataatcttattgttcctcccagcggaagaactctttcgggcggtcttgatccgtctgcattgtattttcctaagaaatttttcggtgcagcaagaaatatagaaaacggcggaagccttactgttcttgcaacagcactgatagacacaggaagcaaaatggacgaggttatattcgaggaatttaaaggaacaggcaatatggagcttgttcttgacagaaagcttgccgaaagacgaatattccctgccatagatgtgaacaaaagcggcacaagacgagaggaacttcttttaagcaaggcagagcttgaggcaatgtatgcaatgagaagaatggccggtatgtccaatgcggctgaaacaactccgtttgttatcgaaatgatgaccaagacaaaaaacaacaaagaatttgtggaaagattgtcacaaatggagaaaaatattgtaaagtag

SEQ ID NO: 1798 - DNA, 888 bp, Unknown
  Unknown gut bacteria
tttggcgatttggtacgaataaacgaggctttgcatgagaaaaaggtagcctctatcgccgatatgatttatcacagaaaatctaaggtaaagcttgtgcttatagcaggcccttcgtcatcgggaaaaacatcatttgcaaacagactgggaatacagttaagggttctgggaattaaaccgcacgttatatcaatggacgattattttataaacagagaggatacgcccgttgacgaaaacggcaagagagattacgagaacatcaactgtattgatattgcacagtttaacaaggacattaatgcacttattgccggagaaacagttgagcttccgagctataactttataacgggaacaagagaatataagggcaattttataagacttgccgaaaacgaaataatgattatcgaaggcatacatggtcttaacgataagcttacgccgggaataagccccgaaaataaatttaaaatattcataagtgctatgacacagctcaatgtggataaccataaatttatttcgacaagtgacagcagacttttaagacgaatggtaagagataatctttcgagaggaaacgatgcggcggcaaccatttccgcatggccttacgttgcaagaggagaagaacgaaacatattcccgttccaggagaatgcggacgttatgttcaactctgccacaatatatgaaatttccgtacttaagcagtatgccgagccgcttttgtataaggtaacaaaggatatgcctgaatatattacggctaaaagattgataaaattccttgcatatttcctcagtgcaccggcagatccaataccgaataactcactcataagagagtttgtcggcggaagcgtattccatgtttaa

SEQ ID NO: 1799 - DNA, 1455 bp, Unknown
  Unknown gut bacteria
atgctttcgtccgataagcttaaggaaacctttatgctgtccgatatagccgagctcggaagaaatgaacattatgcaggcatgcggaaatatatatcgggaaggctgaaaggctatgcggaaggcttgtcggcattggaaaaaagctttaaaccggcggaaaaacaggaggaagaggtaaaaaaggaaacctcggaaatggcagacaaggttgcctgtcttgtatgcgaaggctgtcagaaaagcgagagctgctggaacagctcatattacagcacatatcagacaatgatggatcttttttctctatgcgagaagaagggaataatacatacctccgatatgccatcggtgttcagggattactgcataaagcagaaggagtttgccgaggccgttaatgtgacttattcgggacacagagagggacttatatggaatatgcgtctgcatgagagcagacagcttgcaaaacagcaaatgggagccattgaggagatgctttcctctcttgccgatgaaatagaaaaccggatatatttcaaagagaacttggaaaaggtgatatattatgagctgagaaaaaacaacgacaatatagaaaaggttactgtggaggaaggtgacaacggtgaatatgaggttgcgatatacagaagaggctgtaagggcagacaggaatgcagagagcatacggtggatacggtaagcagtattctcggacgaaagatgaaaagaacggaaaaggagtgtgtatcgggatgcaacggagtatgcaggcttgtgcttagtgaaaaatgcagcttcaggatttcggcatcggcggcaatggcaataaaggacgaggaaaatatgtcgggagattcctattcctttatggagctgccgaagggcggctatatgatggcactttccgatggaatgggaagcggaaaagaggccggaaacgaaagcagaacggttattgagcttttggagcagtttgccgaggcaggcttcaaacgggaaaccgcactgaaaatgataaattccgtacttgttatgagcaataattcggagagttttgcgactctcgatatgtgctatattgacctgtatacgggtatggcggaatttataaaaacaggtgcggcggcaacctttgttatacgaaacggaaaggcaaaggccatacgctcgtcatcattgccaatcggtatgctgaaatactttgagatggataaagcggaatacaggctgaaaaagaatgatgttataattatgctgacggacggtgcggcagaggtgatggacagggaaaatatgtcggaacagattctgacaggacttatggctgaaaacagcatgaaggatccgaaggatattgcggaaaatgtcctcgaaaggataaaggagaggtccggattcagaatacaggacgacatgacggtcgttgccgcaagagtctggggatag

SEQ ID NO: 1800 - DNA, 1458 bp, Unknown
  Unknown gut bacteria
ttggtatcgcctaaaatcgaagaaaaattaagcaacctttcggcagaatatatatacaacgaaggaataggaaatcttcttctgcttgcaataagctacaccgacagaaaaaaaggtgaagacggagatatgccattcggtatgccggaggaaatcaaaaaaatacgtgacaaggccgacagctatattccggagcttgaggatatattgggaaacaatgagcttagaatttcagcacttaatgaagtgcttgagcttaaaaaacagcttgtttccctttacggaaatgtatacgactatttttcacagtggaatactctttcacttgcggtaaacgatgaaactgccataagaaaatacaaggaacagcatttggcagacaaaaaggttcagtatgaggtattttataccgactgcgtaaatttccttacagcatcggaaaatatcgatgaattaagaaaatacacagcacagcttctcaaatgtatgcctatgagaatggcgagaggcagatttttcgacattgttctccgttcattgcgtgccgcctttgccggagcaaccgaagaaacaataacaaaatcaatagatgccttcaaaaaaggctgtgctcccgtacttgataaaaattacggaaagcttttccctgaaatagccgaatggcttgcgtccaaagctgaccatattccggcacatatgagtgatgaggagttggcagatgaatacgaagatttcaacatgatgctcgacacaatacagcaggctgaggacggctttacagctctttatgatgacctaaactcactcataatagttctctatctcagctttacatttgaagagcttaccgaaaaggacgccgcatatgccgacctttaccatgccgtatgtgacataatgacgggcgaaacaagcgaagaagaagccgaagcacttcttgatacactcaaggaacagcttgaagccgcttttgagccgataatcgataaggtaaattctatcaatgaaaaagagcttgagcttatggataaaatcggtacaatgtctgagctttctgaggaaacacagaagagcataggtgcggaaggctttataagaggaatttattacagcaatataaatgacgagcttttcgatttcgaaatagacgaaaactctcccgttgcatcaaaggaattttcggaaaaggtatttgcggaatttatcgactatatgcaggaatattacaaaacacttcccatgcagacaagaaaatccaatatgcttatactcctcggctcaataccggttgcaatggatatagccgacacaatagattatgtaaaatcatctgttgaaaactgcattgacgaagagcagaaaattctcattgttgacaaagccggcatggtatttgacgccaacggtttcagctacgcagatgaagatttcgatgatgatgaatgcggatgcgatcac

SEQ ID NO: 1801 - DNA, 1434 bp, Unknown
  Unknown gut bacteria
atggaaaacaagaagcatacacaaaatgtaattgcggaacccgaagtcgttaaggatgaggaatttatgcttgaaccggtgccagagaataagcgcagatccacccgcagtcagatcatggtgtggatcggctttggctacgcagtgaccggtctgatcgtcggcggtacgcttggtggctccggcggcgcgggcctgccgccgctgcaggcattcctggcaatcatgcttggcatgggcgcgctgttcctgatcacgtcattccttggaatcgccgcacagaggaccggcctgaacctgtcgctcctgtcccggtattcctttggacacaagggcatcgtcattcccatggcgattatggcactgctgacgctcggctggtttgccagcattttgggcatgatcggtgatatctggggcgcatggatcgggaatcccactggggtgattgtttttaatcctgctgattttggatttgaaggagttgcacccattacactggaagtatttctggcatgtttgttctgggggatcattttcacaattacagccattcgcggcatgggcgcgattgaaaaggtcgcagatgtctgctcacccatcatcatgctcgttgccattgttgtcggtattgtctttatcgcgcagagcggcggtcccgcagcatttgttgagaaggccggcgtcctggacggtcttggaatcggcaatggcatcacggtcgttgtcggcagctggatcgccggcgccattatgggcgtcgacctgttccggttcaataaaaatatcaaggccgtcttctggtgtgcggcagcctgcttcatctttacaaatccgatcctgaattttgtcggttacatcggccaggtccatatcgggcagtacaactacgtcatgtggctgctcggcgtgggtgcgatcgtggcgatcctgggcgtgtttgtctggaccacggcgctgtggacgacagataatggcgagctgtactgcaactctctgtataccggtcccgcactggacgcatttggcgttaaagttaatcgcaaggttctcgttggcatctgcggcggtatcggtacgatccttggttctctggcattctatcagctgttctttgctgattttatcaatgtgcttggctccatggcgcctccgctctgtgcgccgatcctggcagattattttgtgttcggcaaaaataagtacgatgtcaagctcctgaacaagcacccgtcggttcgctgggcaggtctgatttccttcggcattggcgcaatcctcggcttcctcttccagtatgtcattccgctgcccctcggccttcctgccggtctggttgcaatgctgatttccttcgtcctgtatattgcaatttataagatgactccggactataaggtagatcaggcactggtccagtctctcgatcaataa

SEQ ID NO: 1802 - DNA, 2169 bp, Unknown
  Unknown gut bacteria
atgaaacgaagccagaaaaaaagacggctcctgctgcttctgtgcgcggtgctgcttttgtccctgctgaccctgaccgcggctgcggacgatccggcggcaaactatttctatttctccgcgtccagacagagcggcatggtcgccgcgccggagaagctctattatgaaaatgcatccatgacgatcaaacaggtcctgcaggcgagcgggcacacgtttgccggtctggacggtgacatggtgtacgcgatcgacggcgtcgtcggtaactataaccgcggcgacgagaccggtaactttgatctggagcgcagcgcgtcggctgtccggtatttctgcttttacgaggggacggacttcctgaccgaggcacggcgttccctcatcaagacgatggccgagtacctggagaagccgcaggacgtgcagaaagcggcgaaggaagcctatcaggacgcctgcacgaacttctctgcatcggatgacagtctcgttaccgagctggatcaggatctgcaggcagcaattgcggcctatgaaaacgcccagagcggccagacaatgaccgttcgttttacagacggcgcaaaggactattccactcagaattatcccggcgtcacgatcacggcgcagaatccctacggcaaagtgaccgcggatgacgacggcgacggcacgctcgcgctcgtgccgggcagctataccttcagcatcgtacagggctataaccggatcgacggctcgatcgaggtcagtcaggcgcagaccgttacggcgcagctgccctccggcagctggatggcggagggcgccagagtttcgctctcctccggcgacgcattcgaggcgggtgagctgacagtgacgcaggacgatcatacgctgcgcgtctgcgtgcccgatacctatgcgacgggcagcgtgtatctctacgctgattataaccgcgaggtcttcacggcgacaccggtgctgcaggcttactacacgcagcgggacggcgccgttgtcgaccctgagacgaccccggagctttctgcgcgcacgtggctctccatgtcgtctccagtgaccgccgtgctcaaggcaggcccggagggcaatacggtcgtctaccgcgtcggcgcgaaggatgaaaacggcttcctccggacgcaggaatatacgctggtgctcacgcgcagcctgtccctgtccgcgctgcatgtctatcaggacggccgcgcgcaggcgtccgatccggcctttgctccgcagacgcgggaatatacctatcagatcatctccggcacgcagccgcagaccgtcaccattgacgcgacgccgttcggagactatgcactctacgttgacggcaaagccgtgaccggcacggcggaaatttccgtcacagaggaaaaaacagacgtgcagctggagctgcgctatccggacgcggagacgagcagctatacgctgcatctggagcaaagcgacggcaaaaactgcattttcaatgtcgaaagcggcacccaggtcgcggtctataaccagaacggggaacccgtcgcgccgaccagcgtgcaggaaggccgctataccttcaagctcatccccaaccagacctacagctacatcgcgacgaaaaacggctgctaccatacggcaggcacgttcgtaaaatccacgtcggtggacatccagaccgtcagcgtggagacgaacgattggctcagcagcgttcagctttttgaaaagcggagcgcgtctgcgccgtacgtgtacgcagaaggcgcatttgcctccgccacgcacagctatacgatccgcgtctccgaccgaagctcgtccatgtacgcgaacgcggcactgatcgacgacgaggcgctcgaagcgctggaactgaaaaagacggacattacgatcacggcgatctacgatcagatctccatcagccgcacctacaacggcgtgcagaataccgtcgcgctttcccagcgcgcaaagaccctgcccaacctcctcatgtcaaacgcgctggagaacaccctgatcatccgcgcctcgcggacggaaggcggcaagacctattatcaggactacaccgtgcagatcgctcgcgtgtactccctcgggagcctgacggcttcctatgcaggcgcgagccttctgctggagcctgcg

SEQ ID NO: 1803 - DNA, 1122 bp, Unknown
  Unknown gut bacteria
atggcagaacaaaaccccaatcttcagccggaggcgtcccagccgcaggaaaacagcgagctggaaaaaagcctcgaggagctgtcgctggacgagctgcttgcgtccgtcaaggacgatctggcccgcgtcgacgcgatgatggatgattccgatgccgacgtgccggacgcggagaccgtgctggaggacgcgaaccggcagacggaaaagaaacccgaaaagagcggcatgcagccgctgtttgagccgaagatcccggaagaatatgcagatctgacggcggacgtcgatcaggaggagccggagcaggagcagccgcccaaaaagcatcagcggctcccgtccggcatccgggtcctgctctatgtgtgctgcgtgcttgcagtttccgtgcttctcgcggtcgccgcatggcgcgttgccgacgatgtgcttgcactgacgaaggacgataccgaggtcacggtgaccatccccgacggcgcgacaatctcccagatcgcgtccgagctgcgcagcaagggccttgtccgatacgagggcctgttcaagttctactgctgggcgtcccacgcggaacagacgatcgagccggggacgtatacgttgaacggccggtatgactatcacgcactcatcaacaatatggtagaggccagcccggaccgcgcggtcgtcgaggtcaccatccccgagggctatgaatgcacggacattttcaagctgctggaggccgacggcgtctgctcgtatgatgagctggcgaatgcggcggccacgtatgaatttgactatgcgttcctgcaggatattgcctacggcagcgagaaccggctggagggctatctgttcccggacacgtaccagttctatatgggcgattcgccggaaaacgtcattgataagttcctgcggaactttgacaacaaatttaccagcgatctctacgacgcgctggacgcgctcaatgaccgcctggcagagcagatgcgtacgaacggctttacggaagccgagatcacgaacgcgaagctgtcgctctatgatctcattaccgttgcttcgctcgttgagaaggaaacggcaaagacttctgagagcgcaacgatcgcatccgtg

SEQ ID NO: 1804 - DNA, 1572 bp, Unknown
  Unknown gut bacteria
tcgaccgacaatacgcctgagagcttcatgcgcgcgacggtcggtctcatgaacctgccggagccgccggaggtcatctatgtgaccgacgacagctgcctgccgggcgtgcagcaggcgctgaagatcctgcacgaggacgtgcggcagtggccgcggctcgtgatcctgagcggccagagctggccgggcgcgctgccgggcgagcggacgctgccgctgccgggcaaccagatcggcgagcttgccatttcccatctggtgcaggcgtttgacggcgagctgccgtccggccggacgaacgtgacgatcccggtccgcatgccgccggcgcagaacgaatatcattcgctggccgggcaggggaaaaagatccgcgtcctgctgcagagcagcgcgcagaccagcccgggcctgatcgccatggtgaaggattttacgatcaaaacggggatcgaggtagagtttatcgaaaaaaaatacggcgaagtactcgatacgatcgaaaacagcaacggcgagatcgatgtattcagcacagaccttgtctggacgccggagctgaacgcctgcggtctcgtggagccgctggaggggtatctggcggcggacggcgcgtcgaccggggattttcaggacaatatcctgcgcgaatactgcttctacaagggcaatttgtacgcgatgccgtacagctacacggcgcagatcctgctgtaccggcgcgatttgttcgattcgctgaaaaacaagcgccagtattacgagatctacaaaaaagagctgcgcgtgccgcagacgtggcaggaatacaacgacgtggcgcgctttttcacccgggcctacaatccggagtcggagacccgctacggcacgacgcttggcggcaacgagtataacggcgctgcctgcgagctgctgccgcggatctggggcatggccggcggaagcaccgacggcgactggctgcacccgacgtccgaccggttccgcgaggcgttcaaaaactacgtcgaatgcttcaaatatgcccagccggacgcgctggactgctggtggaacgaggaagagcagctgtttgccagcggcgacgcggctatgatggtcgtcttctccgagcatatcgcgagcctctgggaccgtggaaagaacaagatcgccggcaagatcggccacagtacgatcccgggcgaatattccctgctcggcggctggtccatggcgatccacagcaaaagccggcacaagcaggaggcgtatgagttcgtcaaatggagctgctccggcgaaatggccatgccgaacgccgccatggggcggatcctgccgtacaaggccatccgggaaagcgcggagctgtcgcgctcgtacccgtggctgggcgacgcgttcaacgcgtttgaacacatcggacgcagatacctgccgagcggcaaggatgcggtcaacggacagatgcgcgaactggaacgtatcataggccgcgccgtacgaatggccgtcgctggtggacagaacgtgggcgatgtcctgcaaatcacggaaaaaaatatcaagaacattctcaaataa

SEQ ID NO: 1805 - DNA, 1203 bp, Unknown
  Unknown gut bacteria
atggcagaaatgacgccgagagtaaaaaaacttcaggaaaatctggaaacgatcagcgacgaaggcgtgttttttgaacgggctgtattgctgctggaagcggaacgggcgcatcgcaatgatccgaacgacatcaaatatgtccggtgtctgcagcacctgctggagaacatgacggtggatatccgggacgatgagctgatcgtcggcatgtgccgggaggagatcctcagcccggagcaggagactgcgtttgcgcagatgtgccggcacaataatttcaaagcgacggagctgttcacgttcgacccgctgcagatcattgagatcacagatgaggacgagcggtttgccccggtctggttcaactcttacggacattgtatcccggactgggcgcggcttctggagaagggatttaccggcattcgtgccgaggcgcagcagcggctggaggatccggccctgacgcaggcacagacagcgtttttacaaaatgccgtcgatgcagcagaggcgatgaacgccttcattgcgcgctatgcagaacgggctgcagagctggcaaaggaaaagccggaggacgaacagaaaagactggcggaaattgaatcggtgtgccggcacctcagctgcggcggtgcgggcagcttccgggaagcggtgcagctgatctggttcggcatgttcgttttgcaggtggtctgcggcgcgcgggattacgcatacggcagactggaccagatcctgtatccgtattatgcacaggatgctgcggcaggccggctgacgcgggaacaggccctggagctgatggaatgcctgtttatcaagagcaatgagatcatcggatatgcgtgggagtcgtacaaacccaagcgtgtgctctgcaaaaacagcctgcagtatatccttgtctccggcatgcgggaggatggcagcgacacgacaaatacagtatcgtggatcattctggatgccatttatgagctgaagctgaagcagccgacggtcaatgtccgctatcaccggaacatcgaccgggactttttccgatacgcgtgcaggatcgcggcgagcggtctgggttatcccagctttttcaacgaccatgttgtcgtggaggctctgatggcgaacggtgtttcgcgggcagatgcatatggctatggatattacggctgcaacaacagcttcctgccg

SEQ ID NO: 1806 - DNA, 993 bp, Unknown
  Unknown gut bacteria
atggaaaaaaagccgacgttaaaagatattgcctcgatctgcggatgctctgttaccacggtttcacgtgcgctgcaaaaaagcccgaccatttcggaagcaacacagaagaaaattgcggacatcgccaaagagctgggctatatccccaactcgcttgccatgagcatgcgcaccggatataccaacaccattgcagcctgtattcaggatttccgcaatccgtttttctctgcaatggcaaagtatatcgagagctgcgcccgcaagtttggctatttcgcgctcttctcgacaacgaatgaatctccggatcaggagtatcacgtctgtgagacgcttctgcagaagaacgtcgacgggattcttctcttcccgatccagcaggacacgtccgccgtcgagcttctggtccggcaaaacattccgtttgttctggtcggacggtattttgatgagctggacacagactatgtgctgaccgacgatgcgcagggcgcctaccttgtcacccggcacctgatcgaccgcggcgcacagcggatcctgttcctgaacgtcagttccaccatttcttccgcccgctgccgccgcagcggctacctgcgcgcattggacgaatccggatacacgccccatattcttgaaggctccatggtttatggaaaaacacgggagatcttatattccatccgggacgagctgccgcagtatgacgcaattatgaccttctgcgacatcatgggctttgaagcctacaatgcccttgccaaaatgggctaccggatcccggaagatatcatgctcgccagccttgacggtctgcagcaggatatcgtgcttccgatcgagctgacctgcgccggtaccaatcgccggcttatggcgcagaagtccatggatcttcttctgtccaagatccgtgggaccgcgccggccgaaccacagcatatctgcattgaacaatacctgcttccaggcagtacaacataa

SEQ ID NO: 1807 - DNA, 1821 bp, Unknown
  Unknown gut bacteria
atggctgagatcagagcaacgccgcagcagcaggcggcggcatcgtaccgcggcggcgcgctgcttgtttccgcggccgcaggctccggaaagacgaaggtcctcgttgaccgtctgatgggatatctgaccgacccggatcatccggcggatatcgacgaatttctgatgatcacctatacaaaagcggcggcgtcagagctgcgcggcaaaattgccgcgcggatcgcggagcagctggcggaggagccggataaccgccatctgcagcggcagatgacgcgggtgtatctggcgcagatctccaccgtgcatgctttctgccagacgatcctgcgccagtatgccgtggaagcggagctgccggcagatttccgcgtcgctgacgagcagcaggcagcggctctgcgcgcgcaggttttgcgcgacacgctggcagagcggtatgccgatctgcagcaggagccggactttgccgcgatgatcgatacgctcggctatgggcgcgacgaccggcggctgctcgcactggcggaggagagctacacgatcatgcgctgccaggtcgccccggcggcgtggatgcagagctgcctgcgggcctatgacctcccggaggggacgcagacggaggaaaccgtatggggcggatatttcatgcaggagcggcttcgcgtcctgcaaagcgcgcaggcacttttggagcaggcgctggctctttgtgcaggtgatgaaaagctcgaggcgaaatgccgtccggtgcttcagaagaatctggaggatatccaggcgcagcaggccatgcagacgtgggacgcctgtgcggcgggaaagctcacgagcttcggcaccatgcgcggcgcaggcgacccggatacgcttgcgcggatcaaagcccttcggaagcaggcttgggacagcgtcaaggatatccagagttgcttttatgccgattctgcgcgcgtggtgcaggatcttcgccggacgctgcctgcgctgcgggggcttttgtcgctgcttcgggactttgacgcgcgcttcacgcaggaaaagctgcggcggcatctgctggacttttccgatctggaacaccggatgatccggcttctgacccagcgcggctccggcaagccgacagctgccgcaaggagcatttcggaaacgtaccgcgagatcctgatcgacgagtatcaggactcgaacgccgtgcaggaatgtatttttcaggcggtcagccgcgatggggccaatctttttatggtcggcgacgtcaaacagtccatctatcggttccggctggctgaccctgcaatctttttacggaaatacaatacctatcccatgctgcagagcgtatcggataccggcccgcggaagctgctgctgtcgcagaacttccgctcccgcgccgaggtcctgtctgcggcaaacgacgtcttttcgctcgtgatgaaaaaggaagcgggcgaattggactataccgaggacgaagcgctggtcccaggcctgccgtatccgcaggcggacggaccgaaggtcgagcttcactgcctgaatctgacggattccggagagaatgacggcggaaagaccgaggcagaggccgaatttgttgcatcgcgcatcgcgaagctgctggacgacagcacgatggtcacggagaacggtgcgcttcgcccggcaaaagcatccgatattgtgatcctgatgcggtcacccggcatgagtgcgggcgtctatcaggcagccctgcagcagcgcggcattgcctgcgaggccgggagcggaacagatcttctgcagacggcggaagtcgagatc

SEQ ID NO: 1808 - DNA, 951 bp, Unknown
  Unknown gut bacteria
gacacgccgctcgacgagcagtattatgacgagtccgccggtacgacctgggccgacatgctgaccgagcagggcatgaccacggctgccgaggcctacgccctctatgacgaggccatggccagcggctacacgctctccgagaccgatcagaccaccatcgacacgcaggtctccacgctcggtctgtacgccgccacctacggtaccaccaccgacgcctatatcgccgctgtctacggcacgggctgcaatgagaagaacttccgcgagtatctgaaggtcgtcaccgttgccgagagctacgcacagcaggtccgcagcagcttcacctacagcgatgcggatatcgccgacgagtatgccgccaaccccaacagctatgacagcgtcacttaccgccagttcctcgtctccgaccccatgttccagacctcgtctgaggacgttgaggcaggcgtggctgagctgaccgaggacgagctgaccgcgaagaaggaagagatggcctccaggatggccgaggacgccaaggacaacgagcaggccttcatcgacgcggcctacgacaacgccaaggaatccgacaaggacacctacgcagaggacagcgccacgctgcgcgagggtgcgttctacacctccgttgacagctccatcgccgactggctgttcgacagcgcccgcaccgagggcgacacgacctatatcgtctccgacagcggcgtgtactatgtcctgtactacatctcccgcagcacgaacgagtatcagctgccgaacgtgcgccacatcctgatctccgtcagcgacaccacggatgaggccgcgatggaagaagcccgcaccaaggccgagagcattctgaccgagtatgaggccggcgagcatactgccgacgcattcggcgcactggccaaggaatacactgacgactccaacggcgacgaa

SEQ ID NO: 1809 - DNA, 741 bp, Unknown
  Unknown gut bacteria
atgctgcagaatcaacatttgaacaagcagatccccgttccgctgtatttccagctggagcagcttctgcgtgatgagatcgagaccggggcctatccgcccggcagcctcattccaacggaaaaagaactgatcgagcatttcggtgtcagccggacgaccgtccggcaggccattcacgatctggtgcaggagggacttctgtaccgcacgaagagcaagggcacgttcgtcgccctgcccaaggtcagccagcactttatccacagcttcctgccgtatcaggatgatgtccgcaacaacggcgccacaccggccacagacgtgctcgatctgcgcgtcacaacgcttccggtcgagctgagcgcggaggcggcggggctcgggacctctgtgatctacctttaccgcaagcgctacgtcgacggcgagccgttcgtccgcgtcaagacatatctgccgtatacggcctgccgctttctgctgcagcacgatctgtcgagcgaatcgctctatgagctgctcagccagcacagcgagacaaagccgacccgcatcgtccgcagctgcgagatccagtccgccgatcaggaggacgcgcggatcctcggcgtcaagcgcggccagccgattcactactttatcacgaagagctacaacggcgacggaaagctgatcgagtattccatcgcccgatatcgcggcgaccgcagccggttcctggttgagatcacgcggtga

SEQ ID NO: 1810 - DNA, 1008 bp, Unknown
  Unknown gut bacteria
ctgctgaacatcgtcaatcagctgcgggaagagggcatctcgatcctgtatatttcccataaactcgaagaaatccttaccatcgccgataccatcaccgtcctgcgtgacggccagcatatcgcgacggagccggccgccggcatgaccgaacagcatatggtcagtctgatggtcggccgtgaatacgaaggctcacataaaagaaatttcgttaccgattactccggcaaaacgccgatcctctctgtccggaacctctatgatatggcaggcaaggtcaagaacgtgtccttcgacctgtatccgggcgaagtccttggcctgacgggccttgtcggcgcgggccgcagcgagacgctgcagtgtatcttcggcgccaacatgcgcaagagcggccagatcttcatcaacggtgaagaagtcaacatcaaaaactgtgatgacgccatcaagcacggcatcggcatgatccccgagggtagaaagatccagggcctgttcctgaagatgactgtccgtgaaaatatcctgctggtctatcagcgctgcatggccaagggcggcattctgaacaccaagaagctgctgggcgatgcggaggaatactccaagaagctgaatgtcaagaccgcatccatcgacgcgcccatcaccagcctctccggcggcaaccagcagaagaccatcattgcccgctggctgatgaacaagcctaccatccttttcatggacgagccgacccatggcatcgacatcggcgcgaagaacgagatctacaagctgatcgacgatctgacaaagcaggggctttccatcgtgcttatttcctcggaaatgccggaggtcctgtccctgtgcgacagaatcatctttatgcaccatggctataagcgcggcgaactgaataacgccgacgccagccaggagaagctcatgtccttcacgcttgacagcgcgatgacagaggacgagaagaaagaacgcgccatgagcgacgcaggctga

SEQ ID NO: 1811 - DNA, 900 bp, Unknown
  Unknown gut bacteria
tttatccgcccgatgctgccgtgcagccgcgcggaaattgaagggtatctcgaagaaaacggactttcctatgtgaccgacagcagcaatctcctgccggacgtccggcgcaaccggctgcggcagcgcgtgatcccgcttctgaaggaggaaaatccctctcttggtgaaacagccttccgtatgtgccggatccttgcgcaggatgatgcgtacctgcagcagcaggccgcgcaggcactgcaggcctccctcctgccggacggagtgtgctgcagcgtactccgtgaatatccggatgccgtgcgcacccgcgccgtgcggatgctcctgtcagaggttcatgctcccaagctgtcacagacgcacattgaagcagtcgaccggctgatatttgcggaaagcccgtctgcctttgtctgcctgccgggtgggtatacagcccgacgggattatgaccgcctgtatttaagcggcgaagctcccgcttccggctttgcccccgttcagctgctgatcggacgatcgtgcgtcctgccggacgcaggcatccgcgtcagctgccggatcgaagaaaattttaccgaaatccgaaataccctctccacatttgccgtaaagtatgatacgatagattatcattccgggatcaccatccgtccccggcagacgcaggacagcatgcgcgtccgcggcggcagaaagacgctcaagcgtctgatgatcgaccgcaagattcccgctgtgcgccgtgcgtccgtgccggtcgcgtgcgatgcgcgcggtgttctcggcgtgtatgggattggcgtcaatcttgaccgcgcggccaccgcaggtgaacgcgccgtcattatcacaatcgaagaaatagagaaagaggaccagaggtatgattaa

SEQ ID NO: 1812 - DNA, 2310 bp, Unknown
  Unknown gut bacteria
gctgtcctgacctggtataaatacggaagcactgcgagtaccattgcctgctcgccggatgacagcgtgggaaaaaaggtcctgacctcccagctggaagacggcagattccactacgagatcgcccttgccggtcccgagcggatgaacgccgtgatagatgaaatgatcctgacgaagtccggcagggaagagcagatctccgacaccggcagcgtcaccatgcagaccgcggacggcgcgccgcagcgctatatcttcgaggcctacgcgaccgtgacccgtaccgacgagaccggcgagacccgccagcttgaaacgagcttcaccttcgtcatcagctacgaggacggccttgacctgagccttgacctcagctggctgcgaaacggcacggccagcacgctgaccgcctccgccgacggctccgcccgccagacgatccgcagcagcgagctggaagacggcgcgttccgctacaccttcgccctgaccggcctgagcgcgcagaatgcgtcgatcgaatctgcgacctatacctcggcgcacggcaccgccggtacgctcgacaaagcgggcggcacactcacgctcaccgtccccgacggcagcgaatccgaacgttatacgctgaaagcgaccgccgaggtcaatgagggtggcgaaaagcgcatcgtgagctttacgttctaccttgattaccagagcgacgaggatctttccctcgagctgacttggtaccgcagcggcgtcaccgccgagaagatcacctgtgccaaaaacggacgcgccgccgccaaggtcaagcagaatcagctcatcaacggtctgttccagtactatctcgccctgaccggcgagagcgcggcgcaggcacagctgacctccgcccagctgaccggccccggcgtcagtcagcgcatggaggaaagcggcagcgcggtctttaccatcccgtccggcgcaggcgcggcgacctataccattcaggccaccgccacactgtcctccggcaagaccgtcaccttcaccgtgaccatcacctattccagcgacgtcagtgccgagctgcgctatacgacgctgcagaacggcgcgcggacggagcagtccgtcacctgtgaaaacggccgcacggccgtgccggagatcatcttctccgaccagctgaccgacgcggagcttccgttcacctttgccatttccggcgaggacgcctccggcgtcacgctcgacaccctgaccctcttccagagcggaagcggcaagctcaagacgctcgccagctccatcggcgcttcgtcctattccggctccgtgcagctgctcgacaacggcggccgcgccggggagaaccagttcaagctgaccgccacagacaccgacggcggcagctataccttcaccttcctcgtgcgctatcagaagcgcggcgataagaaggtcgagatcaaaatcaatctcacagacgggcaggagatcccgaacgaatccccggtgcccctgaccgtccgcgcgtggagcgaggacgacgacggcaccgtcatcagcaacattctcgccaccggcaccgattccgagctgaccgtcacgcttgacggcactgtcctcaactataccggcgccagcggttatacacaggaatacgaaatttacgcaaaaaaccccgtcgagggcgacgaaaacacccataccctcaaaatttacgcccgcgacgtctacggcaacgagggcacgtatgagatcaccctcaagggcaagcgcagcgaagacggcaaggagaccggcgcgaccgtgcaggtcagcgtcgacctgaccgtcctcggcctcggcgtctatggccctgtcagctatcccgtgcgcgtcggcgaacctgtctcctacgtcatcgccaagaccgtctgggggcaggacattgacgacaccttcggcggcgcggccgaccagacgctcggcttcgatcccggcagctgcagctattcgggcacgctggacagcggcttctatctgcggacgctcggcggaagcattctggacacgccgacctacttcccgcagccgggcaacgcgtccacgacagatgagatccttgccgcgatcgacgattatttcggcgccgataccgcgttcagttcgctctggcgctgcatcgtccgcaataacatccagatcaatgcgcccggcggcagcagcatcggtgagttcgatttcacgcagggctccggctggctgtacgccatcgacggcaccgaatacccgaaccgcggcatgagcgagcgatacctgagcgatctggagggcgattcccac

SEQ ID NO: 1813 - DNA, 1968 bp, Unknown
  Unknown gut bacteria
gtgaccatcaagggacagggcgaaacgaccattacggtcactccgcttgcagcaggtatcgaggctaaaacctgcaaaatcaacgtttccaacgagacgatcacgatcgacagcattacatacagcgacagcacgatcaacgagctggaaacaaaggagctgaagttcagcagcacggctgtcacgaactatactgtcgacagcatcggccttgttgcgaacctcagtgatccggccggtgaatcggatgtcgaatggtcgatcaacaagccgagcttcgcaaagttcgacggtacctccagcacggccaagggcagcacagctacgctgaatgccctgtatccgggcgaggtcaaggtcaccgcgacgatcaccaacgcaaacggcaagaaagactccaagagcatgactatccagatctggacggccaaggcctataacaagcaggtcgttccgtccccggtcttcacggccagcacggcgctgaaggtcgtacagcagctcgcaggcgagactgcggtgatcacgcttgaaagcaccggcagaaccgaggatcgtccgcttaagaacatcaagtctgtcacgaccggcggccagctgcagatcaccggcgagatcaatggcattgatgacaaaaacttcatcgtttattatccgaagactcccgcgaccggcaagttcacgctcaagagcgcaagcgcgagcggtatcgagttctacacgcagcccgcttccgcgacctataaggtcaacgccgacttcacaggcgagaacctgtatgtcgatgtcggcacgacgcagtccggctacacgctttccagcgtgaagtggtacaacgcggctgacaccaccaccaccctgcagtcggagaactgcggctccaacgtgaccagaacgacctccacgctcagcctgaagacgctggtcgacaagggcttcatcaccggccccggcgactacaccttccagtgccttgtcacggccacgagcgggacccagactgtgaccggcatcagcaacgtggcgaccatcaccatcagcggcgactacttcgttgagatcaccgcggccaagaccgaggtcagtgtcggcgataccttcacggtctccggcgtggcccagacctataacccgtcctccaagaagtatgtcgacgtctccgcagcgcacaacctcacctggacgctgagcgattcctcgctcgctaccctcagcaagaccacctccgccaagggcgcgaccatcaacgtcacggccacggccggcggcaagctcgtcctgacggccaagaccaccatcaacggcaaggactatgagggcaccaagaccatcaccatctcgaccccgaaggcggacgacgtccgcgtgacgctgggcgatgacgatacctacgtcatgctcgacggcagcaagatctccgacgcagtcaaggcggcgaccaagtccacacccagtaccttcatgttcaagcagccgtcctacggcacggtctatacctcgagcagcctctccagcgccatcagcacgaccacgaagtattccgcttccgaggtcagcaagatggccttcaagccgacccggaccgccggcagctacacgatcgagtacaccgcttacgtctccaacggcgagcttgccaccggcaagatcatcgtcatgaccagcagcggtactgtgacctatcacatctccgccaacgaagcgcaggccatgcaggagagcgatttccgcaacatctactccggcacgctgaagtctgtccgcttcggctccaccggcgattcccgcggctccctctataagggcagcacgaccggctccggcaagattgacaccacgacgtcctacttcatttccagtcaggcgtccacgggcgcgagcctgctgtcgaacgtcaacttcatcgccggctccagcgcgtccaagtactccgtgaccatcccgttcacggcctccggtacggccggc

SEQ ID NO: 1814 - DNA, 468 bp, Unknown
  Unknown gut bacteria
atggaacaaaaagcaaagactgccgcaaagggcggcggacttaagaaactgctgaagcagcaggaagttatcgtaattttactgatcattctggtgtcgattttcctttcaatcagacgcccggattccttcccgacatcgctgaacatcttcaacgtcctgaagcaggcgtctcagtacgcggtcctcgccattggtatgggcttcgtcatcatctgcggcaacatcgatatctccgttggcgccatcatcgccaccagcatctgcacggcagcctatgtcaatgagaagctgggcgtgatcaaccctctgttcgtgctgctcatcatcttcgcggtcggcgcactgttcggcctcatcaacggtcttctggtcgcaaaggctggcctgccggccttcatcgccacgatgggcatgctgagtgtcggcgacggcatttcgctgcttctgtccaacggcacgccgatc

SEQ ID NO: 1815 - DNA, 1278 bp, Unknown
  Unknown gut bacteria
ttgatcctgctgacaggcaccctgcttgtccgcgcagagggggagcggttttccgatgtcccgtatgacagctggttttatgaggatgtgatggcgctgacagactccggcgtcatcggcggctatcccgacgggacctaccgtccgtccaaaaatgtcaccaccggcgaagcactcaagatgatcctgctggcgtccggctatcccgagccggagcaggtctcgtctcactgggcaagaggatatctgaattttgccatcgatcagggctttctgacgcgctatgaggatatttccgatctggacgttcccatgacgcgcggccttgtcgccaagctggcggccaacgcccttggcctgacaacggacggcgtgaccggtacgtttaccgataccgacagcagctacgtcgaggcgctttacgccgccgggatcgtcggcggttatccggatgggacgttccgtcccggcgcgtctgtgacgcgcgcggagatcgccgccatcgtacatagaatttataacagccgcgagccggtgcagccggtcgacccggatatcacaccggaggagatccatctccgcaccagcgagcagctgatcgccctgctcaagcagaaggagggcttccgcgccacggcctactgggactatgcccagtattccatcggctacggcagcgcctgcacgaaggacgaataccccaacggcatcaccgaggcgcaggccgatatcctgctgcgcaaaatgctgcagaagtttgagacctcgctggacaaattcctgcaggacagcaatctgaccctgacggacaaccagtatgacgcgctcatcagcctgacctacaacatcggcgccggctggatgaaggacacgcgcctgtcgaagctcctgcagtccggcaattacacgaataacgagatcgcctctgccatcggcatctggtgccacgtcaaggaaaacggcgtgaccagcatccataacggccttgtctcccgccgcatcgcggagattaacgtcttcctctacggcgattattccggctccgacagcggcttctgctgggtgaaattcacctccgacaagggcagctgcgagcgcgatatcgcgttctatgagaccggcagtacctgcgatccgttcttcaccgcggaatgcgacgacggcgacgtatttgccggctggtacacttcggacggcgaggagctgaccgcggacatgaccgtctggcagaacctgaccgtcacggcccgctggcagagcgaagagttctggtattaa

SEQ ID NO: 1816 - DNA, 1188 bp, Unknown
  Unknown gut bacteria
atgaaaacaaaacagaagcgcatacagcttcccgtgatcatctgcttcttcggcttctttctcgcctgcctcgtctgggggcttctgcagcccgaccgggcaaaaagcgaggcggagaaccgtccgctcacccagcgcccggccatgcgccggatcgttacggatttttccggcttcgcccgcgcgttcgattcctatgccgccgaccagttcccaggccgcgagcagcgcatccgggattataccgttctggagctggcacagggcaagaagctcgcgcgcaaggcctactgcctgaatggctggctgtttacgaagcttggtcataccaacccggagcagatggacgagctgcaggcggctctgagcaccgccgcggataccggcctcccgctggtctactgcgccgtgccgctcaaaaacgaagtcctgcacgatatcgacccgtcctacttctccgatgaggtgggcgcggaaaacaaagaagcgctctttgccatgttggctggtgtggaccgtctgaccgccattgacgcgtctgctccgctgctggccgggtctttggccgagcgcgagcagctgttttacaaaacggacttccactggaacgcccgcggcgcctttgccgcttcgcaggagatcgcgcggcagctggccgcctccggtctgatcgatgccgcatccatcccgcaggcggacgcgttcgtctggtcggagcttggcacggaaaagcagtatcaaggcgatctcaacagctggttctccgatcttctgcccatgcaggaggccattccacgcttcgtcccggcggacaccgcttctctttcctactatgacagctccggcagcacggagcctgtcccgcgcgaaacgatcatcggcagcgggctggataaggaccccgtcacctacaacgacgtcttcacctacaatctcggctattaccgcgtggaaaaccccaatgcgccggaggccagatccgtcctgctcctcaaggattccttccagaatgcgacgaccgactatttctcggcgatcttccgcgagatccacgtcattgacccgcgcgcgtaccgtgaaacgccgggcctttccggttttctggcagaaaacgatgtggacctgatcctgtttttctaccaccagaacaacgtcagcccggagctgaccgcatttctgacgcaatga

SEQ ID NO: 1817 - DNA, 1359 bp, Unknown
  Unknown gut bacteria
atgactcgtctggatcgatttttccacctcacagagagaaagacaaatgtaaaaaccgagatcatagcaggtctgacgaccttcctgtcctgcgtcagcatcgtcgtgctgaatccgagcattctgggcgcggctggtatggacacccgcgcgctgttctgggcaacggccatttcctgcgccattgcctgcatctggatcggcctgtggggcaatttcccgtttgcgctgggaccggccatgggcctgaacagcttcttcgcgttcagcgtggtgctgggcatgggcgtctcgtggcagaacgcattggcctgcgtgtttacctccggctgcatcttcatgctgctgagcgttttccacgtacagcagaagatcgttgacgccgtacccgactgcgtcaaaaagagcgtcggcgcgggcgtcggcatgttcattgccttcagcggcttccagtccgccggtatcgtcgccaaaagcgacagtacgctggtcaccatcggcgagcttggcaatcccggcaccattctggcgctcatcggccttgtcgtgacgctggtgctggtcatcaagggcgtcaagggcggcatcctgatcggcatcgcactggtgactgtcgccggtatcttcgtcaaaaatcccgccacgggcgaagcgtacacggtcctgccgtcagcgcttgtctcgctggataacccggtggaggcgctcgcgccgacattcggcaagctgacctaccgcggcatgttcagcggcgatttctctcaggtagccggcatgatcttctgtatcatcagcttcctgtttgtcgacctgttcgacagcatcggcgttttcctcggcgtcgcgccgaaggccgggcttgttgacgagcagggcaagacacccggcgcaggcaaggcactgttcgtctcggccggtgcggccgcggtcggcgcgatcttcggcaccagcaccgttacgatctacggcgcagagagcgggaccggcattgccgcgggcggccgcacaggtctgacggcctgcacgacgggcgttctgttcctgctgacgctgatctttgcaccgctgtttctgatgatcccgaccattgcaacggccccggcgctgatcattgtcggtattttcatgatcggacagctcagctcgctggatctgtcggatctgacggtggcgatcccggcctttatggcggtggcgaccatgccgttcacgttcaacatcgcctatggcgtgctgttttccatgctgagctatgcgctgtgcatggcagcgtccggcagacggaaggagctttcgccgacgatgctggtcctgaccggcgtgttccttgcatatttcgttctggactgcattttctga

SEQ ID NO: 1818 - DNA, 1638 bp, Unknown
  Unknown gut bacteria
gccaccgacacggataccatcgcctacagcagcaataagaccgccgttgcgaccgtcaacagcagcaccggctccgtgaccggcgtcgccgccggtacggcgacgatctccgccgtcgtgaccaacgccaagggcgtggagatcacggacgcagccaagtcctacagcgttgaggttgccgacgcatacaagattgtcctcaagacgccctccggcgcaatgactgccggcacggctaccgatatctccgcaacagtctatcagtacgacgccgagaacggctataccgcctacaagcagaacgtcacgatcacctggcaggcctaccgcgacggcatcgccgcgtttgacggtgagacgaagagcaaggccgtcaccaccacgacccgcaccggctcgtcctctgtgacgctctatacgtattcgaccggtacctccaagacctccgtctccgtcccgctgacggtctccgtcgtcatcggcggcacgacctatacggcggccgacgcctccgttgaggtctccccggcagaagccgcttccttctccgtgcaggaggatacggcctttgacgaggacgatttctccaacgccgttgacgcagccaccggccgctacgccggcaagctcgccgccatcagcatttccgataccaccggcggctccgtctatgacggcaacggccgcgtctcgaccggcacgaagtactatatctccggctcgagaagctatctgatctcgaacctctccttcaagacgtccacgagcagcagctcgtcctcgccgtatttcctctatgtcggctatgacacagacggcaacatcatcgcgaccggcaaggtcactgtcggcagccagagcgtcgatatggaatacgcagccagcttcggcggcagcgtcacggtcgacgaggccgatttcagcaaggccttctccaagtacgcgcgctccaacgaaaagctggactacgtcacgttcgcgctccgcaatgctgtggtcgtgatgaacaataagacctacaatctgaacgacagcaacaacgacaccgtcttcggctgggcctatcccacgcgcaccagctcctccaggctgtccgcaacggacaagtgctattatcaggccagcctctcgcagatcgatctggacgccgtcacctatgtgaccggcacgtatacgaccaaatacacggtctatatcccctacaccgctgtcggtacctccggcacgcgctatgagggctacaccgccgtcaccgtcagcaacgacgacaccatgacgggcgtcggcgcttcgctcaagtccacgaacgccgccgagcagatcctcgccgcctatcccaacgccgcctacgtgatgttcacgcagcccgcggccagcgagggacagctgctttacagcttccgcagcatcgtcaatgcgaactacgagaccatccgcttctcctcggacaagttctacctgaacagcagcagctccaaggatctgcatctggacagcgtctacttcctgcccgcggcggactgcgcttcgcagatcaagctctccatgaccgtctacaattcgtccgacagcaagctcggctccgcagagctgacgctccgcgtctcgacgaagaccgcttcgtccgtgttctcggac

SEQ ID NO: 1819 - DNA, 1047 bp, Unknown
  Unknown gut bacteria
atgaagctttatggcaaggaactgaccaagcgcgagctgctgcagtatgtcggcgacgtttcgcagatcgcagacgcgcgcgagggcgttatgacggccggtaagtccgacggtgtacgcaccatcgacgtcaagaccggcagcggtctggaatttacggtcctgccgacccgcggcatggacatttcgtgggccagctatcagggcaaggcactgagctttgtcagcaaggccggtgtcggccatccggcgtacttcgaaaaggacggcttcggcttcctgcggaacttcttctgcggcctgcttacgacctgcggcctgacctatttcggcgcgccctgcgtggataacggcgaagagcttggcctgcacggccgcatcagcaacatcccggccaaggacgtctgcgtcgagaaattctgggacggcgacgactatatcatccgtatccgcggccaggtggtcgagagcagcatgttccatgagaacctcgtcctgaaccgcaccatcgagacgaagatgggttcccgcagcgtcaaaattaccgaccacattgaaaacatgggctttgacgagcagccgttcatgctgctctaccactgcaacttcggctatccgatcgtctcggagaacaccgttctcatcgagccggacggcgtcaaggtcgttgcgcgcgacgccgaaggcgacgtgccgacgcatgccgagttccagaagccgacgcacgactataacgaacaggtcttctaccacgatatcccgaaggtgcagggcgacgagtcgttcgccagtctctacaatcaggagctgaagctcggcacctacgtcaagttcaaccgcagccagttctcgaagttcggccagtggaagatgatgggcgagggcgactatgtggtcggtctggagcctgccaacgccatccccgagggccgcgacgtcgtcagaaagcgcggcgaactggaaatgatccagccgggcgaggtccggacgtttgagtttgagatcggcgtgatcgataccccggaggatctgaagcatattttctga

SEQ ID NO: 1820 - DNA, 1890 bp, Unknown
  Unknown gut bacteria
ggcagctcggatgagacgatctcggagctcatccagctcgacgcgcatggaacgctgctgcggaccatcacgccggtctcggacgatgcatccgacaattccgatggctggtactacaccatcagcgatattttctccgatgacaagggctatgtctacacctacgattatcagaccctcaacgtctacggccctgacggaacgtttatctgcggcaaaacgggcgacgagctgaacggtcaggtatgccagctttctgccagcgaggtcggcatgaccagtgtttcggcggatgataagagcgtgttcagacagctcgaccctgagacaaaggattggggcagggaaacgccggtctcttccgacgcatgggacctcttccccggtaacgatgtgtacgcctatttctacacgagaaacggcagcatctacggcgagcggaaggacaccggtaagacggagaaggtcgtcgactggatgagctgcgacatcgacagcagcttcatcggcagtgatagcattgcattcttgtctgacggccgcattgccgcagtcctgtcggactacaaccgtcaggacggctccagacagcagcaggtcgttgtgctgacgcgggtggacgcatccagcgtcaagcagaagaccgagctgacgctggcctgctttggtctggactacaatctgcgcagccagatcgtcaagttcaacaaaaataacagcgactaccgcattgtggtgaaggactattcggagcttgccacggaggacgattacacggcaggtttgacgaagctcaataccgagatcatttccggcaatgtgccggatctgatcatgaccaaccagctgccggtcgcccagtatgcggccaaggggctgctggaggatctgtggagctatattgacgccgatccggaatattcgcgcgacgcgctcatgctccagccgatcaatgcggcgcagacggacggccacctctatcagatgccgatcgactttggcgttgtgaccgcgatcggcctgaacaagatcgtcggcggctacacgagctggacgctggcggacgtcaatgacgccctttccaagctgcccgagggcgcgactgtgttcaacaagtattatacgcaggccgaaatgctgcagcattgcgtggcgatgaacgcgtccaacttcatgaactggcaggacggcacctgcaattttgactcggacgagttccgcgctcttctcgagtttgtcaagccgctgccggcggattacaactggcagtcggacgatgaggactatgagagcgactattcccgcgttcgcgacggcaagcagctgcttttcccgacctcgatctctgattttgacaatctctattatacctttgcttctctcaacaacgacgtggccttcatcggcttcccgcgcgaggacggcagcagcggcaactgctttatctcgcaggtctcgatggcaatcacaacggcctgcaaggacaagagcgcggcatggtcgttcatccgctctgcgctgtcggacgactatcagacgaatatgtggtcgttcccgatcgtgaaatcggcctttgaggcgcaggcggccaaggcaatggagcaggagtatgagacagacgccaacggcaatcaggtgctggatgagaacggcaatcccattcccatctcgaccggcggcatgagctacggcaacgagccgatgatcgagctgtacgccgtcacgcaggagcagtatgatgctgtcatggatgtcatcaactcgacaaccagctatctggactacgatttgaacgtgctggacacgatctcgcaggaggctgcggcctacttctccggcgataagacggtggaagaggtctccaagctcatccagaaccgcgtcagcctg

SEQ ID NO: 1821 - DNA, 1266 bp, Unknown
  Unknown gut bacteria
gactacaacgacgtcacacaggcgacatttcccatgctgcagatggactttatccatctggcaacgaccctgtcccagtctgtgaacctttaccgcatggacggtaattacaacattgagcttgtcgtgggtgacgccaccaagaccttcccggacggctccctttccggcttggagagcggctataccggcaaaaacggctatggcagccgcatcaatcagtacacctccatgacccagatctgggatgaggacaagaccgacgacaacgacggcgtgatgctgctgggtacattggacgatggctcccttctccgtccactggtgcagatcacaaatggcgatgtgctcaagatggataaggaggaatgggttgagaagatcaactacctcaaggttcttattcagttactgctggaaagagatctcacatccagcggcagccatacaacttccgctgcccttaacgaagacgcggatgcagcaagcagcgccgtggccgctcccaatgcattgacggaagaagcgcttgtccagcaggcactcagcgccgcaaatacttacgaacaggtgtccggtgcggaagccgcctccgtcttcgaggaaaatagcgctggcagcgtaccaagcacctctgagacggttacgcttacagctgaacagactgcttctttgattgcagacatcaaaaatggcacgattcagccgcactccatgccctcggaacacgctacagaagtcctctctctgccctatggcatgggtgaactcacagatctggtggacgccaatggtcaggaaaagattgacgagttctccgctctttataaagagattgtcgagtattacctggcgctcaaggagcagggcgatgtcgtcttcccggaacctctccagaaggtgcttgatcagctccttaccgaggaaaacgccagacagctcaaggcgcttttgacctgcctgaatgctgtgaaggactccgtcattggctgtgatacctatgcgatcaccactgccgctgacggcagcaacatcaagatcgataccattacgcttgatggtctcggcgataattccaaccagacgatgcgcaatttcgccctcacggatgattatgtcgtcttcattcccggcaatgccatccgcggcggttccgtttaccgtctggcagactggcccggcaagacggatcccacgcccgatcccgaacctgacaaatacgaggtcacgctccgcaatgcaggcgacggcgcgaccggcgcaggc

SEQ ID NO: 1822 - DNA, 822 bp, Unknown
  Unknown gut bacteria
atgggtaagaagatcatcgcatgggatctcggcacgggcggaaacaaagcatccctttatgacgcagagggacattgcctggcgtccgatttccattcctataacacgacctatccgaaccacggctggcacgagcagaagccgtctgactggtggaacgccgtcgtggagagcacgcagcggctgatgcagaagaccggcgtcgataaggacgacatcgtcgcgtgcggcatttccggccacagcctcggcgcagtgccgatcggcaagaatggcgagctgcttcgccagagtacgccgatctggtccgacggccgcgcggaaaagcagtcggcggagtttttcagccactatgacgagacccgctggtataacctgaccggcaacggcttcaccgccgccttctataccgcattcaagatcatgtggtaccgtgacaacgagcctgagatgtacaggcagatcgacaaggtcatcggcaccaaggactatatcaactacctgctgaccggcagactctgcaccgatccgtcgtatgcctccggctgcggcgtgtgggatctgcgcagatggtgctacagcgacgaactgatcgaagccatgcagctgccgcgcgagatcttcccggaggtcgttccctccacgcaggtcatcggcaccatcaagcccgagatcgcacagaagctcggcctcggctccaacgtcgcggtcgttgccggcggcgtcgacaactcctgcatggcgctgggcgccaaggcctataagaacggccgcgtctataactccctcggctcctcctcgtggatcgcggtctcgtccgac

SEQ ID NO: 1823 - DNA, 645 bp, Unknown
  Unknown gut bacteria
atgaagcacaatgacggccacagcatctccatgacaaacgccgtattggaggcactgcgaaacgatatcaataactgcatctatgaaagcggtcagttcgttactgaggctgagatctcgcagaagttcaatgtcagcaaaacgcctgcccgggaagcgctgaattacctctgtcaggagggtctgctggataagatcccgcgtaagggctacattgtcaaaagcctgtctctggcagaggtacagaatctgttccagttccgcaacattcttgaacgagcctctgtggagttagctgtccgttacgcatctgagcaggagctgcagaccctttccgaactggcacgtgccaagctggatcccgccgcggaagatattgcacgccaatatcacgatctgaataataattttcatatatcggtggcaaaattgtcgcgcaatccgtatctgatcaacgcgctgcaaaacgtattgaatcttttgcgccgcgacctgtttacggatatgcgccggaacagccttgagaaggcgcttgaggcacatgtgttagtggcgcaggccatgatagaccgtgatctggaacgtgcactgcgcatcacgacagatcagatcgatgttgtggaacggcgtttatgtattcgatga

SEQ ID NO: 1824 - DNA, 945 bp, Unknown
  Unknown gut bacteria
atgaaagaacaattggaagcctatgtgaacaggctttttgccgacgcggcgctgaccatccgcaatgcggaggtacggcaggagattttgcagcacgcgctcgaccgctatgacgatctgattgcgtccggcaaaacggagcaggaagcatatgacgagacagtaagcggcatcggagacgtctccggcctgtatgagcacaagaaagccgcacaggatcgcccggcggcagatccgccgtccggcaaagcgcagaagaagcgggacttccctgctccgcccgcagcgtccgaggtcttttcctcgtcggatgcaccgaagcagaaaaagcggcttcccggctgggcgatcgcgctcatctgtgcgggcgcggtgctgctggtgctgctcacgctgagttttgccgcgggacatgcggtctggaaccagctttcggctggcagctacacctatgaccacgccggagactatgagatcgcggagcgcgacggcttcggcgaaacgcaggcggctctgtcgtccagcagcttcgctgacgtcaccgaggtcgagatccactggctgtccggcagcgtgtatctggcggagtcggacgaggacggcatcctcctgcaggaggattacaccggcgacaacgacgattaccgcatgcgctacactgtgaacggcagcaggctcatcatccagccgtgcaggtcgaagcttttcggcagtgtggatctcccggagaagacgctgacggtctttttgccggaaatgctgaaggagatctcggtcgaaacggtctcggcagacgtcgaactgatgggcggagctgccggtacgctcagcgtcagcacgacgagcggcaatatcctcggccccggcctgcaggtgaaggagctggagcttggcaccgtcagcggcgatatccggctgtcgcagtaccccgcaggctgccgcaca

SEQ ID NO: 1825 - DNA, 1485 bp, Unknown
  Unknown gut bacteria
gtgccgggcaacactgcaatagcaaaggaacgtgaaattctcatgaaattcattacatatgatctgggtaccggcggcgtcaaggcggcgctgtatgacgaggccatgcagacgctcgccaagtcgttcatcgagtatcccacctcctaccccgcaccgggctggcatgagcagaagccctctgactggtggaacggcgtcgtggaaagcacgcgtgttctgctgcagaaggtctcggtcgacgcatccgagatcggctgcctcgcgctctccggccacagctgcgtggccgtcccgctggacgattctctggagccgctgacggataccgtccccatctggtccgacacccgtgcgggcgagcagatccgggcatttttccggaacgtcgacgaaaaggactggtacatgaagaccggcaacggcttccccgccgcctgctatgccctgttcaagctgatgtggctcaaggagacctcgccggagctgtttgcaaagatccgctgcgtggtcggctccaaggactacatcaacctccgtctgaccggccgcgccgcgaccgatccgtcctacgcctcctcgagcggcgcatatgacctcgtcaggcacgaaatgtgcgccgagctgcttagcgccgccggcatccccgtctccatctggccggagatcctgccgtcccatgcgatcgtcggcacgatcacggaaaaagctgccgccgagatcggcctgaaggccggcacagccgtcgcctgcggcggcgttgacaacgcctgcatggccatgggcgccgtcggcgcgcaggagggcgcattctatacctccctcggctcttcaagctggatccccatgaactcgcgtacgcccgttctggatttcgagacaaagccctacgtctttgcccatatcgaggacggcatgtacacctccgcctattcgatcttcgcgggcggcagctcgtaccactgggtgcgcgatacgctctgcaaggatctgcagggcgatgacgcctatcgcaagatggacgagctggcggccagctcccccatcggcgcaaacggcgtgttcttcaaccccagccttgccggcggcacctcgcaggacaagagcctcaatgttcacggcgcgttcctcaacctgcagctcggcacgacccgcgaggatctgatccgcgccgcgctggagggcatcacgctgaacctcaagacctcgtatgacctgcttgcgcgctacgccgagccgtctgatcatctgctcatctgcggcggcggcagcaagagccgcttctggatgcagctgttcgccgatatcttcggcacaacgactatcaagaccaacatcgatcaggatgccgcctccatgggcgccgccgccatctgcgcccgcgccaccggcctgtggagcaactacgacaagctcccctctctgcaccaccccgaggtcgtctgcaagccggatcccgagacccacgccgcctacgcccgcctc

SEQ ID NO: 1826 - DNA, 1023 bp, Unknown
  Unknown gut bacteria
gcatgggaatgcgggccgaagctgctggaatatgcgctgaacagcggcgcatgtatggctacgggccgggtacagggtgttattacgccgccggtgtaccagctgcggtccatggacgatatcctgcaggcgctccgtctgcagatccgggactgcatccgcaggaccaaggcacacgtggagcggtcggatgcgtattggcaggagctgaaaccgttcagctttgagtcgattttgatgacggactgcatccgcaaggcttcaagcatgaatgcggacggatcccgacagcggcatatcaactgccattttgtcggaattgcgacgctggccaattccctgtatgcgatcgaccgtctggtgttccgggagcggagatttacgctgccagagctgacagagctgctgaaaagcaattgggaaggcgaagagtacatacagacctacatccgggagcagtatccgaaattcggcaacgacgatgatgccgtcgaccgctatgcagagaaagtcgggcagatatatgtggaagaggtcatggcggcgtcgccgacagcaggcggccggaagctgtacccgagcttctattccctctggcatcaccgggcgtttggaaaggtctgcgctgcctcggccgatgggcggagcgcgggtgaagcgatcagtgaaagccagtctccggtctacggaaccgaagccaacggcccgacggccatgttcaacagtgtcgcgaagcttccgtttacgaagacaccgagcggcggtatcaatgtcaagttccagccgcgtgcgttccatggggaaaacgggtatctgaatctggctgcgatcctggagggctatttccggaagggcggtatgcatacgcaggtcaacgttgtagacagaaagacgctggaggatgcggtcgcacatcctgagaagtaccggaatctgcttgtccgggtggtcggatacagtgcgtatttcgtttcgctctctccggagcagcagcaggaaatgatcgaccggacggaagtgtga

SEQ ID NO: 1827 - DNA, 1683 bp, Unknown
  Unknown gut bacteria
acgcgcacggagccggagggggcaggctacggctcgatcctcctgccgcatgccggaggagctgtgctggtcggcgaaacgttcacgcaggaggaaacggagacggttagaagcagctctgcagttcggtattcgcaggacagaacaagcacggtacaggcattacccgtctcggcagatgggatcctcgtccgtgccgcgctggaggatgaccagcttctgtatctcgagcagacaggtgatgaacagtggatcttgcacaacggagatgcggaagcgtctctcgacgatgtgctgaccggctgctcgtatatcagcgcaatggccgtccggaacgacgccgtctattttgctgcggatgctgcatggatgattgcctgcaaaccggacgggaaacttctctggaagcaggcagcgccggagatcaacagcttttttgccgcgcaggacgggcgtctgctggcgtgggccagacaggagcaggcggtctatgcggttgaagacgatacgattcaagcggtctgtgcgctgcctacgctcttctgcaccggcacagagcagctctatcctggagaaaacacaccctatgactgtatcatctgcacgggcgatgtcttcttcggctggtcgatcgcggacgcagctgtcacgcagctgttcaactgcgatgaggtcggattatatgcgatggacgtggaagcgttctgcgggataggaaacgggcagtatctcggccttgaatacgatccgtctgccgcagacgaaggcggacagtacctgttttggctgacaccggcggagggcgacctctctgagaagcggatcatccgtgtcgcgggcagccggagcagcattctgtccatggcgatccgggattttgcgtcgatgtacccggaatatcaggtcgaatatgtcgactatgacgctttgcacggtgagcaggcggagcagcggcttttgatggacatgctgtacggtgagtgtccggatctgctgtttgtgaatggacttccgtttgagcagtatgcccggcagggcctgctggaagatctgtatgcatatctggacgcggacgaggcgctttcgcgcgaggatctcacgcagaatctcctttgcgcgctcgaaacagacggcgcgctgtattgcctgccgcagacgtatctgctggacacggctgtcggcctgcaggagacggtcgggggaaaagaaggttggtctatgacggcgtttctggatacggcacaggcgcatccggagatcacatcgatctttgcgcaggaggatggacagggcatgctggagctgctgctcctgcatgcgccgggaacctttgtggactatgaagcagcggaagcacggtttgattcgccggacttcctgcgccttctggcgctcgcagaagcgcagaaggggccggaggcagagccgggccgggacgtgctgcaaagcggccagacgcttctggaggagctgatgatcgtgcgtgcggaggagtttgaggagcagtatacgtcagagctgcagggctgcgtgttttccggctttcccggtgcgggacaggctagcttttatctgacgctcccgatggccattccggtcaacgcgcgggaaaagacgggcgcatgggcgtttctgaagcttctcattaccgaagatctctatgccgcgcgcagccgcggcggc

SEQ ID NO: 1828 - DNA, 657 bp, Unknown
  Unknown gut bacteria
tttgatacccggctcatcccgctgctggaaaagcatacaaaatggaagccggccgccatccggcacctgagccgcgcgtccggcgtcgtggtggccctcgttgtcgcggcgctcattctctacgcgttcttctccatgctcctgccgcagctgtatgacagcgtcgtcgggatcgtgagccacgcggaggattattacaagagcatcgaccgctgggtcacgaatattctcgaggataacccggatctgcgcggctatgtcgatacggcgctgggcaagatctacgatttcgtcaacaactggatcacgacaaccttcctgcaggatgtgcagaaaatgctgaccacgctgacaagctcggtcgtctcgatcgtcaagagcctcatgaatctgctgatcggccttgtggcctccgtctatatcctctggtcaaaggatacgttccacgcgcaggccaagaagatcaccgttgccctgttcccggcgaagcatgcagaccatctgttttatcttgggcgcaatatttaccgggtgttcaacggctttgtcatcggcaagatcgtcgattcggcgatcatcggcgcgctgtgctactttgggctgctggcgctcaagatgccgtatccggctcttgtggccacggtcatcggcgtgacg

SEQ ID NO: 1829 - DNA, 477 bp, Unknown
  Unknown gut bacteria
atggcaaatcagcagctgacaggacttgactacaaaattcaggagatggcgggccgtatccgcgagcttcgtgagatctccggcttcacgccggccgagatggccgggaagaccggcgtcagcatcgaggaatatctcctctgcgaggcgggcggaagcaatctgacgttcgcgtttctctaccggtgcgcgctggcctttggcgtcgacgtgaccgacctcatcgagggccagagtccgaagctccgctcctacacgcttacgcgcgcaggcaaggggcagaagatcgagcaggcacacgagatgatctactacaacatggcatcggacttccagaaccggatcgccgatcccctgtttgtggaaaacaagtattccgaccgcgcgttccactccgatatcgagctgaccagccacatcgggcaggaatgcgatctcatcatcaagggctgcatgaaggtgcaggtcggcgagcat

SEQ ID NO: 1830 - DNA, 1245 bp, Unknown
  Unknown gut bacteria
atgaagtatattttggcacatgatcttggtacatccggaaataaggcaacgctgttcagtgaaagcggagcgctggtcgccagtgaggtctattcctatgggtgccattatttccatgaaatctgggcggagcaggatccggaggactggtggcgggctatctgtacaacgacccggaatctgatcgcgaaggcggcgatcgagccggcgcagatcgcggcagtttcgttttccggacagatgatgggctgcctgtgcgtggacaaagcaggccatccgctccgcccgtcaatcatctgggcggatcagcgcgcgcaggagcagcagcaggcgattgccagggaaatttccgactgggatttttaccggatcgcaggacaccggaatacggcgtcctacgggattcagaagctgatgtgggtacgggatcacgagccggagatctatgcgaagacgtataaaacgctcaatgccaaggattttattgttctgagactgacaggcaattggtacacggagccgtcggatgcgacctcgaatggctgcatggatctgcagaagctgcagtggtcggagaagatcgtggcgtgtgccgggatcgacggcgaaaagctgccgcagatcgttccgtcgacctttgtggcaggcggcgtgacgcgctgggccgcggagcagaccggccttgccgtggacacgcccgttgtaatgggcggcggcgacggcgtctgcgcgaacgtaggcgcaggctccatccggccggggcggaccttcagctatgtcggctcgtctgcgtggatcgcgtcgacgagcgaggagccggtattcgacaaacagatgcggacggtgacctgggcgcatatcgtgccggggctgtatgcgccgaacgggacgatgcagtccgccggcggcgcctataactggctgaagcagcaggtcggccagctggaaacggaacaggcggcgcatggcggcgacggcgtctacgcacggatgaaccggcaggcggcgcaaagcccggtcggcgcaaacggcgtgctgtttctgccgtatctgctgggcgaacgcgcgccgcgctggaatccgcaggcatctgcggcatggctcggccttcgaatggagagccgccgctgcgatatgatccgtgcggttctggaaggcgtgacgatgaatctgaatgtgatcctcgagtgcctgcggagcaatctgccaatccgggagatgctggtgatcggcggcgggggccag

SEQ ID NO: 1831 - DNA, 720 bp, Unknown
  Unknown gut bacteria
atgcgcaccggtccggaatccgattctctgcgggaaagtctgcgcagaaaaattctgacgcttgtgcagcagatggacttttccgtcagcaccaagctcccctccgaaaactggctggctgccaaatttgacgtcagccgcagcagcgtccgcgccgttctggccgagctggagactgagggaaagatcctgcgccgtcagggaagcggcacgtatatcaacacaaaggcgtttctgctcggcaccacgctgtatccgcgcatcgagatgcgcgagatcatcaagaaaaacggcttcactccgcgcagcgaggccatctccatccggcatacgccggccggcgccgacgcttcgatcctcgactgcagcccggacgatctgctgcaggaggtctacagcctgtactacgcggacgagacgccctgcatgtactgcatcgaccggctgaaggccggattgatctccgacccggactggaaaagcgcatccttccacacacagacgctctaccacgccattcatcaggcctccggcatccagatctgctgggacatcatccgcttccgttcggtgaactgcgaccggtatccggagatctccgaggcgctgaagctgagcccggagaacaattccgccgttctgcttgagatcatcaattacacggaggacagccgcccggtcatgtttggccggatctatgtaaataccgatatcatccag

SEQ ID NO: 1832 - DNA, 726 bp, Unknown
  Unknown gut bacteria
gtgaacgccttgaaaccaaaacgactgacgctctttgccgggcattacggcagcggcaaaacgaatatcgcgctcaattatgcgcgattcctgcatgaacaggggctgcccgtcacgatcgcggatctggatatcgtcaatccgtatttccgcacaaaggacagcgaggcccagctggcgagcgaagggatcgggctgatctgttccccgttcgcaaactccaatctggacgtccccgccatgccgaaggaaacctacgcgctcatcgacagccgcacgcagtacggtgttctcgatatcggcggcgatgatcgcggtgcgctggcgctggggcggtacacgccggagatccgggaggagaacgattttgagatgctgctggtcgtgaaccgctcgcgcccgctgacgcgcacgccggaggataccggggctgtcatgcgcgagattgaggccgcctgcggtctgccgttcaccggcatcgtcaacaataccaaccttggccagcagactgaggcggaggatgtgcttgcgagcgtgtcctatgccgaggcgatcagccatcagaccggcctgccggtcttcatgacctgctgcgccgaccgcttgtatccgagcctgaaggacaggatcgggaacctgttcccgctgcaccttcagaaactatattatcaactgactcaggaggcgtccaatggcgaaactaacatttcaggaagagctttgtaa

SEQ ID NO: 1833 - DNA, 1119 bp, Unknown
  Unknown gut bacteria
atgaaaagaacgaaagcacttgtagccctgctgctcgcgctcgtcatgctcgttggcctgtgtgcctgcgcaagcaagaccgaagagcctgcaaagaccgagaccccggcacagaccgagaccgagactcccgctgctgacaccgagaccccggctgctgacgaaagcaccgacgctgccttcaccgctgctgctgacatcgtagctccggctggcaagaccctccgctccctgcctgttgaccagctgcccgagaagcagctccgcatcgcttccatctgcgtgcagaacaacccctggggcgctgctgtcatggttggtcagaacttcgccaaggagatcctcgcggaccgcaactgcgttgtcgacgtcatctccgttgactccttcgacgctatgtcctggacctccgctatcgagaactgcaccgcttccggctacgacgcaatctgcatcttcggtgtttccgacgagctgaatgactgcgtcaacaacgctaccgctgctggcatcgctgtcttctgcttcaacggcgacctccccgacactgaccgtgttgcatggtacggcatggacgactacgctgcaggcactgtcgctggccagaccatcgttgacgctctgcccgacggcggcaagtacgccatcatcaccggctccttctccgtctatggccatgagaagcgccgcaccggctgccgcagcgtcactgacgaagtctcctctctggagcttgtcggcgaatatgagaacaacgacgatgccgagaaggcttacagcctgaccaccgacatcctcaacgccaacccggacatcaaggctatctacgtcaccgctggcggcccctccggcgctgctcaggcaattcaggatgctggtaagtccggcgaggttgtccttgtctgccatgactgcctgtccgctgtttccgattacattgctgacggcaccatctccctctgcatcgaccaggatccgttcaaccagggctatcagccgatcgttgacgcattcaactacctgtgcgcaggcgtgcagcccgaagagctcaacacctacgacgcagtcgtcgctactccggataacgtcaaggaactgttccccgagctgttcaactaa

SEQ ID NO: 1834 - DNA, 1341 bp, Unknown
  Unknown gut bacteria
gatggaacagccagcccggaagaggtctgggtcgacgttaaaaattcaaacaacgcggccgaggcgacccgcatccgtctgaccgtcaagaaaaccccgcccatcaccttcacaccgtccctgacaccggaggacgcactgctggtcctcatcgaccacggcaccaagacgcggatctggccggatgagaacggcgcgtggagcctgtccaagggctttacctatgactattacctgacggcactgggctatgtcggaaaaagcggcacgctctgcgccgcggacacagacgatgggaagaccgtcctgaccctctccgacggaacatcggctgacgtgcagtccgacgcgcaggggaacctgcaggtctcgctcacgctgacgctgaccgcagccgaagagaataccacgcttgatcatacgatcgaagcggaatgggccgatttccgcggcacctcgtatacctatgacgaagcatcgggcgagcttgttgcgggcggcacgaagtacagcaataacggcgtcgtctccagcccgatgccgatcagcacggcagagtccatgctctactggtccaatcagctgggcgagggctttgataaaaatgcggtcggctgcccgatcctcgtggacggcgacctgatcacgtattccaataatcagctcttccgggtcgacgccgtctccggcgaggtccttgcgaccggcaccatgatcgacggctccagcttcgccatcaacccgccgacctattatgacggcatgctcttcgtcggcctctccagaggccgcattcaggcctttgacgcgaagacgctgaaacccctctggctgtatgtggatgacatcggcggccagccgaactgcccgatcgtcgtatatgacggctatctctataccggcttctggcagaatgagagcgaaaacggcaattacgtctgcctgtctgtcacggatgaggatccggccagcgagaacgagcgcaagatcccgacctggacggtcacgcagttcggcggattctactgggcgggcgcgtatgtctgcgatgatttcctgcttgtcggcacggatgacggtcaggctggctacgcgggaaatgacacggcgcgccttctgatgctcgacaccaaaaccggcgagctgctggacagccgcgagggcatttccggcgatctgcgcagcacggtctgctatgacgccgatacggatgcctattacttcacgaccaagggcggctatttctatcaggcccgcgtcacgaccgagaacggcgtccggaagatcagcgagcttcggtcgctgaagctcgacaactacgccagcgaagcggcaaatccc

SEQ ID NO: 1835 - DNA, 3150 bp, Unknown
  Unknown gut bacteria
atgctgcttggcatgctgccgatgtcggtcttagccgcaaacagcagtgtaccgcttacgctgaatgtcagcagctatagtgcgccgtttatcaacggaaacaccggagagcatacggttacatcgtataaggcgtataaaaatattcaaagaagtgctgttggctccgataatgcaagcggttctgcgactgcgcgttttgttggcagcaacgaaactggctggacactggtgattgatgttaaagttggtaactattctgaaacatggaccacgaacgccagaattacgaataaggacatgagtgcggcgacaggcagcgtcacctttggcttgtcgtttaacacggcaggcggcacttccacctatattcatatcagtggcggcaaggagctgccgcatactgaccatacgtggaagtacattgacaatggcgatggaacgcacaccggtcattgtacctatccgggctgcaacgcgacaaaggataaaaacgagaagcatatcccgggtaacgatggcttctgcacgaagtgcggcgcctgcacgcacccgaaggacaatgacggctactgcacagtagaaggctgcacgcatccggatacctgctgcaagaagcccgaaaaacccgaccccgtcattcccccgcagcccggcgcagaggacttcgacaccaccaatctggtcactgtcgactgcaccacgaatgacacgcatccggacgagacctacgacctgatcgaaggttcctacgtgatcggcacgatgaccggggaaaacggcgtttatacctgcacggtcacagtcaccgcggacaaatatgttgatgcatataccggtacttatggcgaccacacgctctccggcgacagcgagaagacgttcgacctgatctgggacgcggagaacgagcagtggaagcccgaaagcggcgtaacgttctacgttgagtgcgagaaggaagaagaaaagtatgtcgtcaacgttgtgatctaccgcaacggtgacttcgaccatgcctataagactgtcgcactcgactcgcagcccaagggtacgatcattgacctgaccaagctcgatattgccgactactacacggcgaactataccggcaaatatgagttccacggctggttcaacgacggcgcatggaacgaatacaaaaagaatccggcgcgtgaaggggaaaagaccgtcacggtcaacggctggacgaacatcatctgcatggtctatgactatgagaaagtcgtctacttcgaaacggaggaagccctgaacgcttatcaggacgaccacagcaagaccgagggcctgctcttctcgaccacggcgctccatggcgcggcactgcccaccgaggatgcgcctgctgcaaagcgcgacggctatacgttcaagttctggagccgcgagggccagaccgcggacgttaccggccagactgttggcggctggacgaacctgtatgccaactgggagatcactccgcataccatctatgcctatgcaagactgaacagcgcgtttgcgcccctgacgccggatgaggatgggctcaatgataccatcacactgaatgcgaagaccctgacggacctcggactcggcagctacaatgagaacggcttcgtctccatcggcacgttcagcttcgacgagatgccgctcacggatgcactgtacggcgcggcctataatagtgcggaatttaacgcggctgtcgcagagctgaaaaacagcatcgagctcgaaactggtgttgacgaggatacggccaagctgatcgtctggacggcgctctataaggccggtgaggacagcggcatggacgccggttatcccacggacgacgagaacggctatcagatgtctggtaacctgaacctcgcagcggtgatgttccagcccggcggcgataacgtcgagggtatgcccgagggcaactacacctacgacgatgtttttgagatctacgacttctatctccccggccagagcatcgaaatgcctgccgatccgacccgtgagaactatacgttcaagggttggagcgtgaaggtcatcccgggcgaaacggatgtttacgccggtaccggcgatgcagagctgctgcaagcaggcgatccctacgagatcaccgcaggcggcgtggtctttaccgccgagtgggacgccaagacctatgactacacggtccgccacgtcaagcagctggccgatggctcctatgactatgagaatgccgagatcgaagagctgaacggcaagttcggcacgctcgcagtcgtgaaagcaaaggagaactacggcgagcactatccggtcaacgacgctgcacagaagcagaacatccagatcgtcaagggccttgtgatcgatgttcattacgatcttgattcgcacacgctgacctatgatcccaacggcggctctgacgttacgcccaatacggccacggtccgccatggcgagaaggtcgtcgacggcccgctgctcccgccgaccagaaccggcttcgattttactggctggtatgacgataaggacggcaaggaaccgcacaacttcacgcaggggctggtcgaagacaaaacggtctatgcaggctgggtgaagtcgtcccccacagtcattacctatcgtcttacgatcgactatatctacgccgacggcagccaggcggctgagagcaaggagttcgatcttgcagcgggtgaggactatcgtgtacgcagcccgtatatccccggctacaaggcggacagaaccgttgtggagggtgtgatgcccgatcatgctgtgacggagacggtcatctacagacgcgtctacacccccggcggctccaccgtcatcccgaccctgcccaagacggagctgaagttcagctcggcagatcactttgcctatgtcaacggctatcccgacggcaccgtgaagcccaccggcaatatcacgcgcgccgaagtggcagcgatcctctaccggatcatggacgccgactgcgccaaggcatactatgacaccacgagcagctaccgcgatgttgcccgcggcgactggttcaatgtctacgtcgccacgctggagaatgccggtgtgatcgtggacaccagagccggcggctacttccgcccgaacgag

SEQ ID NO: 1836 - DNA, 873 bp, Unknown
  Unknown gut bacteria
atgagatttggtattttcttttcctactgggaagacgactggaagggcgattacttcaagtatgtgaagaaggcccgtgagcttggctacgacgcgctcgaggtttccgccggtgagctgctcgtcatgtccaaggacaaactgcgcgagctgcgcgcggtctcgaaggatctggacattcagatctccgccaacctcggcccccccagaaagtacgacgtttcctcccgtgatcccgaggtccgcaaggccggtctcgcgttctactccgatctgatggacgcgatggacgtgcttggctgccgcaagctcatcggtgcgctgaactccagctggccccccgatttctccgatctggacaagcccggcttctgggcgcgcggcgtcgagagcctgaaggtcatgggcgcgaaggccgagacgctcggcatcgacctctgccttgaggtcctcaaccgctttgacggtctgatcctcaacaccgcggaagagggcgtccggttctgcgaagaggtcggccgcgacaacgtcaaggtccatctcgacaccttccacatgaacatagaagaggacgatatccccaccgccatccgtctggccggcaagcacctcggccacatgcacgtctgcgaatccaaccgcaagctgccgcgtgccggcaagggcgcgctcgactgggtcgagatcggcaaggcgctgcatgacatcaactacaacgagttcatcatcaccgagtcgttcgtcagaaccggctgccaggtcggcaatgacacgcacatctggcgcgatctgtccggcggcgcagacgaggcgaagctcgaccgcgacgcagcagagtccgtcaagttcctgcgcgcagctttcggcgaataa

SEQ ID NO: 1837 - DNA, 603 bp, Unknown
  Unknown gut bacteria
acggtcacgtctgacaactatgccggcggctatgcagccggcaagctgatgatggagcttctgccggagggcggcgacatcattatgacgaagcttgagtttgcctctgtggcaatggatcagcgctatcagggctttgaagatgcgatcgaaggctccaatatcaacgtggtcgactatattgagcaggacggtacccgtgaggataccctgacgaagatcgcgcccatgctgacgaagtatgacacgcttgtcggtatctactgcacgcagggcgaccctgcgatcggcgcgctgtccgcagtcgatacggccggtctttccgacaagatcacgatcatcagctatgacgttgaggatgaggtcgcggaggcaatcaaaaacggtacggccatcaagggcggcgttacgcagttcccgttcgcgatcggctatttcggcgtctacgaatgcctgcgcgcgattgccggctatgaaaaggtagaggtccttgcgctcccggtactcccaatcacgcaggaaaatgttgaggaatttgccgcggacaatatcgcattccttgccaagtacggcgatattacgctgccgcagacccttgcgtaa

SEQ ID NO: 1838 - DNA, 576 bp, Unknown
  Unknown gut bacteria
ttcggcggcaacggctatgacgctgcgtggatggacgaggccaagcgccgagggcttgtgaacctgcccaatacggctgcggcgctgcccgcctatatccttcccaagaatgtggagctgatgacgaagcacggcgtctattccagaagcgagatgctcgcgcgccatgagatccacatggaaaaatactgcaagatcatttccatcgaggcgtccacgctcgtcgacatggtgcagcacagcatcctgcacgcggcctcccgctatgagggcgtcctgtgccagaccatcctgcagaaaaagcaggccctgccgaacgcggactgccgcgtcgagacggcgctggccgagagcattttgtcgctcaacgagacgctgctggacgatacggtcgccctcaagaccgcgctggaaatggcgccggagggcgaaagcgcggcgctcgtgacctattaccacgataccgtctacgccctcatgagcaaggtccgcgcgtccgtagacaagctggaaacgctggtggccggcgactactggccgtatccgcgctataccgatcttctgttctcggtctga

SEQ ID NO: 1839 - DNA, 666 bp, Unknown
  Unknown gut bacteria
aaggaatacaccatgacctacgatattacgctcccgagcgccgtctcggcgtcgtccatcacgaaaatggacaagaacccctcctcgatcaccttccgcgtcgagcggcagatcaccaaatcggtcgaggtcaagggcgactttgcaaacgtcaagatcgccgagggctacatgctcgacagcacgagctttgactatgattccgtcaccgtggaggggccggagtctatcgtcagcaccatcgattccgcacaggtcacgctcgaccgcagcaatgtggacaagacgatcaccgagtcggtctcctatgtcctgctggacaagagcggcgaacaggtcgacccgacggagctgacgctcagcaccgacgccatcgaggtcacgatgaagatcgtcaaatataaggtcgtacccatcgaggtacagctgctctacggagacggtctgcaggagcaggacgtcagctatgactacgagccgaaggccgtgacgctttccggcgattccgctgtgctggacggtctcaattccatccagctcgacccgatcgacctgtccatgctcacgagcaacgacgagacggtcacgcagaccatcctcatcccgaacgacgcgaagaacgtctccggcgaggaaaatgtctccgtccgcatcaccatcaccggt

SEQ ID NO: 1840 - DNA, 720 bp, Unknown
  Unknown gut bacteria
tattactggcagcagtattactccttcaccagcaactacggcagctacgccagctatttcatcgacagcacgcagccctttgatcagcagatgtgcgtgtttgacgacacgctcacctggcagcagtatttcctcgagggcgccatctccacctatgagaacatctccgccctgtggcaggatgcgcgtctggccggcttccagctgggcgaggaggacaagcagtacctcgacgagctgagcaacaatctctccatcgccgcggcggcctacggctatgacagcgccgacacctatctgcagacggcctacggcccggcggcgaccatgagcggctaccgcagcttcatcgagcgctatctgacggcgtcgtcgtatctgcagtcgctcgtcgacgcgaagacctataccgaggacgacatcagcgcctactacgatgcgaacgccgacggctatgctgccagcgacatcaacaaggacgacaccaaaatggtgaacgtccgccatatcctgatcaccccgaccgagcaggatgaagagggcaattacaccgacgcggcatgggccgaggccgagaagaaggcgcaggacctgcttgccgagtggcagtccggcgagcataccgaggattccttcgccctcatggcgacggaaaactccgccgacactggcagcgcctccaacggcggactgtatgaagaggtctatcccggccagatg

SEQ ID NO: 1841 - DNA, 918 bp, Unknown
  Unknown gut bacteria
atggaacaacaggcaattgtagaattaagagggatcacaaagtcattttccggtgtgagcgtcctcaagggcgtggatctgacgctgcacagcggcgaggtcgttgcgctgatgggagaaaacggcgcaggcaagtcgacgctgatgaatattctgatgggggtccatcaggcggacggcgggcagatccggatccacggaaaagaatttcagagctatgacattcaaacggcaagagagaatgggatcgcgatcatcccgcaggagcttgcgcttgtcccggcgctttcggttgcagagaatatattcctgagcaaacgcacggagcaccgcggcgcagcggtcagccagaaggagatggtccgaaaggccggcaggattctggaggagcttgggtttgatatcgatccgcgcatgcgggtggatcagctcccgatctcgtaccggcagctggtctccattgtaaaggtcgttgcggagcaggcgagcgtagtcattatggatgaaccaacatcatcgctcagcatcgaggaagtgaggcggctgcaggcgatcatccggagaatgaaggaacgtggtgtcgcgatcgtgtatatttcgcatctgctcgatgaggtgtttgaaattgcagatacgctgatcgttttgcgggacggccattttattgcatccaagaagaagcaggagaccaaccagcgggagatcgtttccctgatggtcggtgaagatctgatgcagacgcagcagcggctgcgcagtgagatcgaaaacgagggaacgatcagcggcgagacgctcctggaggtggaaggcctgaagcttacacccaaggcagagccgatcgactttaccctgcacgccggcgaggtgctggggatcacagggctggtcggcgcaggcaaaacagagctgctgcgc

SEQ ID NO: 1842 - DNA, 843 bp, Unknown
  Unknown gut bacteria
ctggcaaagatgctgctggtcatcctcggcgaggatcccagccgctataccggcgccgactgggccatgcacgtcgacgaggacgcgttctccaagggcatctacgccggcatcaccgccagctattccgaggccgcaacacgtgacgaagcctgcctgcttatctataacgccatgctctgcccgaaggtggtggacgccagccagagcggcgtgcagcagtacgtgctggacgcgctcatgaatcccatgtcgtatctggagatccgcttcggcctgacgcgctataccgcgacgctgaccggcaacgaatgcgccgacctgtcttcgtcgggcagcaagctcgccgccggccagagcaagctcgccggccacaaggaatttgccatttccaccgacctgagcctgcttggccgcagcgtggatatctatgtgaaggacggcaaggtcttcggcgtaccgtgctacgcggtcgatgagatctattacacgttctccgacgcggcggcactgaaggatatctgcgcgaccggcggcttccggctgacggattcgacggaatactactacaactacacccgctccacaaaggatatcctgaacgccgtgacggataacgacaagatcacggtcatcgaccacgacggcgataacgcgttcgacatcgtcctcgtcaccaacagccggcccgcgacggtcacctccgtcagccccctgacggtcgagcttggcgggcagagctacaccgtacagcccttctgtacgaccgacaccttcgccgtcggcgatgcggtctattacagtctggtctgcggcagcggctatatccgcaggcttggataa

SEQ ID NO: 1843 - DNA, 1107 bp, Unknown
  Unknown gut bacteria
atggacaagacgattctcaagcgtgaggaagcggcggttttcgccctgcgcgagctgtattgtcggtatggctacacgccctaccggatgagcaagtttgaagcgtatgagttttacctgcagaacaaggagtttctggtcagcgaccggatcatcaccttccacgataccgacggcgagctgatggcgctcaagccggacgtcacgctgtcgatcgtgaaaaacggcacggacgcgccgggctgcatccagcgctcgtattacaatgaaaatgtctaccgcgtttccggcagctcgcatcagttccgcgagatcatgcagaccggtctggaatgcatcggcgatctggacttttacgagatctatgaggtgatcctgcttgcggccagaagcctcgcgtgcatcgcggaggagtatgtgcttgatgtgtcgcatcttggcatgctgggcgcgattctggatgagacgggcgcggatgagagcttccggcagcaggcggcgcgctgtatcgcggaaaagaacgcgcacgatctgcagccgctctgccgcgcagccggtgtgagcgcggacgtgacggacaagctgacggcgttcgtcggcatttacggggagatggagtgcgttttgcagcgcctttcgccgctctgcaccacgcgggaggagcagtcggccctgcggcagctgcaggcgctggcttcgctgctgcaggccacgccgtatgcgggaaatatccactttgatttctcaatcgtcaacaatatgaagtattataacggcttcgtcttcaagggcttcctgcgcggcgtgtgtcagggcgtgctggccggcgggcagtatgacaagctgatggtgcgccttgggcgcagcgcccgcgcgatcgggtttgcgctgtatctggatctcttggacgagctggaggagcagacggacggtccggatgtggatgtgctgctgctgtacgatgcggcgacgccgccgcagatgctggccgcgaaaattgaagcgctgcagcaggccggccgccgcgtttcggcgcagcgggccgtgccggagaagctgcggtacgagacggtgatcgacctgcggaaggaggcggcagaatgctga

SEQ ID NO: 1844 - DNA, 606 bp, Unknown
  Unknown gut bacteria
atggcaagcttcaatgcatccagcaaccccctcgatttcctgcggggctgcaccgttgattttgatctgaacaccggcctgtccaagaaggtcgagaccggcaagcgctatctcagccagatgaagggcatgttcgccgacgaagccgcgctcgaaaagaagatcgcagacgagggcgacagcctgatctacgagttccacggcctgcccgttcccgagacgccgggcgatttcgccttcggctgctccatcctgaacccgggcaagatcggcgacgagtattatttcaccaagggtcatttccacaccctgctcgagaccggcgaggtctactactgcctgaagggccacggctacatgctgctcgaaaatccggagggcgactggtccgcacaggaaatgcacgccggtgaagccgtctatgtcccgccgcgctatgcacaccgcagcatcaacgtcagccccgacgagcagctcatcaccttcttcgtctaccgcgctgacgccggccatgactatggcaccatcgagaccaagggctaccgcaagctgctcgtcgagcgcgacggccagccggccatcattgacaaccccaactggaagtga

SEQ ID NO: 1845 - DNA, 423 bp, Unknown
  Unknown gut bacteria
atggattctgccgtgttcttaccacttgaatccgcaggcaaaatacgatatcatgaatccgatttcggttttgcggcggtaggtgagatggccgccgcagagcttaacgcaaaaggaaaagaaagaaacggaggcgtactcatggtactctacattgtgttgttccttgttgtgctggcgctctgctatgtcctgttcaatttcctcaggatccgcagaatgcgtgaaggcacagacgtcatggtcgaaatggccgggatcattcgctccggcgcgactgcattccttgaaacggagttcaagaccatcgccattgtcgtggtcgtactcgcggcgatcttctctctgttcattgaagcgaccagcggcatcacattcctgttcggcgcgtgcatgtccagcgccgtctgcgtgcttggcatg

SEQ ID NO: 1846 - DNA, 948 bp, Unknown
  Unknown gut bacteria
atgtcccagaattatgatatcgtaaccatcggcagcatgttcgttgagatcatgcgcaaggagctggaaaagcccctgtccatgccggctgatttcaccggcccgtatcccagcggtgatatcgctattttcctgaacgcagcagccaagctcggcagcaagtgcgccatcatcggcgccgtcgccgacgacggcttcggcaagtgcgtcatggaccggatgcaggagagcggcgttgacctcagcatggtcaaggtcatccccggcgaggcaaccggctctgcctttgtctgctacttcgcagatggcagccggaacttcatctatcacgtccgccacgaagccagcggtatgctcgggccggaagacgtcgatatgtcccgtctgcagaacatgaagtggttccactccaccggctatgaaatgtccatcaacaagggcttcgccgaggcgacctacaaggtcatggagaacctgccggccggcaccaaggtcagctttgacccgaacatccgcccggaatcgctgagcgtcgagcagatcatcacgctgtgcgagccggtcctgaagcgtgctgacgtcgtcttcccgagtaagggcgaagccaagatgttcaccggcgccgcctccgacgaggaaggctgccgtcagtgggcaaaggaaggaaagctggtcgttctgaaaaacggctctgccggctcccgcatctactccggcgacgaggtctttgatgttcccagtttccacgtgaccgaggtcgacccgaccggtgccggcgacaccttctgcggcgcgttcctgaccgcgctcgtcgagggcaaggatctgcgcgaatgcgcccgcttcgccaatgcggcaggcgcgctgtctgtcctgaagcaggggccgatggagggtgctccgtcccgtgcggagcttgacgccttcttggcgtctcagccgttatga

SEQ ID NO: 1847 - DNA, 1332 bp, Unknown
  Unknown gut bacteria
ttgcgtgcaaaacggttgcttctggccgtgctgacggcgctgcttgcgctgctgctgtcgggctgctttgtgaaaacggtcgacgagctgtacacgctgccgcagcactccgacgattataaccggctggagcaggccattgagtctgtcatgagcgcacagagcgccgtctatgccgcgccggtctccggcatcaatcagcagtccgtacagctggccgatctggacggtgacggacaggaagaggcggtcgcgtttctgaaaaccacgggggataagccgctcaaggcatacatcttctccgtggtcgacggcgactatcagccgatggacgtcatagagggcgacggcacgagcttcgccagcgtggaatacgccgcgctgaccggcggccccggcgttgagatcctcatcacgcgtcagctgtccaccgacgttctgcagtcgctgtgcgcctacacctattccggaggccacgtcgttgagctgatgagcaccggctgcaccgcataccgcacggccgatctggacgaagacgggcggaccgatctgtttgtcctgcactccgatgcggagcggcagcaggggatcgccgagctgtaccgctggcgcgacggccagatggagcgtgagccggaggtctctttgtccgccgcggcgtctgacgtcaggcggattctgatcggagatctgactgcggacgttcccgcggtctttgtggccagcggctatgaggacggaagccttgtcacggacgtcttcgcgttccgcggcgggacatttcgcaatctcaccgcagccggttccggcggcgggatctccacggtgcgcaactattacgtctatgccgcggacattgacgaggacggacgcatcgaactgccggatatccacacgctgccctcggcagccgattccgaggaaagcttttccgtgatcgactggtataatctcagtctgaacgccgtccggacgcacaagtgtacgacctatcacaatttttccggcggctggtatctgacgcttccggatgcgtggcaggatcagctctgcatcgtccgcagcgctgaggtcggcggcgtccgcggctacacgttctgccggtgggacggctccgccgtgaccgagcagatctttaccatctatgcattctccggcgacaaccggacgcagaccgcgtccgccgacggccggttcattctcgccgaaaagggcgatattacctacgcagcacagcttggaacagggaagtgggccaaggaactctccgaagacggcctcaaagccatgttccgctttatccatattgactggaactcaggagagacgtga

SEQ ID NO: 1848 - DNA, 531 bp, Unknown
  Unknown gut bacteria
atgcccggactgcggctgagaggggcgcatatggactttaccggactgtgtcagaagatggtcatcctgtttttttgcatggcggcgggcttcgtcgcggcaaaggcgaaggtcatggacgtgcagagcaacaaaaagctctcgagcctcgttgtgaacgtgtccaaccccatgcagatctttgcctctgccctgaccggcgagcatgtgctctccaaccggcagacgctggggctgacggggatcattctggcgatctatgcgtcgctgatcgtcctgagctttgccgtgccgaagcttctgcgcgtgccgaaggagcagaagggcgtataccgcttcatgttcattttcgcgaataccggcttcctcggctatccgatcgtggaatccctgctcggctatcaggcaacattttatgtgacgctgtacgtgctgtttttccagatcctctgctggagctacggcgtgagcctcatccgcggcgagccgcggttccattttcactggagggtgctgcggcagccgtgcgtc

SEQ ID NO: 1849 - DNA, 1071 bp, Unknown
  Unknown gut bacteria
atgcgtctgcgcaaaacgctctgtctggttttgatcttcgctctgctggtctgcctgtgcgtaccggcctcggcggacgtcagcctgtttttcgtcgccgtcaacgacaccgtccccctgacgctgaccatcctgcccacatattccggcggcacgctttatgtgccgtatcaggtctttgacagccagccctgcggcgtgacgccctcgtataaccagacgaagcagacctttgtgcttctcagccgcagcaagcagatgctcttcgatctggctgccggcaccgtcagcgacgagagcggcaccgtctccgcagccaacgttctgtaccgcaacggcattttgtatctgccgctcaccttctgcgcctcgcatttcgatctgaagaccaccatgctggaatctgccggcggctatcaggtcctccgcttcaccaacggcagcgaggtctatgacgattctctgttcatcgaaaaggccgaaaacctgatcacctaccgcgtccagcagtacaccgacagcgccaaccagccgcaggaccgcccgcaggaccatccgaacggcggccaacagaccgcaggcgacgatccggcggccgaaaagcagcccgcgaccgtctatctggcctttaccgacagcagcacgatgcgcagcgccgccgcggctctggcggaatatgacctgcagggcagcttcttcctgacggcagacgagatccggtccgacccagctttggttttcgagctgctcgccgccggacacgccatcggcgtgaccgccgaagcggacgcgccggacccggctgaggcgctgcgggaggccaacgacgcgctggccggtcttctgtgccagaaaacgctcctcgcgcttctgcccacaggcaccgaagcgccggagggctacagctgcttcttccgctccgccgcgcagcccagtgccgccgacgccgccgcctcggagaccgcgcacctgctcgtctgcacagacgacgccagcgccacgctctatacgctcttctccgccgacgcccgcatccttcagcttctggaaacgacggtgtatccccagtaa

SEQ ID NO: 1850 - DNA, 837 bp, Unknown
  Unknown gut bacteria
atgctctatgtttttcttgcggtcagtctcatcgccagcgtttcgctgacgtatgtcagctgtcagtttgcttcgtacagcgccatctggcagataccggtgttcttcatcgggagttttctggcgctggtgctgctgtttttgctggtgatcctcgtctcctgcctgtttgtcgacccgaaaaagcagctggataagccaagcggctatttccgcttcctgctgcacgagttctgccggctggcgctggccatgggcggcgtgcatgtcaatgtaacagggcttgaccggctgccgaaggaggggcgcttcctgctcgtcagcaaccaccggttcgcattcgacccgctggtgttctacgccgtcatgccgcaggcagagctggcgtttctgtccaagaaggagaatttctccatctttattgtcgcgcagatcatgcgcaaggtgctctgtctgtcggtcgaccgggacaatgaccgcgaatcgctcaagtcgatcctgaaggccattcagttcatcaaggacgacaaggcatccatcgccgcgttcccggagggcaagacgaaccgaacggaagacgcgctgctgccgttccgcaacggcgtgttcaagatcgcgcagaaggccaacgtgccgatcgtcgtctgctctctggtcaactcgcgcgccattctcaagaacatgttccgcaagcacacggaggtgtggctggatgtgctgcgtgttgtgcccgcggaggatctggtcggaaagacgaccatcgagatcggcgagcatgtgcacgccatcatggaggacggcgtcatccgccgcgagaccgcgcagggactgcggtga

SEQ ID NO: 1851 - DNA, 549 bp, Clostridium symbiosum
atgagcggggaatacgaagagcaggtaaaaggagaaaagatggaagatatggaagagaaggaagaaaaattgacgctggagaaatttgaggaggcaacggaagccgtttcaaaggtaatatccgagacaaagctggtgtacagtgagcatttttccaatatgaccggtaacaaggtgtattttaaacctgaaaatatgcagtatacgggagcctataaggttcggggcgcctattacaaaatcagcacgctttcggaagaggaaaaaagcagagggctcatcactgcttccgccggtaatcacgcacagggagtcgcttatgcagcgaagctggctggcgcgggagccgtgatcgtcatgccgaccacaacgccccttatgaaggtcaacaggaccagaagctatggggccgaagtggtactccatggagacgtatttgacgaggccctggcccatgccaacaggctggctgccgaaaagggttatacatttatccatccttttaatgatctggatgttgccacaggtcagggaacgatcgcgatggag

SEQ ID NO: 1852 - DNA, 921 bp, Clostridium symbiosum
atggataacggaaatataatcagagaaacaatacaggagttttgccacagatggtttgaattgcgggacccggagggagcagcccgttttttgacggaagatattgactttgtgggaaccggtaacaatgagtttgccaggggaattgatgagatgagggaatatcttcatcaggatatcagagagataccggaaccgtttgtctgtgaatggtccgccatttatgagcaggcagttacagagaatgtgtataatctgtcggtaaacatgagtttgaagaattcgacttacggctggtttctgcggggctttttcacaatggtcagggaagaatccggctggcggatcaagagccttcattttgccgagccgggcagcagccagagggagggagagcattatcctctgacgcttgtggaggaaagcattgccagacaaaggcaggaactgctgaacgagtccgtacccggcggaatgatggggggatatatcggcgagggattccccttttattttatcaataagcagatgttaaactatctcggctacgaaagtgaggaggagtttgtcgaagatatcggcggactggtgtccaactgtatgcatccgggagacaggcggagagtcgatgaagaggtcgagtcccagatcagagagaatgaccggtatgtggtggaataccggatgaagaaaaaggacggttcttatatctgggttcacgatctgggaagagtggtgactgcggaggacggccgtcttgccatctcctcggtttgccttgatataacggtacagaaacacgcacagcaggaggtaatgaacctttataacaatatacccggcgctgtcttccgctgccgctttgacccggattactcagtcattgacgcgaatgacggcctgtttgaatatataggttat

SEQ ID NO: 1853 - DNA, 528 bp, Clostridium symbiosum
atgaagtttagtaagcagggcccgctcaaatttatcgggcatcttgatatcatgcgttacttccagaaggtgatgcgcagagcggacgtggatatccgttacagtgaggggttcagcccccatcagattatgtcctttgcatcaccgctgggagttggtattttaagtaacggcgagtatgtggacattgaagtgaattccacaaaggattccaaaacgatgattgaacagatcaacagggaaaatgcggagggattctgtgtactcagctacagaaagctggatgattccgtgaaaaatgcgatgtcacaggtggcggctgccgactatacgatgtggttcatggaaggatatgagccggaggatgtcccgcggtttatgaaaaatctgctggcattttgccacagcgataaaattgagattgtaaaaaagacaaaaaagggacaaaaggcgatggatttgcgcccttgcatctatgaggtccggctcacggatgataataccgggatttttatgaaagtttcctcg

SEQ ID NO: 1854 - DNA, 843 bp, Clostridium symbiosum
atgaaatatctaggctattacaacggaacttacggaccattggaagaaatgatgatcccgatgaatgacagggtctgctactttggagacggtgtatatgacgccacactggccaggaacggtaaaatctttgccctggacgcccacctggaccgcttttacaacagtgcgggccttcttaagatggaggttccttattcccgtgaagaactggctgaaattcttaaatctctgctgaaagagatggacgactcggagattttcgtctactggcagctgacaagaggaacggccatccggatccactccttcccggagccgccttccaaaccaaatctctggatcatgctgaagccgggttccctggccgcaccgtcaaaaaccatgaaactcatcacccaggaagataccagattccttcactgcaatatcaaaacactgaacctgattcccaacgtcatgggctatcagaaagcccacgaggccggctgtgacgaatgtgtattccacaggggcgacatcgtgacggaatgctcctcctgtaatatctccattttaaaggacggcgtgttcatcacacacccaaccgatcactatatacttccgggcatctccaggatgcacctgattgaacaatgtaaaaaactgggagttcccgtggacgaacgtccttttacggttaaagagatgatgaatgccgacgaagtcatcgtatccagttcttcccggctgggcctgattgccagtgagatagacggacagcccgtgggcggaaaagccacggatttgtggaaaaaagtgcagctttcctattttgagagatttaagaaagctactgagtaa

SEQ ID NO: 1855 - DNA, 243 bp, Clostridium symbiosum
gtgacggagacagccgcaaagacttatgatctgacaaaggttcatgaggcgaacaggaaattattaaaggaaattgaccgcatctgcaggaagtataaaatcaactatatgatggattcgggcacccttttgggagcggtacgtcatcagggctttattccatgggacgacgacgtggatgtggtatttacaagacagaactttgagatgttcatgaaggtggctcccagggagctgcctgta

SEQ ID NO: 1856 - DNA, 678 bp, Clostridium symbiosum
gcgccggaattccaggaggatgcgcctttgttcctggtggatatgcatgcgccgcttctgctgatgcagaatctggagacaacgctgaaggaaccgttttccagcaatcccagggtattaaaagccatttacaaagcgcatcatgatttgcagagaacgatgacgggtctgtatccggggcaattggttctgtcactttccgcaagcctgatatatcaccggcttgtagataaaataactactctgaacggggtgccaagagaaccggtggagccaagaatactgggtgagtatatgtgtgttcccttcggcaagattctgagaggaaaggtaatacctaatacggtgacaaaaacactccataccgataaggtatttgacccggaattgaaggaagatgccattgaagcattcccttactattcccctctgagcagccagataaaaggaatcaaatcctttgaccggcctgtaatcctggtggatgatttactgcaccggggaggccgttttgaggctctggaaccgatgttcaaggaagcaggggtggagatcaagaaagtgcttcttggactgatttccgggtatggacgcgatacgatggcgacaaagggagtggaggcagacagcgtttactttgtgcctaaccttaaattctggttcgtggagtccacgctt

SEQ ID NO: 1857 - DNA, 549 bp, Clostridium symbiosum
atggaacaatatattatgaaaggcggcaatccgctggtaggagaagtcattatcagcggcgctaagaatgctgccttggggatcttggctgcatcaatcatgactgacgaggatgtcttaattgagaatcttccggatgtaagagatatcaatgtacttttagaagcaatagaggaaatcggcgccgatgtagacaggcttgatcgtcatacggtccgtatcaatgcaagaaacattaaagaagtcagcgttgatgacgaatatatacgcaagattcgcgcgtcttattatttcatcggagctttgctcggcaaatataagagtgccgaagtaccgcttccaggcggatgtaatatcggcagcaggccgattgatcagcaccttaagggatttcgtgcccttggagccaaaattgaagtggagaagggcgctgttgtagcccatgccattgatctggtgggcagccatatctacctggatgtggtttcagtaggagcgactatcaatattatgatggcggctactctggccgagggggagacaattatc

SEQ ID NO: 1858 - DNA, 441 bp, Clostridium symbiosum
atgctgcaatttcatggaagtgaagaatatatcgcgtcggacgaactgatccgcagtgtcaatatcgctgctgctttaaagaaaccgctgctgttaaagggagaaccgggaaccggaaagacgatgctggctgaagcgattgcaaagtcccttggaatggagcttttaatctggaatatcaaatctaccacaagagcgcaggacggcctctatgtatatgacacggtacagagactttatgacagccagttcggaaccgagggagtaaatgatatcggcaaatatatccgtctgggcaagctgggggaggcgtttaagcgtgaaaagcagacggttctgctgattgacgagattgacaaggccgatttggaatttccaaacgatctgctctgggagctggacaagatggaattttatattcctgagacaggggagacggtc

SEQ ID NO: 1859 - DNA, 336 bp, Clostridium symbiosum
cctgtttttgactggttcggttacttattttatcccgttacactgcttttacagattccggaaccactcttggctgcaaaagccgcgttcctgggcctggcggaaatgtatcttccggttctcgtagtggccggcgcaccggagagaactcgttttatcatcagtatattgagcatttcgcaggtcctgatgtttacctccacgatcccctgtatcacagctacggaaattcctgtttcactcagggaaatgatgattatctggctggaacggactatcctttccctttttctgatagtaccggcagcatatctgctatttctctggatacaatag

SEQ ID NO: 1860 - DNA, 423 bp, Clostridium symbiosum
ttggcagggaaagcaggtgaggtgatgaccggatttacggaaaagcagagaaaagcgctgttgacagcaggcgttacggccgctgtctatctcagctttaaattcattctgcctctttttctcccatttctgatatcatatctgattgccctgattctgcgcccttccgccaattttctggaacggaagctgcgcgtgaaaagaagaggaaagacatatgcggttccgattggcgtgataggcggcattgaaatgattctgattctggctctgctcggggccggttttttctacggcggacggaggctgtttatggaggcgaaccaactcgtcaacgctgttcccgtctgggtgcagaatttcgatgaatggctgacgggaatgtgtcattccgtcgaaaccttctgccgcctgcaggaaggc

SEQ ID NO: 1861 - DNA, 672 bp, Clostridium symbiosum
atgtaccggattctcattgtagaagatgatgcggtaatagcatcggctttggaaaagcatttggaaacctggggatggattgttaagacggtggaaaattttgaaaatgttctgggggaatttacgtcatttgagcctcagcttgtacttttggatatatcgctgcccttttataacggataccactggtgcagtcagatccgggcagtctccagagtgccggtgatctttatttcttccgcctccgataacctgaatatcgtgatggcgatgaatatgggaggcgatgactttatcgcaaaaccctttgatctcacggtgctgacggcgaaggttcaggccctgctccggcggacgtatgattttgcgggacagagccggctgattgaacacaggggagcggttttcaactgcgacgacgggaccctgacgtttggcagtgaaaagatagagctgactaaaaacgaacacaggatattgatggtcctgctggaaagcaaaggaaaaattgtaagccgtgatgtccttatgacacgcttgtgggagtcggacagctacgtggatgacaatacactgacagtcaatatcaccaggctcagaaaaaaactggagcaggcggggctgtctgattttataactacaaaaaaaggaagcggttatctgataggatag

SEQ ID NO: 1862 - DNA, 753 bp, Clostridium symbiosum
atgaccagacaggcggccagattcggcgcggagcgtgcatgcgatacgattgaccgggtggaactcgaggggcctgtcaagaagctgtacggtaaaaaggacacatatcagtgccgggcactgataattgccaccggagcttacgcgcggccgattggatgcaggcgggagggcgaatttgtaggaaagggcgtttccttctgtgcgacctgtgacgccaatttctttgaagatttagaggtatttgttgtgggcggaggcgattccgctgtggaagaagccatatacctgaccaaatttgccagaaaggttaccgtaatacaccgcaggaatgagcttcgcgcggcaaaatccatccaggagaaggcattcaggaaccctaagatgaatttcatgtgggacagtgtggtggaagagcttcacggggacggaatcctgtccgggatgacggtcagaaatgtgaagacaggggaacttacgagagtggatgcggatccggatgacggtatgtttggcttattcggattcatcggcaacgtgccgagaagcgaattgtttgaagggctccttgacatggaaaaaggatatatcaagacggacgaagacatgcgcaccggcatttccggtgtctatgccgccggagatgtccgggtcaagagtttccgccaggtagtgacggcagcttcggacggcgcaattgccgctatgcaggcagaaaaatatatcgctgaactggacggccatgtttattga

SEQ ID NO: 1863 - DNA, 636 bp, Clostridium symbiosum
ttgaggttaggggactggctgagtattgactttattccacttattgaatataataaaagtataatatataatggaggtatgccaatgtcattaaaacatggtttactcggtcttttgaattacgggaatatgacgggatatgatatcgacagaacattcaaagattcactttttctattctggcaggcgcagacaagccaaatttaccgggagttaaacacaatggaaaagctgggatggcttacatcggaaattgtaatacagacagataagccaaacaaaaagctctattctatcaccggcgcaggcaaacaggaactgagcaactggcttaatgaaaatagtttagacaatgaatttcgatcacgcagcacttttttaatgaaactcttcttttcaggagagagaagcatttcggaaaatatcgcgatgctgaaggactataaagccagatgcctgaatgaactggaggaactggataaagcaatgggcaatatagaacggtacaggcagatcgcagaggtaaatcaggattctgtatactggcagctcaccgcccgttttggaacactgcatatcaaagcctgccatgacttcgcagaagaggcgattaaaaccttggagggtttacaatga

SEQ ID NO: 1864 - DNA, 585 bp, Clostridium symbiosum
atgaaagatgcggaggtaaagtacatgcctgtttacaaagtagaaatctgcggagtcaacacttccaaactgcctcttctcagcaatgatgagaaggaagagttgtttaaacggattcttgatggcgatatggatgccagggagcaatacattaaaggaaatttgcgtcttgtcttaagcgtcatccagcgtttttcaaacagcagcgaaaatgttgacgatcttttccagattgggtgcatcgggctgattaaagcgatagataattttgatataacacagaatgtgcgcttctccacctatgcggttccaatgatccttggtgaagtaaagcgttatctgagagataataattcaatacgtgtcagccgttccctgcgcgatactgcctacaaggccatctacgcccgtgaaggactgatgaagcggaacttaaaggagccgaccatctgcgaaatcgctgatgagatcggagtcagcaaagagagcattacctatgcgcttggtgccattcaaagtccggtaagtctttatgagccggtctatacagacggcggcgatcctctctctgtcctggatcagctt

SEQ ID NO: 1865 - DNA, 774 bp, Clostridium symbiosum
atgcagcttgtacgtctcagaatcagaaattacaaagtgatacgtgatatggagatttgtgatatcgaaaacgctctgattctggtgggaaagaataatacgggtaaaacctcggtccttgatgcaatccgggttgtatcaggagtggaggagcttacgaaagccgattttaatgaagcaaagcagaatgtggaaatcgaggtgactcttgagattacgccggaggatcggagaatgatgcaccgggccggaatagtgagccggtataaacggtatgaaatctgggaaaatgatttctaccggaagcttccgtcctgtaagggagatttgctggaatttacctatacggccaattatgaggggacggtccgctatacggacaggataaagaaagataacccctgcatcagggaagtgcttccaagactgcattatattaatacggcaagggagcttcaggcctttcagaatgatctgctgcttttccatgataaccggattatgaaccagctgcgctccggccgctgtctctttgatgcggctaaagagtgcagacactgctttcagtgtatcggactgatcaaccagaaaaagccggaggaactggatgcggcggagacacgaaagcttctggaatataagctgtatcagtcaaatatgggcgatcttgtgggacgcatcaatgacaattttcataaaaacgggggatatgacgatatcctctatgaactgcgctgtgatatcgatcagatgtttcagattgaggtgaagact

SEQ ID NO: 1866 - DNA, 597 bp, Clostridium symbiosum
atgaaaaaagtagaaattaaaggaattatcccgccaatcgtaacaccgatgaatgaagatgaatccgtcaatgagaaagaactccgcaaccaggtgaaccggcagatcaaaggcggtatacacggacttttcccatttggcaccaatggtgagggatacatattaaacgagaaagaaaaagaagaagttttaagtattgttattgatgagacaaaaggccgcgtgccggtttacgcagggacaggatgtatcagtacaaaggataccatccggcagtctcagatggcagaatccctgggagccgatgttctttccatcatcaccccgtcctttgccgcggcatcccagaatgagctgtccgaccactataaggcagtggcggaggcagtggatatgccaattgttctatataacatcccggccaggacaggcaacgcccttgcgccggcaaccgttgcaaaattaagcaaaattccaaatattgtaggagcgaaagacagctccgggaactttgacaatatgcttcagtatatcgaacagaccagggacagcaaagactttgcggtgctttccggcaacgattccctgattctctgg

SEQ ID NO: 1867 - DNA, 534 bp, Clostridium symbiosum
attcttggctatgagatgttaaaagcactgagagaacaggattccacggaaatacatctgatagtcacggagggcgccaaacgcagcctgtcccttgagtcgaaaatgactgtcgactccctcttctctctggccgacgcagtatatcacgaaactgaaatggaggcccctgttgcaagcggttccttccataccgacggaatgattgtcattccatgcagtatgaaaacactttccgccatcgcaaccggttatgacagcaatctccttgtcggggccgccggcgtatgcctgaaagaaaacaggcgcattgttctggttcccagggagacacctctgtcccgtgttcacctgcgtaatatggaagcggccgcttcggacggttgtattatcattccgcctatgctgaccttctataataatgcaggtaccctgcagaaacagatggaacacatcatcggtaaaattcttccacacttcggcatgcaaagtcagcgtttcgtaccgtggacaggaaagccgaatataatgtga

SEQ ID NO: 1868 - DNA, 1122 bp, Clostridium symbiosum
gggctcaataccgccattgcaatcggaatgctggtggcggccgtgggaatcggtctctgcttcccgatttacataacaaggccaacctggcatattattatctttatttatgtgctgatcgcttcggtagcgccagtgtggagcctgttacagccaagggattatttaaacagttatctgcttgtatttatgatagtcgcagcgattgcaggcgtgtttatctccaatccttcctgtaacctgaattcttttaacggatttaatgtggacggacagtatatgttcccaatcctttttgtcacaattgcctgcggagcggtgtcgggattccactctctggtatcctccggtaccgcgtccaagcagattaaaaatgagaaaaatatgctcccggtgtccttcggcgccatgctgatggaaagcatgctggcaattatcgcgctgatcgcagtggcatcctttgccgacggggaagcggcggcagccggacttacgactcagcctcagattttcgccggggcgattgccaacttcctgacggcggccggacttccgtacagcctcgtgtttaccctgattaatcttgcggtttcggcatttgccctcacctcccttgactccgtggcccgtgtgggacgtctttcattccaggagttttttatggaagatgagacggaaggaaaggaaaccggctcatttatcaagcttatgacgaataaatattttgccacagccctgacgctgattctggcctatctgctggcaaaggtcggatacgctgagatatggccgctgttcggttcggcaaaccagctcttatccgtattagctctggtggcctgcgccgtattcttaaagaagacaaaccgtcagggagcgatgctctggattcctatggtatttatgatggcagtgacatttaccgcacttggaatgacgatattcaaactcggcagcgccttctttactacaggcctgagctttggcaatacgcttcagcttgtgtttgcagtcctcctgctgattctcggcgtgattgttgcaatccagggaatccagaagctggttgggaatgataaggctgcggacggtattgccggcaaggaaaaagaattagcataa

SEQ ID NO: 1869 - DNA, 696 bp, Clostridium symbiosum
atgaaacgagtattgcttaaattaagcggtgaagctctggcaggcgataagaagacgggctttgacgaagcgacggtaaaggaagttgcccgacaggttaaaatagcagtttccgaaggcatcgaagtcggtgttgtcatcggaggcggaaatttctggaggggccgtgagagtaatgccattgacagaacgaaagcggatcagattggcatgctggctactgtcatgaactgcatctatgtgtctgagattttccgaagcagcggaatggacacacagatcctgactccatttgagtgcggctccatgacgaagcttttttccaaagacagggccaataagtactttaagagagggatggtagtgttttttgcaggcggtacaggccctccgtatttctctaccgatacaggagttgccctcagggcgattgagatggaggcagactgtattcttttggcaaaggccatcgacggcgtttacgacagcgatccgaagctgaatccggctgcgataaagtatgacacaatttccattcaggaagtaattgataaaaagctggctgtagtagatttgacggcgtctatcatgtgcatggagaatcatgtgccgatggcggtattcagccttaatgaggaaaacggcatcatcaatgcgatgcagggaaaaataaatggtacggtagttaccgcataa

SEQ ID NO: 1870 - DNA, 528 bp, Clostridium symbiosum
atggcccttggctcccagaccatcttcacccagaagatgacggatgcgatcgcctctaccaatgtggcgaagctgacggacggagagcaggccggtacaatgatgggcggagattacggattgactctttataaggtgaagggaaaatggaagattaataacttttacctggatgcgggttcaaccgtaaattccaattcagtaaatatcagcgatatgaaggagatggcggaacaaatccagaagacattttcatacaagagcctggaaaccttgtctaagatgtgtaattatccaataattatcaccaattccaatggaaagatgacggaaattaagtcagccgagcagctgatagcccttggtgaagataaggtgttcacagaaaagctgagcaaagagattgataatacggatatcacgcgtctcgaagaggttggaagcgccggtgttatgatgggcggagattcgggactgaatatgtacaaattcaacggttactggaaaatcaaccagatttaccagtag

SEQ ID NO: 1871 - DNA, 435 bp, Clostridium symbiosum
ttgtctgccgccaaaataaagattacaatagaattagagtataaatccggggtccgaaagctatcggagagtttggtaatcccggaagaatggagccatatggaggcagacaatatggggacagtggaatggcagagggtcgttgatctgacccaaattatggacagaagaaacggaaaagacaggcttgcagagctgatagagctggcacggcaggagcagaagatgctgactgtagtgttttatgacattaacggactgcaccttatcaacgatacatatggacatcatgagggggataacctgcttttatacgtatctaaaattattgaagaggggctgacggagccggacctgcttttcaggctgagcgaggatgaatttattctcgctctttatgatgaaacggaagacggggcggccgaaaggatgtag

SEQ ID NO: 1872 - DNA, 957 bp, Clostridium symbiosum
gtcgagagctgtcagttcgcgaaaaagcacggcttagaatgtctgctgattcacacaggcaaaccggctttgtggtatgcgttcggtgagacaaagcgtgttttccggatgaaactgtaccagcagcgcaggatacttctgatacagactgtactggacaattcttccgaaggaattgttcttgtggggccggacaagaaaatcatgctgtataacaataaggcgcagaatattttaagtataacttccgacatgacggaagaaaatttagaaaaactgttcggcatccatcctcttccggcgtttttgtgcgacagtgaaagttattataacgaaatcatcgtttgtaaagataaaaaactgtcggttaataagttcccggtccatctaaaagacagtccggtctgctacgtggtgtcctttcagaatgtcagccagctccaaaatgcggagaaggtcattcgaaagaaagtaaaaaatcttggatggacggctaaatatacttttgacgatattatcggcagcagcccggccatcagagaattaatacggaaagcccggcgctatgccgagacagattcggatattctgcttatcggtcaatccgggacaggcaaagaattgctggcacaaagtatacataatgcaagtgaccggaaaaaggggccttttgtggccatcaattgtgccgcgctcagccaaaatctgcttgagagtgaattattcggatatgtggacggcgcctttaccggtgcacagaaaggcggtaaagaaggtctgtttgaacaggcacataccggaacaatatttctggacgaaattggagaggttcctctggagctgcaggcgaaacttctgcgtgtgattcaggagagagaggtgatgagaattggtgataataaaatgatccttgtcgatatacgcattgtggccgcaacgaaccgggatctgaatcag

SEQ ID NO: 1873 - DNA, 1185 bp, Clostridium symbiosum
ccggtacagaatgacaaatgccttgtaattgccaatgaggacggcagcggtgcaagagaagttccggaggtcacaaatacctcctccgttctgtttgataagggatttttctttgtgttattccaggacggaaacggaaatacacagtgttaccggtacgactcaaagactcttgagaagacaatgctgtttgaatcaccggataacccgcagttaatccagtacagggacgggtatctctatttcaggacgaataaagcttatcagactgtcagtgagggaacgcagttctataaagccgaggtggagaccggggaagtttcaaaggcggcggctatcatgacagagccgggaacactgaatatgtatgacgataccggcaacttttttgtgacaggggatgccgtctactgtcaggagataaaggattacggggtttacatcggcaagacattgctcaatgcaaacgatggcggagagaagacactgattaaaccggctctctatcagtcgccgattaacaagctgggacatgtggaggcggaaaagaaagaactgccgtgttcctgcggcgacaagacagcgctggagatgtatgtggagaagcttgtattcgatggtgacggcgatgcgatccgagcgatgaataaagttatggaggagcggcagcaggcgcttcttaaatcaggtgacgacatggtttcctatctggacgaagcgtgggttcacagttccgacttccggaccacaaccctgacatacgaaatcgccgggattaattatctcgatgcgcgttatgtctgtgtagaggcggacggatacgagtattccggcggggcacacggcaatccgttcagagattactttgtctttgaccgggaaacaggaaagcagttaacgctcagcgatatcgtcggcaatcctgtcgaggagctgcaaaagattgtcagcaaggcattccgtgaactggctgaaaaaacaaactttgcattcgaagcgcctgaggatttggaacatacggttgcagatgacgtgagctatgattcaaaattttacctgacgcccgaaggcttggtattttattacactccctatgagatagcgccttatgcggaaggctttccggaagtgacaattccgtatggcgatttagatatgaagattgaaataaaaacagaaagctaa

SEQ ID NO: 1874 - DNA, 444 bp, Clostridium symbiosum
ttcgttctgtggggagttctggtgggagcgtatttctactactctctccgcaccgctatccggcttatgaaacagaaaccaaaaggaaccttcctggttccctcttcacttgtcctgcttttttgtgccatcactaccccctatctgccggaggagatgccgtttaaatcgtttcttcatattatatttgcatttatggccgccgttcttctgctggctagtcttttcctgattatcctgaaggaataccgcacggatccgtcccgctacggttcctgcctctttgcgtgggcagggatcgtagcaggttcggctttcctcctgattctggtcggaatcgtcagcagcgcgctggaaatttatttcaccatcacatcggtaatcctgacccgcaggctgctggtgaaactgaagtccggaggaacggaaccgtgtgaacagtga

SEQ ID NO: 1875 - DNA, 408 bp, Clostridium symbiosum
atgagttccagcctgcgcaaggagtttatctcaaagtggggaaaatataaattgacggcgccagtcaggcgggcggatattgtgaagagccattttatcagtcagttaatctggctgtttgtcggaatggcttttgcaggcgcggtggtggggctttcatggctgttacatggttttccctttgaccgaaatacggatattcttcttctgtttgccgcaggagttggaatcagtctcctgatggtagcaatctttttcccgcttttttatttgacaggggaagagcggagcgaagtggtattgggcatcagcctgcttgcggcaatcctgatttttatggggcttgtcagcctgatcaatctgtatttcggcccggaaccggcggtatggcaggtgattacaagtgcg

SEQ ID NO: 1876 - DNA, 774 bp, Clostridium symbiosum
atgagttggaaaagagcatacagggaagggctgaaaagcggtattcccattggaatgggatatcttcctgtttcgtttacatttggatttctggcggtttcaggcgggctgccggtttgggtggcggtgatgatatccctgactaacctgacgagtgcgggccagtttgcgggaacgaatctgattctggccggttccggatattttgaagtggcgctgaccacatttgtaattaatataagatacatgctgatgtccctttcactttcccagaagctggaacggaccacaggtacgctggaacggctggttcttgcgtttggaatcacggacgagacgttcgtcgtcagctctctgcatgagggacaactgaaagctccttttatgtttggattgatgacaatgccgattctgggatggaacctgggcacgctgctcggcggttccatatcggcgctgcttccccaggctctgcagaatgcgatgggaattgcactctatgcaatgtttattgcactgatcattcctgccgccaggaaatctgtagctgtactgtgcgtaataggcgcggcggttgcagtgacatgcattttaaaatacataccggtttttgggtttatctcatccgggttccgggtaattctggccacgatagcagcctctgcgcttggggcgcggctgtttccctcggatgagtacggagaggaaaaggaagacgggcaggagactgcggcagcgccggaaataacagaagagggggggagttttgagtga

SEQ ID NO: 1877 - DNA, 747 bp, Clostridium symbiosum
atggatgagctggaaaaggaagggtttgaggtacaaagagggctggttgggaaacatcccaagtttgaccacaaaattgatatgccgacagcgttcaaagctgtttttaagggaaaagaaggcggccctgtcattggtatcatgcttgagtatgatgctctgcccaatggccatgcctgcggccataatcttatcgcatccgccggatttgcggctgccctgggattaaaagaagtctttcagacaacgggatcggttattgtgtttggaacccccgcagaagaactggaaggctccaaacattatattctggaaggcggatatatggatgaagtggatcttatgcttaccagccactatggttcggactggggttcggaagttaccggaaaggccatcgtatggccgactcatgataactggctgactttcaaaggcagatcctcccatgcttcatcgtcaccggaaaaggggagaagcgctttagacgcggttattctcaccaccatgggtttggaatttttaagagaacatatgctggaaacaaaccggattcactacatcatctcaaacggaggtacagccgccaattccgttccggatcttgcaactcttaatgtggagctgaggaaaaacgattcggccgaactgaatgcattaatgaaacgagttgacaacattatcaaaggcgcagagctgatgacagataccaccgcactctataaatgggacgctccatggtactgc

SEQ ID NO: 1878 - DNA, 360 bp, Clostridium symbiosum
atcgcagagctttcccggtatatatccgaaaaaccgcttctggaaaaggtccatatatccgatatctgctgtgttgtcatgaatatggtgacggacagtgtcgaagcccttgtaaaaaaggatgaaatactggccaggaaagtgatcggagacgacgacattgcggatgagctctttgtcaggataaaagaagagcttgtgagcctgattcaggaaaacaggacagagccgcaggcaatcctggatcttctgatggcggcgaaatatttcgagcgggcgggcgatcacgccgtaaatatagcagagtgggtggaattcatcgtgaccggcatgcacgacgacagagaatgcgggcattaa

SEQ ID NO: 1879 - DNA, 504 bp, Clostridium symbiosum
tatcaggatgatacgatccagcacgcaggagttgtcgtgggattcggcggaatcgcagggcacacgtttatcggcctgcaccgcgcggagaacagctatttccaccgtgcgatgagcactcaggactacagtgccgtgacggctgcctgtatgatgagtaaaaaggccctttttgaagaggtgggcggtttttcggaagaactggccgtcgcttttaatgatatcgattattgcatgaaggtgcaaaaagccggaaaattagttgtatataatccatatgcccttctgtatcattatgaatccaagtccaggggactggaggacactccggaaaaggtggagcgttttaacagggagattaagattttttcggaaaaatggccggagattttaaagaacggcgatccgtattacaatccaaacctgactctcagaaagtcgaattttgccctgagggatttaaaaaaggaaaagataggggaaccatacaaactggatatttaa

SEQ ID NO: 1880 - DNA, 633 bp, Clostridium symbiosum
ggcccggtcattgcctctttcttgctgtccttcgtcatggcggcaattgtcatccgtctcttccctctgagggggatgccggatacctttatagacggaacagaacgggaaggcgaagaacgcagaaaattcagcctgtccttattccgccatggatataaggccgccctaaaaaaagcggaagatacgcctgtttcatcggtttttgcaaaagctctgttggaagtgcttgtttttgcccagaaaatttcggcctatataatggcaatctcctccatcacctttctcctggtagaatacacttcgctgtttaatattctgggggttccatttatacctgttctgaaattatgccaggtccccaacgccgcagaaattgccccagccatgatccttgggctggcagagatagccatccccgccacattcatatccacactgtccatttccgtggaagccgccttcttcgtaatagtcgtatctgcgcttcagattatcatgttttccaacagcgccgtatctattatggagtcagaaattccgctggggattggtaagcttatcctaatcttttttatcaggacactgattgccataccaattgtttcggtcgtgatgcatatcctgttctga

SEQ ID NO: 1881 - DNA, 417 bp, Clostridium symbiosum
atgaataaaaaacggacatcttatgcttttctgatggaaatgctgtgggtatgtggttttttcgcagtggctgcctgtattttcgtacttgcgtttgcaaaggccgaccggctcagccagaatgcggaaaacttaaaccacgccgttctcgccgccgagaacgcaattgaaactgcttttgccgaatatgacgaagcgtctgcccccagtgagacacattccggttttgacagatattggaagatatgtgaaccggccgatccggaagctgcctattttatgaaaattaattcatacgcggcagaaggactgcttcacgtatctgtggagatcagcgatatcagaggaaaaggaatggaaactatctataccttgagcggcgcccgaagtctggccgctgaaaggaggcttccatga

SEQ ID NO: 1882 - DNA, 810 bp, Clostridium symbiosum
atgattgaagcaatcaacctgacaaagcgatttgacgatatcaaagccgttgatcatattaatgcagtaatcagagagggcagcgtatttggattgataggcacgaatggtgcaggaaagagtacgtttctcagaatggctgccggaatactgaaaccggatgagggcagagttacgatcgacggagaagacatttttgagaatgataaggtaaaatcaaaatttttctatatatcggatgagcagtattttttgaataacgcgactccgggtgagatgatgaagttttacagaaatgtatacaggaattttgacgaaaagcgatttttcggcctgctttccaatttcgatttggatgcaaggcggaaggtaaatacattttcaaaaggaatgaagaaacagctttccgttcttcttggaatttgtgccaacacagactatatattctgcgatgagacatttgacgggctggatccggttatgaggcagacagtgaaaagcctttttgccaatgatatggaggagaggaacctgactccgattattgcctcacataacctgagggagctggaggatatctgtgaccacgtgggactgctccacaaaggaggaattctgctgtcaaaggatctggatgatatgaagctgaatatccataaggttcaatgtgtacttcttccgggtacagagccggaaaatctgcatggaattgacattatcaggacggaacgcagggggagcctgctgactctgaccataagggggaaaaaggaagagatagaagcggttatgcagaccttccatccggta

SEQ ID NO: 1883 - DNA, 531 bp, Clostridium symbiosum
gagaagccggccgggctggaatcgcaggccagccgtggatttgagccggatatggtcagtgaaataaagaaccatttgaaaagagcggagttatccaggttgtccacaaagccgtccacaaaatcgtccacacggcctgtggagccctatgtcggagttatccacagactggacaagcctgtcgggggaatcatggtttacgctaagaatcagaaggcggcagcctcgcttagcaagcaggttcaggatggccggatgaagaaaatatacaatgcggtagtctgtggaaaacttgtggatattgtgggtaactatgtggattatctgttgaaagatggcagaaacaacttctcatttgttgtggataaagacacgcccgacagcaggcgggcagaacttgtctaccgggcgctggatgtgaagacagaggaagaaagagagatttcccttgtggagatagaactgctgtccggcaggcaccatcaaatccgcgttcagttttcagcccatggaaatccactctggggagac

SEQ ID NO: 1884 - DNA, 549 bp, Clostridium symbiosum
atgccattttttgtaagaattttgacggttgttttgacagggagaatattgtataatcagttagtacgcggatcaatacgcgaaaactatgaaatgaaagggaatgccgtggatcattacgagactctcaatgaagtgctggtaaagctgttccgtgatattatggatatcgagcaaaaagctataataacacaggaatttaaggatatcaccaataatgatatgcatgtaatagaagcgattgggatcgaagctccgaaaaatatgtcctctatcgccagagagctgtcagtgacggtgggtacccttacaattgcaatgaacagtcttgtaaagaaaggctatgtggagagaacacgcggcctggaagacaggagggtcgtgtatatatccctttcagaaaaaggcagaaaagcttacgggcatcatgcccagttccacaaagaaatgataaacagcgtaaccagcgagcttaccaaagatgagctggagactttgataacagcattgtccaagctgagaaactggtttgaccactggaaagagtag

SEQ ID NO: 1885 - DNA, 363 bp, Clostridium symbiosum
atggaaaagagagatctgatctgtatcggctgtcctttgggctgtccggtgagcgttacgacagacggagacaatattaccgtgacaggaaatacatgcgctaaaggtgaggcttacgccaaaaaagaggtgaccaacccgacaagaattgtgacctccagtgttattgtggaggatgggacactgacaagggcatccgttaaaacagaaaaagatatcccaaagggaaagatatttgacatcatgaaagagatccgggcagtcagaatgaaggcgcctgtccatatgggggacgtcattatccgtgactgtgcgggtaccggcgtttccattattgcaacaaagacggtagaagccgtataa

SEQ ID NO: 1886 - DNA, 705 bp, Clostridium symbiosum
cccgtatatgaagggatgggcgctgtgggagcgacggagattggagtttcggccgcaacagtcggcatgattctgggaagcctcacgggtggaccgctggccgtaatgctgattaaacggtataaattaaaagcggatccgcaggacggcgcgctgcaggccggaggcagtgaggagaaaacggcgctggatacgggaaaacttttaagcactatctgtatgataacgattatcgcagcctgcggcatcccgatttatatgcttttgagcatgataccatatattgaaatgccgtattttatcggatgtctttttgccggggcgattgccagaaatattctggaggctttccatgtggatatccatctgccggaggttgagacggtggagcatatttcactggatattttcctggcaattaccattatgaccatggctttgagcagaattacaaatgcggttggcccgctgctgattattctgtttgttgtgaccattgccactctcgttttcacttatttcataggattccgtatgtatcacggcgactataatgccgcctgtatgtgtgcagggctgattggtatgggaatgggatccggttccaatgcggtggctaatgagagagctgttatggataagtacggatattcccatatcgcctggatattgtatcctgctttttccgttttgtgtgttgacatt

SEQ ID NO: 1887 - DNA, 540 bp, Clostridium symbiosum
atcacggatttgaaagaaaaaacagaaagtttgcggagggccgtcaacctggactcatttacgggtctttataataaagatcacacgatagcccttatcaataatattttagacatgggcacgcatgtgaaacacgctctcgtgattctggatatcgataattttaaaaaatttaacgatacttacggtcatgaccagggcgataaaatcattaaagcattgtcacagaaactcaaaaacacgttcagaaaaacagatattgtgggacggtttggaggcgacgaattcattgtatttatccaaaatatcgaagacgatcaatggctgcgtgataagctccatcatcttatccgttttgaagcaggaacatttacctgcacgagcagtatgggagtttccgtttttccgttggatgcggcaaactttgaaatgcttttcaaaaaggcagacattgcgttataccacgccaagtccgcaaaagagagagctgtgtttttttcggatcttgacaggaatgaaaaaaaggattctctgaggtaa

SEQ ID NO: 1888 - DNA, 390 bp, Clostridium symbiosum
atgctgtctgaactgttacagcttatcatattaaaggggaatgtatccatgaaaaagatattgattgtagatgacgacaagcgtgtcgtgagaatgctggaagaatatatgaagctctataatttccagaccctgtgcgccggaaacggcaaggatgcactcgcgctctatgatgagacggtggatctcattatcctggatatcaatatgcagggaatggacggagtggaggtgtgcaggcggatccggaaacagggaaatgttcctatcatcatgctgagcgccaacgccgcctcctttgacaaggtggaggccctgggcgccggcgccgatgattacatagtcaaacccttcgatccggtggagctgctcgccagagtacgcgcccat

SEQ ID NO: 1889 - DNA, 402 bp, Clostridium symbiosum
atgatagagataatgagtctcaataagacatataaagcgggaaacagggcgcttaaaaatattaatatcacgatagaggacggtgagtttgtctttattatggggcgcagcggttccggtaaatccacgcttatgaagctgcttttaaaggaagtggagccgtcatcagggaaaatcatcgtgaacgatatggagctggggaagatgcccagaagatatgtgccgaaatacaggaggcgtttgggggtagtgtttcaggacttccgccttttaaaggataagacagtgtatgaaaacgtagcctttgcccagcgtgtaatcggtgtgccgaccagaacgattaaagagtcggttccggagatgctcaggctggtggggctttcatcaaaatataaatcattc

SEQ ID NO: 1890 - DNA, 519 bp, Clostridium symbiosum
gcaaatccggaggataccggcgtttataacagccatgtgaaagaatttgtggattatatccattccatcggcggtctttgcggatacgaccaggcaaatgcaaacgggctgttgggcgtcacaagggcaagagacgcaggctttgatatgtgcttcttcaatctccacaaaacattctccacgccccacggctgcggcggtccggcctgcggagcaacgggagtgcagaaggatctggttcaataccttccggctccgattgtggactatgacggtgagaaatatttccttaattatgacatctgcagtaatccgtgcgcagtgggtaaagtaagggaatggtacggcgtggctccggttgtgctcaaggcatactgctggatccgcagcatgggaccggacggcctgtatcaggtggccaagaccgcagttctcaataataattatatgtttaagaagctgatggagcttccggaggtgactgcctattatgaggacggcaacaaccagagaatcgaa

SEQ ID NO: 1891 - DNA, 828 bp, Clostridium symbiosum
atggaagaacaattattagaggtgaaaaacctgagaacctctttttttacccacgtgggagaagttaaagcgatacgggatgtaagcttttccatccgaaaaggggaagcggtaggtattgtgggcgaatccgggagcggcaagagcgtaacctccctttctatcatgcagcttcagcatccgggtaaagtgacgggaggacagattctctttcacggcgaggatctgctcaaaaaaaacaagagggaactccgacaaatacgaagcagcaaaatagccatgattttccaggatcccatgacctctttaaacgccctgattactgtcggggcccagataagcgaggcaatcctggagcatgagaagatctcaaagaaagaggcgatggagcgggctgcagaaatgctccgcctggtcggcattccggacccggaggaacggttacactgttatcctcatgaattttccggcggaatgcgtcagcgcgtcatgattgcaatggccctatcgtgcaggccggaacttcttatcgcggacgaaccgaccacagctcttgatgttaccattcaggcccagatactccgtcttttaaaggagctaaaagagcgtaccaatacggcggtgatcctgattacccatgacctgggagttgttgccagctcctgcagccggattatcgtaatgtacggaggacagattatggaaaccgggacggtggaggatattttctattcaccgctccacccctacaccatcgggctgctgcagccgagaccgaaggcgggtggaagcagggaacgcctgagctccatagcgggaacccctccg

SEQ ID NO: 1892 - DNA, 501 bp, Clostridium symbiosum
atgagaaagaaaaaattcagcattacgcagctgattctcactgtttttatgctgctcctgacactgacaatgattgtgcctcttttgcatattctggcccgttccctttcggatccgcttcagtcggccggaatgagcagcctggaagtaattccgagaggattttcactgattaactatcaggtgctgttcagcaacaagacactggtgccgtccatcttcaattccatctttatcacggtggtcggaacatttttaaatattgtactgacggcgctggcagcttatgtgctgacacgtcccggcctggtcggcaagagagtgctgatggtgttctttatcatcatgatgctgtttgaccctggaattgtcccggagtatatgaccgtaaagaaaatcgggctgatggggagccagtggtccgttatcctctgcatggcagttaacgtgtattatcttgtcattatgatgcgttactttgaggatgtgccggtgtcgctc

SEQ ID NO: 1893 - DNA, 729 bp, Clostridium symbiosum
ggggaggctcacattatgattagggatattacaatcggacagtactatccggtagattcaccgatccaccgcctggatccgagaacgaagctgtttggtacgatgatatacattatttcactgttttttgccgataatctgtggtgctacctgattgccacactgtttttgaccctggtagtcagactttcgaaggtgcctttcaaattcattgtgaaggggctgaaagcaattgttttcctgctgcttatcagcgtcagctttaacctgtttctgacggacggccgggagattttccggctcggatttctgaaaatcacggccgagggcctgagtctggccttttttatgggcctgcgtctgatgtacctggtgcttggctcatcgatcatgacgctgacgacgacgccgaaccagcttacggacggcctggaaaagagcctcggatttatgaacaggcttcatgtgccggttcatgaggtctcaatgatgatgtcgattgcgctgcgttttattccgattctgattgaggagacggacaagattatgaaggcccagatggcaaggggagccgactttgagacgggcaacctgatgcagagagcgaagagcatgataccgcttcttgttccgctgtttgtctccgccttccgccgtgcaaccgatcttgcgatggcaatggaagccagatgttacaggggcggtgcgggaagaacgaagatgaagcct

SEQ ID NO: 1894 - DNA, 435 bp, Clostridium symbiosum
gtgattgctatgttcatgggtgaatacaatcatacaatcgatgcgaaggggaggctgattgtcccctccaaattcagggaacagcttggagacgaatttgtcgtgacaaaggggttggatggctgtctctttgtgtatgataattctgagtggaaaaactttgaagaaaagctccagtcactgccgcttaccaatacgaatgccagaaagttctcacgtttttttctggccggagcttctgcctgtgaggtggacaagcagggaaggatactccttccggccgtactcagggagtttgcgtgcctggagaaggaagtggttctggttggtgtgggaagccggattgagatttggaataaagcaacctggaccgagaagaatgtctatgacgacatggacgaaatagcagagaacatggaaggccttggaatatga

SEQ ID NO: 1895 - DNA, 798 bp, Clostridium symbiosum
gagctggagggggagataggccttaccctgttccgccgttccaacagggggattgaacttacggctgagggggaagagttcctgagctatgcaagacaaattctggaacagtaccgtcttatggaagcgcggtatatagagcggaaagcttttaaaaagaaattcagcgtctccatgcagcactatacctttgccgtggaggcgtttatccggcttgccgggaaattcggcatggacgagtacgaatttgccgtccacgagacgaaaacgtttgaagtagtggacaatgtgaaacgccagaaaagtgagttggggattatttacctaaacgattttaacagaaaagccctggaaaaagtgctgaaagacaatgaactggagttccatgagatgtttacctgcggcatttttgtctatctgtggaaaaaccatccccttgccggcaggacggaaatatatttcgaggaactggaggaatatccctgcctctcctttgaacagggggaacagaattcattctattttgccgaggaagtattcagcacccgggaatataagcggatcatcaaggcggatgatcgggccacgctcctgaatctgatggtggggctgaacggctatacactctgctccggtattatctgccgggaactgaacggtaatgaatatacggccgtaccattaaggacagaggatgtgatgcatataggatatattaaaaagaaaaaaataccgatcagttatattggtgagatgtatatcagggaactcgaggagtaccggaaggatatcctgtaa

SEQ ID NO: 1896 - DNA, 846 bp, Clostridium symbiosum
cgcgtcggcggtccggaattttttgtgacggaggcctgcgaatatacgaacagctttctctcattttatccgaccatggcagttatacttaatatagaagaagaccatcttgatttcttcaaagatatcgatgatatccgccgttcgttccggcagtttattgagaaagtaccggagaacggaaccattatcatgaacgggaccatagagaactggcgggagctgacggccggtgcggccggaaaggttgttacattcggaaattcgaaggaaaatgattacagctttgacgcggttgtgtatgatgaatatgcaaggccttcttttgatttttatataaaaggagagaaaaaggagcggatcagtcttggagtccagggggagcataatgtatacaatgcccttggagcaattgcagtggcaatggagtccggggccgggctggaggctgccggcagaggacttttgaaattcacaggaactaacagaagatttgaaaagaagggggagctgaaagggatcacgattatcgacgactacgcccatcatccccaggagatagaggcaacactgaaagcggctgagaattatccgcataaacgtatttgctgtgccttccagccgcatacttacaccaggacgaaagcatttatgaaggagtttgcacaggctctttccctcgcagactgcgttatgctgactgacatctatcctgcaagggagactgacacgctgggagtcagttctgccgatattgttgcgcttttaaaggaaaagggagtcgatgcctggtatctgcccacatttgacgatatggaaaaatttattttggaaaattgtacacaa

SEQ ID NO: 1897 - DNA, 483 bp, Clostridium symbiosum
atggctgccagaagaagacatcctgaatatgccggaacgtatgtagacggcaataccgtgagaaaagtaaatagaaccacaccacagacaaagccggagcgcagggtacaggacgactataaacgcagccatgttgtacggaggaacagggacaaagctctctatatggacggtccgtatgtgtttgctctgaccatagcagcagtcattacgctgtttttatgtatgaattacctgcatatacaagcttcgattacatcaagaatcaataatatagaaacgctggaactgaaactggaacatttaaaatctgaaaatgatgcccttcagacaagaattgacacttacgttgatttagaccatgtatttaaggtcgctacagaagaacttggcatggtatatgccaacaagaatcagattcttttgtataataaaacggaaagtgagtatgtaaggcagtatgaggacatcccaaaacactaa

SEQ ID NO: 1898 - DNA, 606 bp, Clostridium symbiosum
attacggattttgaggagaagacgatggcggcgacctccaatacgatttcctgcggaatctacgtgataagaaggcgccagctaatcgaactgattgaacgctgcgcggcggaagacagatatgattttgtaaccgatattctggtgcgttataagaatctgaagaggatttatgcatataagcttccgacctactggaacaacatcgcttccgtggacgcttattacaaaaccaatatggatttcctgaagccggaagtaagacactacttctttaaagaatatccggagatttattccaaggtggatgatctgcccccggccaagtacaatccgggcgccatgatacgaaacagcctggtatccagcggatgtatcctgaacggaacggtggagaattcagttcttttcaagaaggtctatgttgggaataactgtgtaattaagaattctattatattaaacgacgtatatattggggacaacactgtaatcgagaactgtattgtggagagcagggatacaatccgtgccaatacgacgcatatcggtacacctgacaacttaaagattgtcatcgagaaaaacgaaagatttacattataa

SEQ ID NO: 1899 - DNA, 639 bp, Clostridium symbiosum
atgtgcgatatgggaaatcatggtaaaaaggcatatgtaaacggtgctattatagctgttaatataatctattttctttttctggaaattacaggatcctcattaaatacaggatttatggttaaacggggcgccatgtatgcgcctcttatattgcagtacggtgagtattacagactgctcacttctgttttcatgcattttggaattggacatctgatcaataatatgctagtattatttgttctgggagataatctggaacgggcacttggaaaggtaaaatatctgattttttacctgctatgcggtataggtgcaaatattatatctttggctgtaaacatggggagagggtactatgttgtttcggccggagcttcaggcgcaatatttggtgttgtaggcggactcgtgtatgcggtggcagtaaaccgtggccggctggaagatctgagtacacaacagctaatgatacttgtggccgtaactctgtatcacgggtttacgagcacaggagtcgataatgctgcgcatgtgggcggcctgctaattggtatttttctggggatgattttttatagaaaacccggtaaaaataaaagatgcatatataatgcagaaaataaggagtggtga

SEQ ID NO: 1900 - DNA, 723 bp, Clostridium symbiosum
atggaaaagctgtacggtatgggcatccgtatcctgtttttttgcggaggtgagaccttcctatggaatgatggtgataaaacgatccgtgatctggtcagagaggccagagagatgggtttcctcattgtaaatacggtgacgaacggaacctttcccctggatttgcctgaggcggatcttatcctgctgagtcttgacggggataaagaaaagcacaatgagattcgtggagacacctatgatcggattatggaaaatataagaaatgcctcctccgataatatctgcttctatatggcaataaaccggattaacaggcatacggtccgtgacgtatgtatcaaagccagagacactgataacgtgcgggccgtttcttttaatttccacaccccttatcccgataccgcagagcttgccctttccagggaagaaaaagccggctgctgtgatgccattgccctgatgaaaaagcagggagctcctgttttcaacttgcttagcgcatttccgtatatcataaacaacagctttccaacgccctgccatcaatgtattgtaatggaagacggggaaatcagcacctgcggcagatgcatccacagtccgggcctgtgtgaacaatgcggctattttttcgtggcggaatataccctgctgttcagcggaaacataaagatcatagccgaacttctctgtacctatctcaaatacatataa

SEQ ID NO: 1901 - DNA, 468 bp, Unknown
  Unknown gut bacteria
atgagacgaaccgaccgccagcgtggagaggacttcgctcttgaggtcatcgaccggtgcgcctatggcgtggccgccatgaccgccggggacggcgctccctactgcatccccctttccctggtgcggctgggggacttcctctactttcactgcgccatggagggcaccaaggtagacctcctgcgccgggacccccgaatctgcatctcctttgtgggggagaaccaggccgcccaggacgacttcaccacctacttccagtcggcctgcgtggagggcgaggcctccgaggtgctggaccgggaggaaaagatccgggccctccgcgccctgtgcgaaaagctgaccccttcccacatgacgggggacaactttgaccgggccatggagcgcagcctggcccgcaccggtgtgtggaagatccggatttgttccctcaccggcaaggagaagccccggccctga

SEQ ID NO: 1902 - DNA, 519 bp, Unknown
  Unknown gut bacteria
gcccccatcctggccttcacctgtgatgagatctggcaggccatgccccaccgcggggacgaggacggccgtaacgtagtcctcaatgagatgaaccagccctttgccggctacgcgctgagcccggcggagatggagaagtgggctctggtggaggatctgcgggacgacgtgaacgtggtgctggagaacgcccggaacgagaagaagatcggcaaggccctggaggcccatgtggtcctctatccccagggcgacgagggcaagcgggccatggagaagctgtccgcctttaccaccgaccagctggccgatctgttcattgtttccgatgtggagatcgctcagggcgccggcgccgccggcgtcaaggtccccgtcatccaggccgcggtgtctgaggccaagggcgagaagtgtgagcgctgctggaagcaccacatcaaggtgggcgccgacaaggggccccccacgctgtgccgccggtgggccaaagtgatccgtaccatcgagctgtaa

SEQ ID NO: 1903 - DNA, 1749 bp, Unknown
  Unknown gut bacteria
gtgctgctgggaggctacctggggctgtgtgcctgggtgaacgggaccgaccggatccttcccaatgtatcggtggccggcctggatgtgtccggcatgaccgtggaggaggcacagaccgccctggaccgggccatggaggagtacggcggccagatcattggcctggtgtcctatgacggtcagctgtggtccattgcggcggataagatgggatatggctggtcctttccggccgaggccgcgggcgcggtgggccgggaaaacttcctcaccggcggcggcgtctatctgacccagctgctgggccgggagcaccggatctccgccccgagatgggactgcacggccctggatgagaccgtggaccgggtggaggccgagacagggggcagcgtgaccgaggcgtcctatcagctggagggcgatgccctggtgatgacaaagggcaggaccggccaggccatcgaccgcggccaggtccgggacagcctctggtccgcggtggaggaggccatggagcagaagttcggcggcgcggaaggggccgtggaggtggaaaatcctctcatgccccaggagacaccgccccaggagccggacttccaggccatccacgacgcggtggcggtggagccccagagcgcccagtacgaccgggagaccggggcggtcaccgaccatgtggtgggcgtggactttgatgcggaggcgctgaaggccgcctatgagcaggcgggagagggggagaccttctccatcccggtgaccctgacccagccggaggagacgaagcagagcctggaggccaagctgttccgggatctgctgggggaggggaccaccaatgtgggcggctcctccagccggaagcacaatgtaaagctctcggctcaggcctgcaacggggtgatcctgatgcccggggaggtgttctcctataacaacaccaccggcagccgctccgcctccaagggctatctggccgcgccggtgtactccggcgacgcttcggtggacgaggtgggcggcggcatctgccagacctcctccaccatctactacgcggtgctccatacaaacctgaagatcgtggagcgccgggcccaccgcttcaacaccggctatgtgccggagggcatggacgccacggtgtactacggtcagacggacttccgctttgagaacagcacggactaccccatcaagatcgttacctccagctatgaccaggggggcaagcggaagctgaacgtcaagatctatggcaccaatgtggacggcgtccgggccgagcccaagagcacggtctatgagacagtgactcccaccacccagtataaggcggatgaatccatcccccgggggaccacaaaggtggacagcaagcagaacccctacaccggaaagtcggcccagacctaccggtatgtctatgaccgggacgggaagctgctggaaaagcaggatatggggaagagcgtgtacaaaatgcggcccaagaccatcctgtataaccccgccgacggagaccccgccacctggcccaatggcgtcccgccggtcccggaggtccctccggcggagaccgtaccggagacgcctgcggaaaacgcgggggcagagacgccgctggaggatccggggacagaggccccggcagagtccggcggcggacaggagctccctcccgcggaggagcctccggcccaggatctgacggtggacgatccggctcaggccgtttga

SEQ ID NO: 1904 - DNA, 1773 bp, Unknown
  Unknown gut bacteria
atgatggtgaaaaaatctgtgatccaccgggaggagctgtccttccgtctgctgagggcggccctctttctgctgccccctgtcactgcattttatttgatgcagtttctctatggagcctggccctggcagacggctccgggggcggctcttgccaatgtgatctgcgtgggggccctctattttctgatgtgcggcctcaccggccggccggcggtgtgctgtgtgctcctccatattctgtgcggactgtgggggacggccaactactttgtggccctgtaccggggcagcccggtgctcccctgggacctgacggccctggggaccgccgcggcggtgtccgggagctactcctaccggcctacctggcagatggcggtggggctggcgctgatcgcggggctgatttggctgctgcgggggcgcgcctgggcggggcggagcggcctgcggacccgggcagtatgtctgttggccggagcgctgtgcctggtcccggtggtccagacggagcggctgggggccttcggcgtgaaaacggacgtgtgggaccaggtgggggcctaccgcaccggcggggccctggcggtctttctgaggaacacggagttcatgcaggtggaggagccggaggacatgagcccccagcgcctggggcagatcctgaaccaggtggtcccagaggagccggctgcggtgggggcggagcgccccaatattgtggctatcatgaacgaatcctgggcagattttgaggagttcgggaatttgtccctcagcgagagcgtcaccgacaccttccgcaccctggacaacggggtgtgggggcatgcctacacctcggtgtttggggcggggaccagcgccagcgaatttgaatttctcaccgggaattccatggcattcctgccctcagggagcatcccctatcagcagtacatcctggatgatgccccctccatggcctcgctcctgaaggaggctgggtaccggaccctggcctttcacccgggggagcggacctcctggcagcgggaccgggcctatccccggctgggctttgaccagttcaagtgcggggaggacatggatgtgccccagagcatggagcacggctatgtcagcgaccgctccgattttgagcagatcatctgggagtttgagcacaaggcggagggggagcccctgttcctgttcaatgtgaccatccagaaccacggcagctataccgtggaggactaccccgcccaggtgcggctgacggacgcgccggggaaatatcccatggcggagcagtatctgaccctggccaatgagacggaccgggcctttcagcagctgatcgactacttctcccggcaggaggagcccaccattctgctgatgttcggggaccaccagccctcggtggagcaggagttcctggaccgggcctatggggtgcggcaggaggacatgaccatggagcagtacatgggccgcttccgggtgccctttgtgctgtgggccaactaccctgtggagtgggacggaccggaggaaaccagtctgaactttttggggcagtacctgctgcgctatgccgggatcgagggagacccctatggggccttcctgtgggacctgcaaaagacgctgcccgccctcacctttgtgggctacaccgacgccctgggggaggcgtacagccatctggagaccaacgcctatactgagaggatcgaggattaccagcggatgcagtatgaccgcctgtttgacggcggcgcg

SEQ ID NO: 1905 - DNA, 1224 bp, Unknown
  Unknown gut bacteria
atgctcaccggctgtgccgctcccgcgccttctgatggctccggcccagaccgctctgtatcccctgacatccctgcgccctctcccgttgcctcctctgcgcccaacggagagagcgggacccctcaagcttccccggagaccgatccggagaccgcagagaacccttctgccagccaggagccctctgagtcctctctgggcccccaaaaccaggagcagatcattcaggagctgctgtccgccatgaccttggaggaaaaggtggggcagatgttctttgtccgctgccccgagaccggcggggccgagctggccgcacagtacaaggtggggggctatctgctgttcggccgggattttaaggacaagacggcccagcaggtgcgggatgacatccaaagctatcaggacgcctccggcatccccctgctcattgggaccgacgaggagggcggcacggtggtgccggccagcagcaatccggacctctttccccagcgggagcccgctccccagaccctggtcgcccagggcgggatggacctgatccttcaggacgcccgacagaagagcatgacccttctggacctgggggtcaatgtcaactttgcgccggtcgccgacgtatccaccgatcccgcggatttcatctatgcccgctccttcggacagtacgcgcaggccaccgccaactatgtggctcaggtggtgggcgtcatgggggaggaacagatcggctccgtcctgaagcatttcccgggatacgggaacaatgtggacacccacacggggatcgccctggatcagcgcccctatgagaccttccagacctccgacttcctgcccttccaggcgggcatccaggccggggcggacgcggtcctggtcagccacaatatcgccgccagcatggacgagagcctccccgcctccctctcccccacggtccacaaagtcctccgggaggagctgggcttcgatggggtcgtgctgactgacgatctggccatggatgccgtcatggagtacgctcagaacggctccgccgcggtgctggccattcaggccgggaacgacatggtggtcaccaccgatttccagacccagatcccccaggtcatccacgctgttcagagcggcgtcattgcggagagccagatcgaccaggcggtcacccgggttctgaactggaagtatgagctgggtctgctgggcaactga

SEQ ID NO: 1906 - DNA, 1383 bp, Unknown
  Unknown gut bacteria
atgagcaggcctgcccacaatattctggggtcccttccggtccccaagctggtgtggaccatgtccgccccaatcatgctctccatgctgatgagcgccatctataatctggtggacagcatctatgtggcccaggtgagcgagctggactttctggccctctcctatgcctatccggtccagctgatgatggtggccttctgcgccggaaccggggtgggcttcaacgccctgtttgcccagcgcctgggggccgggcagaaggaggaggccaaccgggtggcctgtcacggctttttgttctatgggctgtgctggctgctgttcctggccttcgccctgctgggtgcgcccctctttttccgcctgtccaccgataacgcggcggtggcggcggcggggacctcctatctggtcatctgctgcggcctgtccatcgggatgtgtatgcagttcctcaccgagcgcctgctccaaaccaccggccaccccgccggcttcatgatcgtccagggctccggggccattctcaacatcattctggacccagtgttcatctttggactggatatgggggtggttggggctgccgcggccaccgtcatcggacagatctccggggcctgcatcggctttttcctgctgtggcgcatccggggggagttttctgtctccttccggggcttccggccggaccaggccctctccgcagagctgctccgcatcgccgcccccgccgtggtgatgcagtccctgtccagcttcatgtccctgggcctcaaccagctgctcacccgctggtcggacaccgccgtctttgtgctgggggtctattttaagatccagtcctttgtgttcatgcccatcttcggggtcaacagcggcctgatccccattctcagctataattacggggcaaagtccgccccccgcctctcccaggcggtgcgcttcggggtgcagctggctctgtctgccgccgctgcgggggctgtcctgctggccctggccgccggccccctgctgcggtactgcttccatgccggtggagcggccgccgccatgggggtgcccgctctgcgcatggccgccctctccttccccatcgccgcggtgagcatcatcctgtccgccgcctttcagtccctcgggcacagcgggagctctctgctgatcgccctgctgcggcagatcctgctcctgctccccatcgccgccctgttcctttggctggtccctgacggcgtctggctgtccttcctgatcgcggagacgatcacctgtgtggcgaccctcctcctctaccgccggaccgtccgccccctgatcgccgcactggcggtccccggtccttcgtcagactctgctccttcctcacactga

SEQ ID NO: 1907 - DNA, 645 bp, Unknown
  Unknown gut bacteria
ctggtccctgtggtccgggtcctgctgatgtacaagggctggggactggtctccgcgctgctcctctccaatgcgctggtcattttcttcagtctggttctgggcgttctggatcccgctgtgctgttcagcgatgacagcccgatcgcctccggcatgggcagtatggccaatgtggccatcgtctcctgcctgatcgtgatgatgatccagatccccaccaagagcggcgccatggatgcctttgcttcctggatcatcaccaagtgcaggaccatccgcagcgcggagctgattgcatattttatggcgatcttcggcgtcgtggcgacccacagctccaccaataccatcatcttcaccgggccctttgttcggactctgatggatgactacaaggatgaggccgaccacagccgcagcgcgaacattctggatgccactgcctgcggcacgaatggactgatcccccacggcaatcccgcgctggtcatcaccggcgtggcgaccggagtagccggtgtgcctgcgaccttctccttcctggacttcctgccctacaatttccactgctggggtctgctgattattttcttcctgagtattatgaccgggatcggaagaaagcgcagaaaaacggcataa

SEQ ID NO: 1908 - DNA, 516 bp, Unknown
  Unknown gut bacteria
atgaaggagttattggcggaactgttggaccgctatcagcaggacgtctatacctatctgtacagcctgtgccatgatgtctctcttgcagaggatctgacctcagaagtctttgtggaggtggtccggtctattgccgccttccgtgggagatccgacatcaaaacctggatgttttccatcgccaggcatcagtggtaccagcatctccgcagaaagaaacgtcagatcccaacggagagcctccacgacctgtatgattcacacttcaccgggcttcagtcccctgacctgtccggcgaggtggagcaggccgtccacgagcttctctcctctgaatcggagctgacccgcagggtattccgaatgcgcctggagggctattcctactatgagatcgcatcggaggcaggcatctcggagagctccgcccgcgtggtatttttccgtgtcaaaacgaaactcaagcaatatttagaaaaggagggccttcgccatgatccagatcacctgtga

SEQ ID NO: 1909 - DNA, 867 bp, Unknown
  Unknown gut bacteria
atgatgaacatagaatcgggagcggtgctcccgggaaagaaggatagaaccatgataaccaaagaaagtcccatcggcgtgatcgactccgggatcggcggcttcagcgtggcgcggaaggtgcagaagctgatgccacatgagaatctgctctatctgggcgacggggccaatacgccttacggcaaccacagcgcggaggagatcctcaccatgacccgctatatgctgcgctttatggaggaccacggcgtgaaggcgctgctggtggcctgcaataccatctcctgcctcatcgaccagtaccgggatgaaatgagctgtccggtgctcagcgtggtccaggctggcgcggacgcggtggcccagctgcccgcccataaggtgggcgtgatctccacctgctttaccgcctccacccactgctaccccgatctgatcggaaaggtggcgccggataagcaggtcatcagccacggctgccccaacctggccaacctggtggagcgcaacgtgggcaatcccgccggacaggccgccattgacgatgaccttcgagagaacctggagcagctggtcaacgaggagaaggtggagtgctgcgttctgggctgcacccactatcccctggtggaggagaacatcaaccgcctgtatccccagctgaagctggtggaccccgccgagcagatggcccggaccgtgggccgctatctggaggagaaggggctggtcaacgatcagcccgggcagggcaagctggacatcttcaccaccggcagcaccgaggagtacaccatgaaggcggcgaaggtgggcctggacccggtgacctccgtgcagttctatccccccatgaagctgtaa

SEQ ID NO: 1910 - DNA, 903 bp, Unknown
  Unknown gut bacteria
atggatcctgtcctgatgcgcaggctggccaagccgcttttgtttttggccgccttcatttggggaacctccttctttattatgaagaacaccctggactcggtcccggtgctgtggttgctcaccttccgcttcaccaccggcgccgtcctggtggggctgctctgcggcaggaagtggcgcacccgcttcaccccggactatgtgtggcggggagcggttctgggctccctgctctttgctgcctatgcggtacagaccttcggcctggtggggaccaccccttccaagaacgcctttctcaccgccacctactgtgtgctggtcccctttctccactgggcggtctcccgccagcggcctgaccgcttccatctgctggccgcctttctgtgcatcaccggcgtgggcctggtctccctcaatgggtccctcaccatcacctggggcgacctgctcagcctgggcagcgctctgttctacgccctgcacatcgtggcagtcaacaagctgtccgaccggcgggacatctatctgctgacctccctccagttcgccttcaccgccctgctggcggtcatcggcggcctgcttctccagcccttccccgcccaggctctctctcagcccggcgtattctggcccttggcttacctgtgtgtggtgtccaccaccgtcgctctgctctgccagaacgtggggcaagtgtggtccgatccctcctccgcctcggtgatcctgtctctggagtcggtgttcggcgtactgttctccgtgctgttctatggagatcccgtcacgccccggctgctggccggcttcgggctgattttcattgcggtgctgtgctctgagaccaagtttgccttcctccgccgaaagtccccctctccccgcctctga

SEQ ID NO: 1911 - DNA, 765 bp, Unknown
  Unknown gut bacteria
atggagcaaggaagctactgtgggagccgcggcgcgggcggcgtgagcagtctgaccctccacatcttggccatggcctttatgctctgcgaccatatctgggctacgctggtggcggggcaggactggctgacctgtgtgggccgcctcgcctttccgattttcgcgtttctgcttgtggagggctttttccacacccgggacctgaggcggtatgtcctgcgcctgctgctgctggccctgctgtcggagatccccttcgacctgatgtatgccgggacctcctttttcccgttccaccaaaatgtgatctggaccttcctgatcgccctgttttgtatgtgggtcatagagcgggtgaagcggagggggaacctgtggctcacgctcctggctgcggcggggatgtccctggcgggctggctggcggggaccatcgccctggtggcctcttacggggccggtgtgctccccgttctggtgttctacctgttccggggcggcctctggtggcagcgcctgggccaggccgccgggatgatctggatcaactgcgggctgttggcgggcctggtgctccaggtcaatatcctggggctgaccgtggagttcccccagcagggctttgcccttctggctctgatccccatctggctctaccggggccgccaggggtaccacagccgctgggtgcagatggcctgctacctgttttatccggtccatatcctggtgctggcgatgatggtgcgtttcctgctgtga

SEQ ID NO: 1912 - DNA, 1137 bp, Unknown
  Unknown gut bacteria
atgaaatcaggcttgcggcgctcgctcgcgctggccctcggcttgtgtaccctgacggtcggagcttccgccgcctctgtcaccttccgggatgttccttcaagctactggggatattcccacatcaccaaggccgcctccaacgggctggtctctggcctgggagacgggcggtacggccctgaggaaaagctgtccaacgcccactttgtcaccatgatctgcgggatgttctatgaggacgaggtatccgcccagggcagctcctcggactggtggcggccctatctcaacgcggcctattccgccggcatcctgaagggcactcaggccgcccagcagcgggcttccgccggagattggagcgcctccgttgccgaggcccagatcagccgctatgatatggcccagatcatgtatcatgtggctgtggaccagggctttgaggatccctccgccgcatccctggcttacgccagcgcccggatccaggatttctcctccattccctccaattaccagtatgcggtgctctactcctatgccaagggcttcctcagcggcgatgaccaaggccgcttcaacggcggaaacagccccaaccgcgcggaggctgcggtggtcctctgctccctgttcgaggagcaggagtccctcctgtcccccacctacaacaactccaaccgcctgacggacaactccgccgtcacggaggagaacgtctccgatctgctgcgggagctggaggccgaatacccctcctttgaccagtggaacaccgaccgggtctatacctccaaggtcctgggccgcggctccggtgaggcaggcttcgcctatatgctcagcgaccgggtattcggcgccatctcctcctatgagctggacgaccccgaggacctgcgggtgggcgacctgctgaagctggacggcggcagcacctacggtgtggtggtctcccgggacggggatcgctttacctatgcctcctgtgacgaggacggctggatctcctggagccgcgccaaatctctggatgatctggaccgctcggacaccgtgtactcccgctatctcaccaagccctccggcggcaagctgtccaacggcgatgccgccacggaacgaaacgtctcc

SEQ ID NO: 1913 - DNA, 1362 bp, Unknown
  Unknown gut bacteria
atgaaaaaatcacgttttctgtcgctggtcctgacgctgtctgtgctggcggccctgttcctgccggtgtccgcctccgccctggaggaaccggcgctgaactgcacccacgccgttctgctggacgccaattacaatgaggtcctgtacgagaagggtgcctatgagaaggcctatcccgccagcatcaccaaggtaatgaccgccctgctggtgctggaggccatccaggaggggaagttcgctccggatacccccatcacggcctccgcctcggccgcccagatcccggaagggagctccaccgccaatatcaaggcgggagaggtgctgacggtggaacagctgctgtactgcctgctgctcccctcggccaacgaggcggcccagatcctggcggaggcggtggacggggatcaggcggcctttgtggagcacatgaaccagcgggccaaggagctgggctgccaggggacccactttgtcaatgtccacggcttccacgaccccaatcactataccaccgcctatgacatcgccctgatgatgcaggcggccatggaacatgagctgtttcagaccatcatcaccagccccaattatgtgatccccgccaccaacctgtcggaggagcgcaccgtccgcaacaccaacgccctcacctccaactggacttataccggctatctctaccgccggggcaccgggggcaagacgggctccaccgacgaggcgggcaagtgcctggttgagacggcgaaggacggggacacctatctgatctcagtcatcctgggttccggtccggtgacggacgccaatggagaggagcgccagggccagttctatgagaccatccgcctgctggactggggctttgacaacttccgccgggtcaccctggccccggagggcacgctggtggccaaggtcaaggtcaacctgtccacccaggcggacgaggtgaacgtcaagccccagggcgaggtcacccgcaccctgcccaaggatgtggacctggaccgggtggagatggtcccccgcctgttcagcgaaagcgtggacgcccctgtggaggcggggcaggtgctgggaaccatggtgctcagctatgaggggacggagtacggaactctggatctggtggcggacacctcggtggagcggtcccagctgctgtactataagtctcaggtggagcacttcttccagaactccggggtcaagctcatcctggcagtggtgctgatcgttggggcggtggtcctgctgcgtctgctggtgttccgccggtcccggcgctaccgcgccggcatgggggcgggcagacggggccattacagcggacgccgccgccgctga

SEQ ID NO: 1914 - DNA, 363 bp, Unknown
  Unknown gut bacteria
atgatggaagctgccaacgtacacaacaagctgatcctggctgtggtgcaggaggacgactatgacaccacggtgagcgagctgaaccagaacggtttttttgtcaccatgctcagttctaccggcgggttctggaaaaagaagaacatcaccattatgctgggtgtggaggaggcgcgtcttgaggatgcgctgtctattttgaagcagtgcgctggaaaacggaagcagaccatttactccaatgtgaccatgcccaccgggagtcagtacgctgtggcaatgccctccgtgccggtgaatgtggagctgggcggtgtgactgtgtttatcatggatctggagcggctggagaagctgtaa

SEQ ID NO: 1915 - DNA, 627 bp, Unknown
  Unknown gut bacteria
ttgtttggctttgttttgggactgctgtgtctgtttcccatccacacagtgtcgcctaagatggatgcggctccgctgaccgccagccgcgcgggggaggagcccgcgtccacttcagaggcgtctaccagcggcctgctgcgggccgcggcccgcgcggcggaggcgctgaaggcagaggattatgggaccctgggagatctggtccacccggagcgggggctgacctttaccgcctgctccaccgtggacctgagcactgaccggaactttaccgctgacgagatccgcggcctgaccgagaaccccaggcagtatctgtggggatatgaggacggccggggcagtcccatccttttgacgatggaagaatttgtgcggcagtatatctttgctgtggactatacccaggcccccaaggtgggggtggaccaggtggtgctcagcgggaacgctctggagaacgtggcccaggcctatccggactgccgctttgtggacctgtgctatccggagctggacccggacttcggggggctggactggtgttccctcaagctggtgtttacccctctggagggacaatggcggctggtgggtctgatccacagccagtggaccatctga

SEQ ID NO: 1916 - DNA, 864 bp, Unknown
  Unknown gut bacteria
atggaatggccgcggatcaagaccatcgttttggcgatcttgctgattaccaatatcggcctgctctcctttgtggtccagcgggcgtaccaggggcgtcagatgcagcgggaggcccgggagaacgccatcctgtttttgcagaacagcgggatcgaggtggacccggctgtcattccggagcggatgggccttccgccccagaccgtgaagcgggaccgggagcaggaggcgcggatcgcctcggccctgctgggcggagccgtccaggagctgtcctggggcgcggaggcctttcggtactacaatgagaagggatacctccagttccaccgggacggcgccctgaagggggagttcgtggagggggagctgcccatccaggatccggattccatggattactcccagcagatcctccgcctgctggaatttgagggggacgtggtggcctccaccgggacggcgggggaggagccgatgaccaccgtggtggtccagcagagctggaagggagcgcccctgttccggcaggagctgaccctgagctataaaaacggctgtctggtgcaggtggaggggcggcggctgaacggggagccggagctggaccccagccgggagccgatctccatccccaccgccctgttccagttctatcacggcgtcaccgccctgggagatgtgtgcagccggatcgacagcatcacagagggctatctgaacccgctgcccaacggggcggggccgtccgacctggtgccggtgtggtcgatctccacagacacgggggcctatctgctgaacaccctcacaggcgagctgagccgggctgatcccggtgagccggagcttccgttctga

SEQ ID NO: 1917 - DNA, 918 bp, Unknown
  Unknown gut bacteria
atgacagatattattgtggtgggcgcagggcctgccggcctgacggccgccatgtacgctgcccgggcgggcaagcgcgtcctggtgctggagggagacgcccccgggggacagatcaacttctctcccctggtggaaaactatcccggcgtcccctctgtgcccgggatcaagctggcggaggacctgctccgtcaggcggaggacctgggggtggagctggagtatgagacggtgaccgacttccagacccgcggccccggcttccaggttatcaccgactgtgcggtgcgggaatgccgggcgctgatcctggccgccggtgtgcgccaccgtgcccttggactgcccggcgaggaagagctggtgggccagggtatttcctactgcgccgtgtgcgacggccccttttaccccggccgtccggtggctgtggtggggggcggcgacactgctcttcaggacgccctgtttctggccgggacctgctcccaggtcaccctgatccaccgccgggaccggttccggggcgagcagcgtctggtggaccaggtggaacgccgggagaatatccgctgctggatggactccaccgtggaggagctcctcacccgggacggccgcctcaccggcctgcgggtgcgggacggggccgccggggaggaacgggagctggatgtggacgccctgtttgtcgccgtgggccaggagccccggaaccgcgccctcaccgacctgctcctgctggacgaagggggctatgtcatggccggggaggactgcaaggccagcctgcccggcgtgttcgccgggggggactgccgcgggaaggcggtccgccagctcaccaccgcggtgggcgacggggcggcagccggactggcggcctgccgctgggtggacgagcgccagtcctga

SEQ ID NO: 1918 - DNA, 303 bp, Unknown
  Unknown gut bacteria
atgcccattgtgatcggaatgtttttcctgcttcccctgctgctggggctggtgctggagtacctgtgctgccgcctgccccggcggcggatctggcgtgccctcccccctgttctgggggtcgttctcaccgttctggtgggggtgggccggtggagcctgtgggaatcggagacggtctctccggtgacacagcttctgatcttccccggtgtgcccgggacggccctcctgctgggctgctggctgggctggcggctgtggcggcggatctggagacccagagtgctggacgggccgtga

SEQ ID NO: 1919 - DNA, 942 bp, Unknown
  Unknown gut bacteria
atgaggatccaaaaaacatcccggcagcccgccagcagcggcctgctgcccggccatctggaggacatcaaccggctgagccgggcctcgctgtctgcggaggaggtatatgtcttctccctgtgtctgtgcgacaacgaggtggacagggaccaggagcggttcccggagaaaacgctggagcagctggcccccctgtttgtgggcaagagcgggctgttcgaccacagctggagcgcccggggacaggccgcccggctctaccgcacggaggtggtgcgggagccggagcgcctcacccaggcgggagacggctactgctggctgaagggctgggcctatatggtgcgcaccccggacaacaaaggcctgatcacagacatcgaggggggcatcaagaaggaggtcagcgtgggctgcgctgtgaagcgggcggtatgctccatctgcggtacggagcgtgggcaggactgcggacacaagcccggggaggtctatgacggagcgcggtgttttttccagctggaggaggccgtggacgcctatgagttctcctttgtggcggtgcccgcccagcccagggccggtgtggtgaaggggctctgtcctgccggggagcccgcgcagaccctccgggagctggcggcgggccgggacctgtgtatccgggagctggatgggctggagcgggaggcagccctgggccggaagtggctgtccacgctccgggaggaggtggtgcggatgggagcactggcggacagcggcctggaccggactgtgctgaagcagatcacggacaagctggacgcggaggagcttcaggccctgaagcgggcctatcaggccagagcccgggagcgctatcccctgccggtccagctggaatatgcccagaagccgggagaggagccccgggaggacggagcatttttgatttga

SEQ ID NO: 1920 - DNA, 774 bp, Unknown
  Unknown gut bacteria
atgcgtgattttgtggaaaatgaggtgggttctttgcgggatcatggcgcgcccgggatcagctgggccctgctggtgctgtgcttcgccctggccttttcccccgctccgcagccagccggggaccgggcggcctccggcagcgcggaggtggaggtggagaccgggccggagatgccggtggtagccctcacctttgacgacgggccccgggcggccaccacgggccgccttctggacgaactggctctgcgggaggtgcctgccaccttcttcctcctggggcaccgcctttcgggcaacgaggagctggtccgccgcatggcccgggagggccatcagatcggcgtccacaccttcgaccacgtcccggtgaccggcctgtcccatcaggagtttgacctccaggtggggggcgtccgcgcccagctccgggacattttgggggatggagaattctggctgcgccccccgtacggccagacagatgacagcacccgggcctgggcggacagccctattgtgctttggtcggtggatccggaggactggaaggaccacaacgccgcccgtatcgccgccgccgtgacggagcaggtgaaggacggggacatcatcctcctgcacgacatctaccacagctccgtggacgccgccgtccagatcgtggacgagctgctccgccgcgggttctgctttgtcactgtggaggatctgctggcgtggaaggggatctccccggagtccggggccgtttaccgctcgggaagataa

SEQ ID NO: 1921 - DNA, 906 bp, Unknown
  Unknown gut bacteria
atgtactttgaacataaacgccggctgctggccggtattctattgagcgcggccctgctgagcggctgcacatccaagccgcctgctcctgaggggagcggaagcgccggagccgatgtctccgctccggtgggaagcggctctgcttcggttcccaccccgccggacggggggagcagtgcctctgggagcggcacggtagatggatcccaggacctggaagcgtccgggagcggcgaggctgcggcctatgacttctcccagcccgcgccggagcgggaggcggtggacaacagttattttgaggacgccgcctttgtaggcgactcccgaaccgatgggtttatgatttacagcgggatcggttgtggggagaacctgacctccaacggcctgtccatcttcaagctggaggagaaaaaggcgctgaccatcgacgggcagaagtataccctgctggaggccctggccttgaagcagtatggcaaggtctatctatcgctgggggtcaacgaactgggctattatgatgaccagggcttctatgatgcttactgcaaggccattgacgacatccgggcctgccagcccaacgccgtcatttatatccagggcttgattcctctgaacgaggatgtgatcgcccagtcgggcggacccagctatctgaccaatgagcatctgctggtgtacaatgacctgatgcggaaggcggcggaggaaaaacaggtggtattcctggatctgaacccggaattcactggggcggacggaaaactgcccgccgacgccagcaaggacggcgtccatctgcgcaaggcctactgtgagaaatggctggactatctcaagacccataccgtggactatgagaccttatatccgggacaggagggagcagtgtga

SEQ ID NO: 1922 - DNA, 501 bp, Unknown
  Unknown gut bacteria
atggaacatctgctgcgatatgaccggccggcggcggtggcctatgcccaccgctgggcctatggccggaatccccggtactacgactatgagcgggtggggggagactgcaccagctttgcctcccaatgcctgtacgccggggcggggatcatgaacttcacgcgggacctgggctggtactatctggacggcaaccacaaggctccagcctggacgggcgtgccctacttctaccgatttctgacccggagcgcgcccagccggggcccggtgggggtcccggctccgccggagctgctgcttccgggggactttgtccagctccggtttgatgcacctgagtttggacatactcctgtggtggtggaggtgggcagtccgcccgctctggacaggatcctggtggcggcccacagccaggacgcggacctccgccctctaagtacctactccttccgggagatccgggggatccatattctgggcgtgcgctcttga

SEQ ID NO: 1923 - DNA, 807 bp, Unknown
  Unknown gut bacteria
atgtccgtccaaaaacggcgggaggaactcaccacgctgaacctgctcttctgcctcatggtcctgtggagccactgctccgggcaccccatcactgtgctggaccacagcagctggcaatacggcctgatgatctcccttcagcgcctcacctttgtctctgtctccgggttcttctttctcagcggtgtgaagctcaccttgaacagcgccagcgccccccctcccccgctggggcggtactgggccaagcggtggaagggcattttcctgccctatctgctggcggtagccgtctactatgtctacttcgtaagccacggctacttctccttctccctgcgggatctggccgggtacatgattcggggcgatctttccagccccttctacttcgttatcgccctggcgcagttcgtgctgttggtccccctgttccggtggctgccccgccggtggtcgccttcagtcctgctccccatctccctggggatcacctggctcagcgccctgtactgcaatgagatcctgggtctgctgatcccaggtgcgcacttttcctacaacgaccgcctgttcaccacctatttggtgtactatgtagggggctgctgcgccgggcagaactatccgcgctttttggaactgctggaccggaaccgtccccttctgactacctgcgctttgatcttcgccggggccgacctgtttttcagttggaaattctttgtgggcggacagagcgtacccttcctggaaatgatccacaccttgtaccagctcaccgctatccccgccctgtatgcc

SEQ ID NO: 1924 - DNA, 954 bp, Unknown
  Unknown gut bacteria
atggggcagaaaggggacgtactcacccaaaggaatgttttggaccaccaggtatttgaccagctggtccagggccaccagggccaccacaagcacggcatacagcatggagggttctccttttcgacagtcgctttgtttgaacagtcctattctatcatgttccgccccgggggacaacggggaattttccggcttccggttgacagcccggcggagggccgcctacaatggtgggagaccgcggacaaggaggagatcagaatggagatccagggcttgcagaaaatgaccctgctggactatccgggcaaggtggcctgcaccgtgtttttaggagggtgcgatctgcgctgtcccttctgccacaacggagagctggtggagggggaggcccccgccgccctggacgacggggaactgaccgcatttttgaaaaaacggcagggcctgctggacggggtgtgcgtcactgggggagagcccctgcttcggcctgaactggaggggctgctgggccggatcaaggagttgggcgttccggtgaagctggataccaacggcagccatccggaccggctgcgccgcctgacggaggccggtctgctggactatgtggccatggacatcaaaaacagcccggagcggtatggagagacagcggggcggccgggtctggacctggcccccttccgggagagcgtctccttcctcctctccggggcggtggactatgagttccgcaccaccgtggtgcgggagctccacgacggggacagcttccgggccatcggcccctggctgtccggggcccggcggtactacctccagagctttgtagaccgggatacggtgctccgggcggggctccacccctgggaccgggagagcctggaggcctttgccggactggtgcggccctgggtggagcgggtagagctgcggggggtgtga

SEQ ID NO: 1925 - DNA, 1932 bp, Unknown
  Unknown gut bacteria
atggctgcggcggtgctgctgtgctgtgttctgctgcccggagcgtgggcggcggaaggggagaccggttccgccaccattttatttacccacgacctccactccagcttcctgccccggaaggacgggagcggagggaccacgggcggctatgcccggctggcctccgcactgaaggaggagcgggccgcccatccgggggcgctgactgtggacggcggggatttctctgtgggctccctgatccaggccctgtataccacccaggcggcggagcttcgcaccatgggcgccatgggctatgacgctgtgacggtgggaaaccacgaatttgacggtactggctcggggtttggcgagatgctcaccgccgcccgccggagcggggatgtgaccccggccctgcttctggccaactaccggcctgaggaggacagcctggaccgcctggacctccagcgggccatggccgcgtacggggtggaggagtccctgcttctggagcgcggcggcgtgacctatggaatttttggcctgatgggccgggacgcccacgcctgcgcccccacatccggttttgtgctggaggacccggtccgggccgcccgccggtgtgtggagcggctggaagagcagggagctgaagtgatcgtctgcctgtcccacggcgggaccagcccggacggtacctcggaggacgaggaactggcccgggcggtggaggggatcgacctgatcgtctccggacacacccacaccgcgctggaggagcccatcctggccggtgagacctatatcgtctccgccggggagtatggaaaaaatctggggtctgtcactttgtcctggaatgaggcgggggaaaagaccctgacggattaccgtctgatccccattgatgggacctgggagagcgacccggaggtcgccgccctggtcgaggggtggaaggggcaggtgagcagcggctatctggccccctacgggctgacctatgaccagcggctcacccggctgagctttgacctgcccgccccggagtccggggtccagtcgggcagcgctctgggggagctgacggcggacgcctatctgtgggccgcggagcagctggcgggcgtggagcccgggacgcccactgtggcggtgacggcggacggagtgctccgcgcgccgctgtacgccggagagcttaccacctccatggcctttgatgtgctgtccatgggagtgggggaggctggaagcgctgggttccccctggtgtcctgctatctcaccgggaaggagctgcgggctgtggctgaggtggacgcctcagtgacgcccctcatgccggcggcccagctgtatacggcggggatgtcctattccttcaatacccaccgggtgcccttcaaccgggtgaccggcgtgtggcttacgggagaaaaaacgaccactctgccggaacaacacaccgagacagagatatggaaaaacgatctggaggatgaccggctctaccgggtggtcaccgggatgtactccgcccagatgctggatacggtgaaggaccgctccttcggcctgctgtccatcgtgcccaaggatgagtatggggagcctgtgacggacttttcccagcgcatcctccgggaccggaacgggaatgagatcaaggagtggtacgccctggcggcctatctccgctcctttggagagaaaggagtccccaatgactatgccctgtccggcggggacgggcgcaagcaggtgagccacagctggagccctgggcagttgctggggcatctgaactggatcgggtttgccgcgctggccctgctggcgctggccgcggcggcagtggtgcttctggtgcgctgggccgtccggtcccggcggagaggccgccggggaggcggataccgccgccgccggctgttctga

SEQ ID NO: 1926 - DNA, 945 bp, Unknown
  Unknown gut bacteria
atgaaaaagggctatctctatatcattgtgaccattgtgatgttcacctcctatgaggtagtcctgcggtatatcgcggggcagatcaactccatgcagctgaccctgtgccgcttctccgtgggctttctgatcctgctgcccctggctctgcggaccctgaagcgccggggaaagcgcctggacggccggagcatggcccgtttcgccctgctgggcctgctgggcatcgccctgagtatgcccatcctccacctgtcggtgcggtacgccgggtcctctgtggccgcggtgctgttcagctgcaacccggtatttgtcacctttttggccttctttctgctgaaggagcccatcaagccccggcatatctccgccctggccctggagatcgcgggcaccgtggctatcatcgacccattaggtcatgcgctgaaccccctcggggtggggctggccctgctgtccaccctgctgttctccctgtacggcgtgctgggcaagcggcgggtggcagagtacggcggcgcggtggtcacctgcttcagcttcctgttcggcagcctgatcgttctggggctgatcctgctctcccatgtcccggcggtggcccaggggatgacagccgccggtctggaggagttcgcccgcatccccatcctggcggggtacaccctggaaaacctgccctacgtcctgtatgtgtccgtgggggtggcggggatcggcttctgctgctacttcctcgccatggagcagctccccgccagcgtggtctccctggtctactttttcaagcctgcgctggccccggtgctggcctggcagctccacggcgaggcgatccccgccaacatgatggccgggatcctgctcatcgtggcgggctccctgtgcaccatcgttcccgggcttctggacgcgcgccggaagcagcgggcgtaa

SEQ ID NO: 1927 - DNA, 690 bp, Unknown
  Unknown gut bacteria
atgaggcaatggttcaaatggctgtttctgctcctcgctgtcctgctgtgcattggcggggggctgtttctgtggcagagcggattttttgccgctgccggttctcaggagtccctgcgggcgtatatcgaggatttttctccctactcccacctctgcttctttttgatccagttcctgtccgtcatcctggcccccatccccagcaacatctccgccctggccggaggggtgctcttcggcacctgggtctccttcctgctcaccttttccgcagtcgccgccggctcgctgctggtgttctctctggcccgcggcctgggccgagacgcggtcacccgcctggtgggccaaaaggtctctgaaaaatatctggatgtgatccacgccaagactgacattttcctggtgctggcctttctgtttcccttctttcccgatgacgttttgtgcattctggccggactgacccagatctccttccgccggttcgccggcatcatcctctgtaccagaccctggggcctcctctttgccagcgctctgggcggcgcctctttctccatccccgcctggggcatggccctgatcggcgccgccggtctcctcctcttcctgctggggatgaagtacggcgaccgggcggaggccgccatcctgcgccgcctgcggcggaacagccactcttga

SEQ ID NO: 1928 - DNA, 1083 bp, Unknown
  Unknown gut bacteria
atggaacatctggcgcagctcctgcaggagcacttccgtaaccacccgggcatggagcttcgggacgccatcaaatttctgtaccagagctccatggggggcggtcacctgatcgccgacccccgcggggctctggcccgtctggaggaggagtgggcccggacagagggggacccggcactttcccccacagaacccctgggaggcggcctgtgccgcctttccctggccgcctgtaagggactggggctcgccccctccaccgttttcgctctgtttctccggggaacggaggaattttcccgacagccggagcggctggaccggagcctggagcttctgtaccgcctccccttcccccccaaggagatcgaggcggctatccgtcagtaccgcgccgccggcctgccgatggtgggacacagtacggcctaccgtcaagccttctcccccgcctatcgggtggttctccagtcggacgcagccctgctcccccttctggccgccatcgaccgcagccgccgggagcacccccggacgctgaccgccatggacggcccctgcgccaccgggaaatccactctgggcgcccggctggcccggctctacagctgtcccctgttccacatggatgactttttcctcccaccggagcgcaaaacgccggagcggctggcccagccgggtgggaatgtggactatgagcgcttttttgcccaggtcctctcccctctctcccgcggagagcccgtcctctatcagccctaccgctgtcattccggaactctggaagcagcccgcaccatcccccccgcccccctggctgtggtggaaggagtttacgccctgcgcccagaatttcagcccctgtatcaggtcaagtgctttctcaccgccccctggccggtgcgggaagcccgcctgctggaccggtgcggcccggacgggctggagcgcttccggactctctggatcccactggaggatcagtattttcgggcgttttctatttccggctcctgtgatgtgcacctggagaccggctcaggtcagggcggggcaccgtgtacccccgcggactga

SEQ ID NO: 1929 - DNA, 432 bp, Unknown
  Unknown gut bacteria
ttgaacaaaacaaaacgtgtcatcgccctcggcttttttgacggcgtccacaccgggcatggggccctgctccagcgggtgacccagcgcgcccgggagctggacgccatccccaccgctttcaccttcgaccgcagtcccactgcggccatcaccggccagcacgtcccgctcctcagctctgtggaggaccgggtctggctgatgcgctcctgctaccacatccaggaggtcatcgtctccagctttgacgggatgatgcgcatggattggcaggattttattacggagtacctggtgcgggagctgggcgcggtccacgtcgtggcgggccacgccttccacttcggctatatgggcaagggcaacccccagcgcctccaggagatgtgcgcacagctgggcgtcggctgtgacatcatcggcaagatc

SEQ ID NO: 1930 - DNA, 1332 bp, Unknown
  Unknown gut bacteria
atggaacttggtagttggtctttaattactgcaccgtcactgctggcactcattccgttgatcgttatgatcgtgttggtattccgtggaaagagcaatgtttctggcatgatggttggcatcatcttgggtgcactgatgatgggtcaggatcttggtgcgttggcgaaggcgttttctgcatccctgggatctaccacagctctgattggtgtcattattatgacgggagctggcctgggtgttttgatgacagagactggcgtgactcacacgctggtctattggatcgttaagcgaatcggtgtcaatactccgacaaaaggcaagctggcattggtggtctgctccattctgatctgcggcctgctgggtactttaggcggaggaaatgcagtcattgcccccattatgcttccaattttggcgtctttgggtgttacccctaccgtggtggccacgctcttcaaggtggccggtgagatcggtctgatggtaggccctctgaccggtgtgacactgatcaccatggaagtgactggcctgtcttatggccagctgatgctccaggcggtcttgcccttcagctgcttttggctggtgggcgcttggatcggatgcaaccgggcacagaagcgtaccctggggaaagaatcctattccgtggacgacgacatcaagcatttggattctatcgtgatcacacccaggcagaagagaacaacggccgcgttcctggtggccttcgtgctgctggtggtgtacgggatcctgacaaagcagggcacctcttacgccttgatcgtgatgatcgcattggcggttgtggtgacgctattctcctggacggacatcgatacagcggtttcctgtgtgaccaagggtgtggcctctcaggcgaatatgttcctgatcttcattaccattgatgttctgctgaatctggtcaccttgggcggcggttttgatgcgatctccaatctgctgggcggtctggccaagggcggaggagccaccggtgtgatgctggcggcctctatcgtaggcggatttggcattgaggcggccgctgtggctgagatcaagatcattgcggagatgttcggaggtctggctgccgaggtgggtctgcccatggggtgctttgcggtgtccatcctggcggcgactcgtctgactggatccatgtatcccaccacaaattttgctggccagctgggtactgcacagtgcgagaatactaaggaggcccttcaggcctgctgggtcagtgtggcctttgcgtgggtgtttgttgcggcgtactcgttgattggccccgtgatcctgtga

SEQ ID NO: 1931 - DNA, 945 bp, Unknown
  Unknown gut bacteria
atgagtgaaacgattttgaatatgctccccctcacggaggaggaaaaagccgtctttgaagccgccgcaccagacgccgtccacctctacgcaggccgccgtaccgccacgccggagcagtttgcccaagccacagtgatcctgggctggccaaggcccaatatggtggcccaggcggcacatttgaagtggttccactgtatgtgggccgggactgaggagtacgtggatgtgatgcctgcgggcgcagcgctcacctcctccgcggggaccaacagccagtcggtgtcagagcatctgctggccagcctgctggccctgtaccgcaagctccccctgtgccgggaccgccagagggagcacaaatgggatcaggacatcggctcggtgcgcactctggtgggtgccactgtcctggtggccggggctggccatgtgggctccgccttcgcccagctgtgcaaggccctgggggcaaaacgcaccatcggcctgaagcgttcggtgaatgtccccgtccccggctttgatgagctgttccccctgtctgagctggaccgcctgctgccccaggccgatgtggtggccctcaccctgccccacaccccggagaccgacggcctgatggaccgggcgcggctggcccgcatgaaggaggacgccgttctcctcagcgcgggccggggcactgttctggaccaggacgccctggtggagctgatgaatggcggacatctgtggggcgccgctctggacgtcactacgccggagcccctgccggaggacagccccctgtgggatgtgcccaacctgctgctgacctcccatgtggcgggcggcctgcgcctgccggtcacccgggaaaactgcgtccgcttggccctggaaaacctgaagcgctatctggccggagagcccctggaaaatgtggtccggcggggctga

SEQ ID NO: 1932 - DNA, 1098 bp, Unknown
  Unknown gut bacteria
atgatgaaacgaaccctgtctgctctgatgctcagcggcgcgctgctgtgcgctctgtccgtccccgccctggctgcggagcccgccgcgccccagactgatacgtccctgacccaggaggagaccctcccggacagcgtgctgtactacggcactgtaacggaggtagtccgggatgaggcggggacggtctcccgcctggccctgtcctctgagcggtatggtgactatgtgatgaacctctccgcggatactgtgtgggtggatgccgggaagcgcgccgcctccgatccctccgacctggaggctggcgaagctgtctatgtgttccacagcccggtctctacccgctccctgccgccccagtccgccgcctatgcggtggtccggaatatgccccaggatatgggctgccccatgtaccacgaggtagaggcggtgacggagcaggatggccgcctgacgatcaccacggacaacggcggattgctgctccatgtgggagaggagacccagtgtgtggactacgccacaggagaggccgttgacctctcccagctgaaggcaggcggccgggtgatggcctggtacgacgccgtgatggagagctaccccggtcaggcggcgccccactgtctgatgcttctgcctccggtggaggatcagtccggtgagcagacccagccggagcagcctgatgaggccgccgagctggcggacgggactgccctgagcattgttctggagggagatatggtgctcccgatgaagggcagctatgagaacggggccgccatggtgcccgtggccgcggccgcccaggcgctgggctatgaggtgacctacacccccggcaaggacggggcccccgccctggtcacggtggagagcgagaccttccgggtcaacctcaccattggacaggagcagattactggtgtcaccaagatcgagggcgcggcgggtatgacctctcccatgaagtacggtgccgccccccgcatcgaggcgcccggcacgacttgggctcccgcacagctgtttgagatgctgggccgcaccgtcaccctggagggggacaccctttccatccagtaa

SEQ ID NO: 1933 - DNA, 957 bp, Unknown
  Unknown gut bacteria
atgcagtattactttgcccccctggagggcgtgaccggctcggaattccgccgggcccaccaccgctggttccccggggtggacgcctactatatgccctttctctcccccactcaggaccatgtgtttacccagcgggagctgcgcaatgtcctgccggagtacaaccagggctttcgcgcggtgcctcagcttctgacgaaaaacgcggatgattttctctggtgcgctggggagctggccgccatgggctatgacgaggtcaacctgaatttgggctgtccctccgggacggtggtggccaaggggaagggctccggcctgctgggcgcgccggaggcgctggaccggatgctggaccggatcttttccggttccccggtggcggtgtcgctgaaaaccaggctgggcctggaggacccggaggagttcgcccgtctgctggagatttttgggcggtatcccgtctccctgctcatcgtccacccccgggtgcggaaggacttttaccggcacccggggcgggtggagtattttgagcaggcggtggatgcctaccatgggccgctgtgcttcaacggcggcctggtgactgcggaggactgcgcccggtttgcccgccgttttccccaggtggaccgtgtgatgatcggtcaggggcttctggcggaccctgctctggtccaaaaggccaaaggcgggccaggagccggacgggaggccctgcgggcctttcacgatgagctctaccacacctatctggagatcttcgccagtcagcgcaacacggtatttcacatgaaggaactttggagctatctgggccgcctgttccagggggcggagaagccgctgaagcagatccgcaaggcggcggactcccctgcatacgaggcggcggtcgctcagatttttgctctgcctctgcggcaggacgcctgctgggagggacaatag

SEQ ID NO: 1934 - DNA, 435 bp, Unknown
  Unknown gut bacteria
atgagagcagttgttacccgggtgtcctccgcctccgttaccattgacggggcggtgcggggcgccattgaaaagggctatctggttctgctgggagttggtccccaggatacggaagctgtgtgcgataagctggccgaaaaaatctgtaatctgcggatctttgaggacgaaaacggaaaaatgaacctgaatttggagcaggtggggggcgctcttctggtggttagccagtttgccctctacgccgacaccaagagccgccgccctggtttcaccggggcggccaagcccgatgtggccattcccctctatgagcgatttatggaccagtgccgtcagcgggggttccaggtggagcatggggagttcggagcggatatgcaggtggcgtcggtcaacgacgggccggtcaccatcttatttgaattatga

SEQ ID NO: 1935 - DNA, 1170 bp, Unknown
  Unknown gut bacteria
ttgagccccctccggcggctgggggcggcgttcctcacggcggttctggcggcccagctgctgacggcctgcggcccggcgggaaacagttccgccggcggcgggggtctccgctgggaggacctggagtatgaccacagcctggagctgcaatacgcccagcagttctccgtggactactatcagggcgggtatgcgctggtggagatccgggagaccgggacctatctggtggtcccgccggaggcggacgtgccctccgggctggacgagggggtcacggtcctccagcagcccctggaccggatctatctggcggccacctcggccatggacctgttccgggagctggacggcctggatgctatccgtctgtccggtacggaggcccagggctggtatgtggaggaggcccgggcggccatggaggcgggcgagatcctgtatgccgggaagtacagcgccccggactacgagcggatctatgccgaggggtgcgacctggcggtggagtccaccatgatctaccacaccccggaggtaaaggagcagctggaggagctgggcgtcccggtgctggtggagcgctccagctatgagggccaccccctggggcgcatggagtggctgaagctgtatggggtcctcttaggaaaggaggaccaggctcaggagcgcttccagcagaccctggaccgcctggctcccgtcctggaccaggaggggaccggaaagaccgtggccttcttctacatcacctccaacggaggggtcaacgtacgcaagccgggggactatatctccaagctgatcgggatggccggcggggagtatgtgttccaggacctgggcggggaggagaatgccctgtccaccatgaacctccagatggaggcgttttacgccggggcgaaggatgcggaccttctgatctataacagcgccgtggacggcgggctgcgcaccctggacgagctgctggagaaaaatgaggtgctggccgagttccgggcggtacaggaggggaacgtctggtgtaccgggcaggacctgttccagtcctccatggggctgggggacctgctgctggacatccatacagtcctgacccaggaggacccggagccggaatcactgacctatctgtaccgcttgacgaaggagggatga

SEQ ID NO: 1936 - DNA, 1674 bp, Unknown
  Unknown gut bacteria
atgtatccctatgtgatctttgatctggacggcaccctgctgaacaccatcgacgacctggccggcgcgggcaaccacgtctgccgccttcatggctggccgacccactccgtggacgaattcaagcgaatggtaggcaacgggatccccaagctggtggagcgctttgcaccggaggggaccggggcgcctgttctggagcaggccctgggggagttcatggcctggtacggtgtccacaaggcggaccagaccgcgccctatcccgggatgctccaggcggtccggcggctgaaggaggcgggtgtgtccatcgcggtgctgtccaataaggctgacgagatggccggacccgtggtggagggctattacccccaaattttccctctggtgcagggggcgctcaccggcatccccaccaagccggaccccacgctgctgcacaggctgatggagcggatgggggcgtcccaggagaacaccctgttcgtgggggacagcaatgtggacatccagacggccaagaacggcggtctgaccagctgcggcgttctgtggggcttccggtcccgccaggagctggagcaggagggggccgactatctggcctccacaccggaggatctgctgaccctgatcctgggggagaagggcggccgggagacccgtcacctggggccggaggatgtggaggaggccgcggctatcctccgctccggcggtctggtgggcatccccacggagacggtgtacggactgggggccaacggcctggatccggaggcggtggcccatatctttgaggccaagggccgcccccaggacaaccccctgatcctgcatatcccctcggcggaccatctggagcggtattgtgcggacatccctcagtccgcctttgacctggcccgggcctgctggccggggccgctgaccatgatcctgaagcgcaggcccatcgtgcccgatgtggtgacggctgggatggatacggtggggatgcgctgtccctcccacccggtgtgccgggcgatcctccaggcggcagaggtgccggtggcagccccgtcgggcaacacctctgggcggcccagccccactaccgccgcccacatggcggaggacatggacggaaggatcgatgccatcgtggacggcggtccctgctccgtgggggtggagtccaccatcgtggacctgacggagaccccgccccggctgctgcggcccggcggtatcacgctggagcagctggagtccgtcctgggccgggtggaggtggaccaggcggtcacccggctgatgtccgcgggagaaaagccccgggccccgggaatgaagtaccgccactacgcccccaaggcgccggtgacagtggtggccggtccgccggagcgcactgcggagcacatcgcccgcagcctgacgccgggggacggcgtgatctgctttgacgagtttgctggggagttccccggctgtcagatccaaaggatgggcccggcgggagacaaatccgcccaggcccgccatattttcgacgcccttcgggccttcgaccacacggaggtcccccggatctgggcccagtgtcccgatccgtccggcttggggctggccatcaacaaccgcctgaacaaggcggctggattccatatcgtggaagtcaaataa

SEQ ID NO: 1937 - DNA, 1269 bp, Unknown
  Unknown gut bacteria
atgaaacaagggaaagccctgatcacctttgtgatggtcctgctggcggccgccctgacgtgctatttgggctattatgtgtgggatacctttcaggagccctttaccaccacctacgcctatgagtatgagctcaacgacagcgtggaggccgagggcctcatcgtccgccgggagcaggtgctccccggcgctcaggggatcctggatgtgacccggggcgagggggagcaggtggggctgggccagcagatcggtctggtctatcgggatgaccaggcccagcaggcccaggagcagcaggaggccctgcggatggagctggtccagctccggtacgccatcggccagggcggagacgccgcctcagcggccagagtggatgaggagatcctccaggccctggtggcgctgcgcagctccgccgccctgaacgattacagcagcctggaggaccaggtgctggaggtgaagagcagtgtgctgcgccgggagtacgcctatggcgcggatctgagcgcggtagacctggccgcccgcctcaccgagatgaccgcccagtatgaggcgctgcgggcccagaactatgacgccgtcacccggatcaccgccccggtgtccgggaccttctccgccctggtggacgggtatgagaccctgatcgatccggataccgccctccagctgaccccggaggggttgtccggcctgatgaagcagcccccggaggccgaccgcaccgcggcggggaagctcatcacctccaaccagtggcagtttgccgccctggtcacccaggaggagagggagcggctggcgcgggagagcggcgtgaccctccgctttgccagcgactttacccaggacatccccatggaggtggtccgggtgggagagccggaaaacggacaggcggtggtggtgctgtccaccgaccactgcctggagcagaccaccctgctgcgccgccagacggcggagctgatctttgacagccggagcggcctgcgggtgccgaagggggcggtgcgcatgatcgacgggacgcggaccgatgaggagaccggcgagaccacccagtacagcaccctgggcgtctatgtggtgacggcgggccgggcggagttcaagccggtggagatcctggccgagggggacgagttctatgtggtccgttcggtgaaccaggaccggaaggcgctgcgggccggggacgaggtggtcatccggggcaccggcctgtacgatggaaagctgctggagttctga

SEQ ID NO: 1938 - DNA, 543 bp, Unknown
  Unknown gut bacteria
atgaaagcaacaggcattgtaagacggattgatgacttggggcgggttgtcattccaaaggagattcggcgggtcatgaggatccgcgagggcgaccccctggagatctacacggaccgggatgggagcgtgatttttaaaaagtattccctgctgggcggagtgaccgagtttgccgcccagatgtgtgatacgctgaaccggaccacgggccggactgtggtgatcaccgaccgtgacagcacggtggcggtggcgggagctccccggcgggagctggcggatcaggccatctctccggagctggagcggctgatggaggggcggcagatctatcagcacaaggcgggggaggcccacattcctctgtgcgccgctccaggacgcttctccctggacaccgcggcccccattctgtcagagggagatgtgctgggctgcgtcgtctttgccgccccggagggggcgccggaggggggcgaggtggagtacaagctggcccaatccgccgccgctttcctggggcggcacatggagggctga

SEQ ID NO: 1939 - DNA, 1614 bp, Unknown
  Unknown gut bacteria
ggggagcgggcggcccgccgggcggcgggactgctgtgcggcgcggcggcggtccatctgctgggggtgggggccctgtacctgccctggcagggggatctgacgcccaagctgctgtatcactcggatgtgaatattgaggatcaggtggagcagctgggcctgtggaccatgctctgcctggatgtgcagcacgccgtgctcccggcccgcaacgacctgggggaggacttctccggcctgaacggcccggagcctccgctttcggagagcgggggaccggaccctcagctggaggagccggaccggtcccccaatgtgatggaggtggatctggaggctctggcggcggggacggagaacgaggatgcggcctggctggcccggtacttttccagtgtggtgcctacgaagaaaaatgaatataccggacgatttcaggggtacaacgtcatccagctgagcatcgaggggttctccggctatgccatcgacccggagctcacccccacgctgtaccggctgacccacgagggctttgtgttccccaatttctatacgcccctgcactataccagcacctctggcggggagtgtcaaaacctgctgggactgtacccaaaggcgggcaaccccatcaccatgaaggagaccggggtgcggcacaccgacggccgcttcagcctggcccgccagctgggggcgctggggtatacggtgctgggctaccacgggaatgaggatatgtacgggcggtacgcctcccacaccaacctgggctacacctggaagcagtaccagacggggctggagctggagatgacagcggacgggagcacctatgcctggccccagtccgatgtctatgtggccaagaccagcatggaggactatctctctttggacagccccttccatgtgtactacatgaccatcagcggacacatgccctacaacttcaaccgggtggcgtcgaagtaccgggatctggtggagcccctgccgtacagtgagactacaaaggcatatctggccaccgccatcgaggcggaccggatgctccagactctgctggacggactggagcaggcgggcgagctggacaataccctgatcgtggcctgtgccgaccacatcccctatttcaatgtggacacgctggaggagctgtccgggcagagatttggcagttcagaggatatggagcggctggatgagaggagcatcaacttcgacgtctaccgcagcgccctggtcctgtgggccgccgggatggaggagccggtggtggtggacaagccctgcggacaggtggacatcctgcccaccgtctccaacctgctgggcttggaatatgactcccggatgctggccgggtcggatctgctgtccgacgcgccggggctggtgatcttcagctcccggagctggctgacagaccggggattttatgaccgctacacccagaccttcaccccggcggagggggaaactatgacgccggaggagcaggcggcctatgtggacgccatgaagcggaccgttcagtacaagctgggctgtacagagaagatcctgaacagcgatttttaccgcctggcctttggaggttga

SEQ ID NO: 1940 - DNA, 1455 bp, Unknown
  Unknown gut bacteria
atgcacctggccgggccggacgtcttcgggccgctccgccggtccggtgggaaagtgagtcaaaaaatgaaacgaatcgcgcggtatctcctgctggcagttcttctgtgtgttctgttcctggttctgtccatggtcattcctcccctggtccacaagaccgccggtcccggagactgggaggcggagcccgagatgacggacgccgccccggagcgggtccggagcatcgacgacaaccaggacgctctgctgtggcggctccggctcattgaggccgcccaggaacaaatcattctggctaccttcgacttttgggacgaggagggcggccgggacgtgatgggcgccctctggaacgcagcggagcggggcgtggaggtacaggtcctggtggacggcctcaatggagggggcaggccgctctccagcagcgacctcttctgccagctggccgcccatgagaatgtggaggtccggctgtataaccccctcaacctgctgaccccctggaaaaccaattaccggatgcacgacaaatacctgatcgccgatgacctggcctatctcctgggcggccggaacacggataaccgttttttgggccgctacactgaccactacaacgtggaccgcgacattctggtctatgagacagagcccggacaggggcagtcctaccgccagctccgggactatttccaccggatctggtctctcccctgctgcaaggtcctggaccagcccggagagggcgaagacctgtcccgctgctatgaggagacaagggccaggtatccccaggcgttcgccgatcccctcacccggcccgagtgggaggccgctaccctggagactcagggggtagagctctggaccaaccccatcgagccggagaacaaaaagcccatcctctgggcccggatgatggacgccatggcgaaggcggaggaggtcctggtccagaccccctatatcatttgcagccgggatatgtacggggatctccggtccgtctgtgacggcggcacccgaacagacatcctcatcaacgcggtggagatcgggagcaatcccttcggctgcaccgactacttaaaccagaagaagcccctgagggacaccggggtgtccatgtacgagtatttgggagaccaggctctgcacaccaaagccctggtggtgggggacgatctgaccatcgccggctcctgcaactttgacatgagaagcgtgtatctggacaccgagctgatgcttgccatccgcagccctcagctcaacgcccagatccgcggacagatccaggagcttcaggagcatagccggcggatggccccggacggcaccatcaccgacggccctgcctaccagccccgggagcagagtctgggcaaacagatctcctacggccttctgcgggcggtcatcctgcctttccggcatctgctgtga

SEQ ID NO: 1941 - DNA, 849 bp, Unknown
  Unknown gut bacteria
aataaaacgcaagcggtgccgttcctcccttcggaggggcgtctgcctggggaggagtcatctgacatggaaaagaagagtgggagcgggggcgtacagtccctggaccgggcgtttgaccttttggaactgctgtgcagaagccagaatggcatggccattcaccagctcagcgagatcaccggcctgcataagagcacggtccaccgcctgctggcggccatggcaagccggggttatgtgcggcgggacccggagaatgccgtttaccgggcggggatgcgcctgtgtgagctgagcgagtacatccaggagaacctggatgtggtggcccgggcccgggagcccatggagcggctgagccgtgccaccggggagacggtccatcttgtggcccgtgagggggcggagatcgtctacgtctacaaggtggaaagcatccacggggccatccgcatggtgtcccgcatcgggatgcgccgccccctgtactgtaccggagtggggaaggccattctggccacccggggggatgaggaggtgctccagtgctgggaggagagcgagcgcgtcccctgcaccccctacaccatcacccggaaggacgccttcctccgggagatcgcccagatccggcagcagggctatgcgatggacaacgaagagaacgagctgggggtgcgctgcgcagcggcggccatcccggactggcacggggctgcgtcctatgccctgtccatctcggctccggtgtcccgcatgaccgacgagcgggtccgcagtctgatccccgccctgttggagacccggaacgagatctccgcctgcctgggggggcggctggaatga

SEQ ID NO: 1942 - DNA, 2112 bp, Unknown
  Unknown gut bacteria
atggagttttcccagtggaaggaacgatattcgctctccctggatggacagcaggagcaggcggtccaggcggtggacggcccggtgctgctgctggccgtcccaggcagcggcaagaccaccgtcctggtgtcccgggtgggctatctgtgtctggccagggggatcccgccggagcagatcctgaccatgacctataccgtggccgccgcccgggatatgcgcacacgcttcaccgccctctttggggagcaggctgcacagcggctggagtttcgcaccatcaacggcgtgtgcagccagatcatccgcacctatgagcgcaggctggggcggacggccttcaccctgttggaggatgcgggacagcggggggcgctgctgggggagctgtaccgggcgcagacgggagagtttgcagccgagagcacagtgaaggccctgatgaccgccgtcacctatgccaagaaccagatgctgactggggaggagctggcccaggtccaggtggaaggggtagagttttctaaaatcttccgggactatgagcaggcgctccggcagagccggaggatggactatgacgatcagatggtctatgctctgcggattctccggcagcaccccaggatcctggaggaatttcaggggcgtttccggtatttctgtgtggacgaggcccaggacacctcccgaatccagcaccggatcatccgcctgctggcgggacagagccagaacctctttctggtgggggacgaggatcagagcatctacggcttccgggccgccgacccctccgccctggtccgcttcccggaggagtggcccggggcccgggtcctgcgcctggagcagaactaccgctccacccgggagatcgtggcggcggcggaccggttcatccagaaaaacaccagccgcctgcccaaacacatgagggccgtccgggggagcgggcccgcgccggaggagatctccgtctatgaccggcagaggcagtaccgctggctggccaagctggccaagagctgtgaccgggagaccgccgtgctctaccgggacaatgacagcgcccttcccctcatcgacctgctggagcgggccgggaccccataccgctgccgccaggtggagagcgcctttttcaccagccgggtggtccgggacgtcacggacgtgatccgttttgctctggacccctgggacggagagcggttcctgcggctgtattacaagctaggggccgggatcagccggtccctggcccaggaggcggcggaccgggcggaccaggagagggagaccatcctggcctatatcggccgtcagcccggggcgtctccctggaccagaaggcagtgcgccgccctgagcacccacctgtccaatctgcttcaggagcggggggaccgggcggtataccgcatcgtccactttatgggctatggggcctatctggaggagcacggcatggacgggagccgggcggacatcctggaggccatcggagcggaccagcccacgcccctggccctgctggagcggctggaggagctggagcaggtggtgcgggcgggtgcacacggtggggaggaggtcccgttcctgctgtccaccatccactccagcaaggggctggagtatgggcgggtcatcctgatggacgtggccgacggcatcttccccaaaaccgtcccggagggcccggagcctgagcaggcggagctggacgcctatgaggaggagcgccgtctgttctatgtgggaatgacccgtgcgaagaacgaactttccattgtacgcttccgaaaggagggactatcctccttgtttgcggaggagctctttcccacgccacgggagccgcgtcccaatccggcaaagcggccgctgccgatggagatgggcccggaccgtgacgccctcgccgccatgggggaggtgcttgtgcccggagtgcgggtgcggcaccggacctttggacctggggtgttgtgtgaccggaacggagatatcgccacggtctcctttgacagcggagcggataagcgcctctccatgtccaccgccctgcgtaccgggcagctgaggctggaggaagaggaatag

SEQ ID NO: 1943 - DNA, 1386 bp, Unknown
  Unknown gut bacteria
ttggcgcagcaggagtatgatttttcacaggggagcatcgcaaagaatatcatgtccctggccgtccccatgacggcggcccagctgatcaacgtgctgtacagtgtggtggaccggatgtatctggggcggctgccggggcacttggcgctgacggggctggggctcaccatccccatcgtgtccattatcatgggctttgccaacctgtgcggcactggcggcgcgcccctgtgttccatctgccggggcaggggggaccaggaggaggcggagcgggtgatgggcaacgcatttactcttctgctgatcttcggcggggcggtgaccgccctgttcctgatcttcaaacggcccatcctctacctgtttggggccagcgacgccacctatccctatgcagacgcctatatgaccgtctatcttctggggacggtattcgtgatgatcgggctgggcatgaacccgttcatcaacgcccagggcttcggccgggtggggatgatgacggtggggcttggggcggtggtgaacatcgtgctggaccccattttcatcttctggctggacctgggggtgcagggggcggcctgggccaccgtgatcgcccagggctgctccgccgtgtgggtgctggtctttctcaccgggcggaaggcggccctccgcctgcggcccaggtacatggtgctgaagcctgcccgggtgcggaagatcgtctccctgggcctgtccggcttttttatgaacctgaccaacagcctggtccaggtggtgtgcaacgccaccctccaggtctacggcggcgacctgtatgtgggcgtgatgaccattatcaactccctgcgggaggtgtttatgatgcccattcacggcctgtccaacggggcccagccggtgacgggctataactacggggcggggctgtacagccgggtgcggcagtccattcgcttcagcgtggcggggacggtgggctgcgccgccctgttctgggcggcggccatggtgttcccgggggcgctgatccggatcttcaatggggacgcggagatgctggcagccggggtcccggccatgcggatctacttctgtctgttcattcccatgtcgctccagatggcggggcagggggtgttcgtcagcctgggccgctcccggcaggcgatcttcttctctctgctgcgcaaggcggtgatcaacgcccccctgacagttctgcttccggtctggatggggacggacggggtgttcgtggcggaggcggtgtcccagctggtgggggggctggcctgtatcatcaccatgtatctgacagtgtaccgccccttcggccgtctgccggaccgggcggggggatgcaaagaggacagagaggacagctga

SEQ ID NO: 1944 - DNA, 1197 bp, Unknown
  Unknown gut bacteria
atggcaaccacacttgcggaacgcatgaacaaattcagcggctctcccacctcggcgctgatcgccaaggtggcggagctgaagcgtcagggaaaggacattatttccctgaatgtaggggagcctgattttgggacccctgattacatcaaagtagctggtatgaaagcgatcgcggataactttacaaagtatacccccggcaacgggatcctggagctgcgccaggagatcgtgaagaagctgagagaggacaacggtgtagagtatgcgctgaacgaggtgaccacagcggtgggcgccaagcaggccatcgccagcgcaatgatggtccttgccggcccaggagatgaggtcctgctgcctattccctgctgggtgagctataccgagatgatccgcctggccggcgcgacgccggtgttcgtcccggtgcgggaggacaactatgagctggatctggacgccatcgagaaggccatcacccccaggaccaaggccatcgtcatctgcacccccaacaaccccacaggggcagtatacagtgaggagagcctgagaaagctggcagcactggcggtggagcacgatttcttcgttgtggccgacgagatctatgagaagctggtctatgatggagcggagcacttcagtgtagcctctatctctcaggaggtcagggaccggaccgttacagtgaacggcttctccaaggcctacgccatgaccggctggaggatcggctatgccgccgcccgggccgatgtgatcaaggggatcatggcggtgcagagccagaccacctccgccaccagcgccatttcacagaaggcggcggtggaggcgctgagaggcccccagcacgacctggaggtcatggtggaggagttcagaaggcgcaaggattatgtggtggaccggctgaacaggatcccggggatcacctgtcccgatgtcaagggtgcattctatgtgtaccccgatgtgcagctctatctgggaaaatccttcggcggccggaaaatcgagacggcggtggagctgtgccagtatctgctggacgaagctctgatctccacggtccccggcgaggcatataacgttcccggtaagatccggatttcctactccaattcgatggagaacctggagaaagcgctggaccggatggaacaggcactggcggcgcttcactaa

SEQ ID NO: 1945 - DNA, 717 bp, Unknown
  Unknown gut bacteria
atgaatcgaaaagccttgaccgccgcctttccggcgacggttccggttttgatggggtatctggccatcggcatggccttcggtctgatgctggaaacagcgggctacggcgtgggttgggctctgctgatgagcatgaccatttatgcgggctccggacagtatctgggtgtctctctgctggccactggggcttctctgagccaggtggcgtttttgacgctgatgatcaatttccgccatctggtgtacggcctttccatgctggaaaagttccggggaatgggggcccgaaagttttacatgatcttctccctgaccgacgagacctatgccctgctcagctccgcccgggccccagcaggggtggaggagcatgactactactttgccgtggccatgctggaccacagctactggattctggggtcggtcctgggttctgtgctgggcgccgccctggggctggacaccaccggagtggacttcgccatgacggcgctgtttctggttatcgctgtgtgccagtggaaaaaggccgggagccacctccccgcccttctggggggcgcggccaccctgctcagcctgatgctggtgggtgcggaggagatgctcctccccgccctgggactgatcgttctggcattgactgccctgcgtcccaaactggatgactgttatgaggcaaaaaaggaggaagtaccatgcagctga

SEQ ID NO: 1946 - DNA, 1323 bp, Unknown
  Unknown gut bacteria
gtgtccaatatgtggtttgaccaagctatcctctatcagatctatcccctgggcctgtgcggcgcgccggcggacaacgacgggcataccgagcaccgcatcctgcggctgctggactgggtggagcacatcaaacagctgggggcggacaccgtcctgctcaatccggtgtttgacagcgaccgccacggctacgacacccgggactacaaccggctggacccccgcctggggaccaacgaagacctggcccaggtgtgccgcgcctttcacgacgccgggctccgggtcctgctggacggagtgttccaccatgtgggccggggcttctgggcctttcgggacgtacaggagaagaagtggaacagcccctaccgggactggttctatctgaacttcgacggcgacaccgaccggggcgacggcttctggtatgagaactgggagggccacggcgagctggtcaagctgaaccttcacaacccggatgtggtggagtaccagttccaggccatccggagctgggtggagcagttcgggatcgacgggctgcggctggatgtggcctactgcctccccgccagctatctgaagcgcctgcgggccttcacccagacgctgaagcccggctttgttctggtgggcgaggtcctgggcggggactacaacctctggatggggccggagctgtgccactcggtcaccaactacgagtgctataagggcctgtggtccagcctcaacgaccgcaacctgttcgagatcggccacagtctggcccgccagtacgggccggagccctggaccctctacaagggggcccacctgctgtccttcgtggacaaccacgatgtcacccgcatcgcctccaagctccgggaccccgcccacctccccctgatctacgcccttctgttcgggatgcccgggacccccgccctgtactacggcagcgagtggggcatctccggcgaaaaagccccgtgcagtgacgccggtctccgccccgccctggaaaagccggagtggaacgccctgacaagctggatcgcccggctggccgccgcccgaaggggcagcccggccctgcgggagggcagctatcggaatgtgctcctcaccaacctacagctcattttcgagcgcagaacagagacggagcgggtgctggtggcggtcaacgcggacagccagccctatactgcccacttcgacgccggctgcggcctggcctgggacctgatctccggccagcagcacgacttcggcggcgggagccagctgcccccgtacagcgcgtttttctggaagatggagcggtaa

SEQ ID NO: 1947 - DNA, 792 bp, Unknown
  Unknown gut bacteria
ttgctgaccatcgaccagtatgtgagggccgaaagcctggaacaggcctatgagctgtgtcaaaaacgaaatcatgtggtgctgggcgggatgctctggctgaaaatgcaggatcggaaggtggggaccgccatcgacctgtgcggcctggggctggaccggatcaccgagacggagcgcgccttcgagctgggggccatggtccccctgcgcgccctggagacccacgaggggctcaatgccatgacccggggggccttcgcccgcagcgtggagcacatcgtgggggtgcagttccgcaactgcgccaccgtggggggcagcgtctttggccgcttcggcttctccgacgtgctcaccctgctgctggccctggacgcccgggtggtgctccagggggcgggggaactgagcctggaggagttctgcgcccgtccgcccttccgggacatcctggtccgggtcatcgttcccaagggagcggaggggacggtctatctgtcccagcggaacagcgccacacactttcccgtcctcgcctgcgccatcgcccgccgggagggcgcgttccgcttcgccatcggggcccggccggggcgggccagggtctatctggatgagaaggggctgctgtctggcgggatcacccgggacagcgccctggccatgggggaggatctgtcccgccgggtccccatgggggacaacctgcgtgccggggcggagtaccggacaaagatctgccaggccctggtgcgccggggcctgctgaagctggaggaggcgcgctga

SEQ ID NO: 1948 - DNA, 495 bp, Unknown
  Unknown gut bacteria
cccactcaggaaaagcggcagcgctccgtggtccactacatcgccatcctctttgccgccgcctttctgctgatgctgatgacctatctcatggaccggcggcagaacgaggaggtggtggacagtctcaaccagtcggtgtccggtctgcgggagtccctctccaatatgcagtctgtccaggacatctatgaggaaaatcagtctctgcttcaggagatcgaccgtctggaggaccaggtggacgaactggaacgccaggacagcgcccatgccgcagagctggagcaggcggagcagacccgtcaggccatggactggttctggcagatcgacgaggcatgcgtcctgggccgctactccctgtgccgggagctgatccagtccctggaggacagcggcctgtcagagcgcctcccccaggagagcaccaccgacaacggccgcttctccccggcgctccgctatcaggagatccgggaggccctgtactga

SEQ ID NO: 1949 - DNA, 513 bp, Unknown
  Unknown gut bacteria
gtgaagatcatggatcgggacggacggctgttcggcaagatcagcatcgtggacgtgatcgtccttctggtggtggcggcgatggtggccgccgtctatgtcaagacgcataagcctcagacggggagcaatgtggggaccaccacggtggtctatcagatggagctggagaaccagccggagtatatgctggacgccatccaggtgggggaccagatgtttgacaaggagcgcagcaccggcggctctctgggcaccattacagacattcaggtcagcggcgggacctatgaaggcaagctgaacgacgggacggtggccatgctgcccgccgaggactgctacaacatccttttgaccattgagggtgaggccctgatcgaggggaacggcagtgtgatgctcaaccgtatttacagcctgggggtcaactccaaccggaacttcaataccaagtatgccaattttgtggggaccattgtggacctccagatccccggcggggatcagtga

SEQ ID NO: 1950 - DNA, 1188 bp, Unknown
  Unknown gut bacteria
atgcacgcatttgaattttccattcccacccggatcgtctttggaccggggacggagtcccggactggggaactggccgccggtctggacgcccaccgggtcctgctggtctgcggcggccagagtgcccggcgcagcggactactggaccgggtggagcagtctttgattcaggccggactcgcctgccgcgtctttgcggggatccaccccaacccccgcctgttccaggtctgtgagggcgttcagacggcgctggaatttggggcggacctgatccttgccgtcggcggcggcagcgtcatcgacgccgccaaggccatcgccctgggcgctgcggagcccgaggccgacctgtgggacttctggctgggcaagcgtccggtggagcgcacccttccagtgggggcagtgctcaccatctccgccgccgggagcgagaccagctcctccgccgtgctcacccgggatgacactttggagaagcggggcctgacctcagagcggatccgcccccgctttgcagtgatggatccggaactgacctgctcccttcccccctaccagatcgcctgcggcgtggtggatatcatgatgcacactctggaccgctatttcacctgtgtcaccggtaatctgctcaccgacgagatcgcccaggggctgctgcgcacggtgatccgctgcggcgcccgggccctggcagatccctgcgacctccaggccatgagcgagctgatgtgggcgggcagtctctcccacaacgggctcaccggcctgggcgcgcccaaggattttgccgtccaccagctgggccatgagctcagcgcccgcttcgacttcgcccatggggccaccctctccgctgtatggggcagctgggcggagtactgcgtggagaccgatcccgcccgctttgcccagtacggggtgagcgtctggggtctggatcccgccggaggcagccaggaggagctggcccggcaggccattgcccgcaccgtggactacttccgctccctggggatgcccacctgcctgaccgaactgggctgcggactccagagcgaggaggagctgaaggaactggcccgccgctgcaccttctacggggcgcggaccatcggcgccttccgggtgctgggcgaggcggacatcctggccatttaccgggcggccaaccgctga

SEQ ID NO: 1951 - DNA, 2661 bp, Unknown
  Unknown gut bacteria
atgaaaaaaaggacggtgagaatagtgctggcgaaaagatggattattacagagtgtgcgaaagagcaaagagaagatttaagccaagctttgggcgtgtcggagtatattgcggaaatacttttaaagcgcggtattgacagctttgcggcggcgcaggaatttttaaatcccagcctgactaatctctccgagccgatggaaattttaaatatgggcgcggctgccgaaaaaatatggcaggcgatcgatgataaaaagaaaatccgtgtttatggcgattacgatgtggacgggatgtgcgccagcgcaattctttacgagggattaaaggatctgggtgccgaggtggatgtatatgtgccggatcggattgaggagggctatggcctaaacgaaaaagctgtcgaaaaaatttatgccgacggcacaggacttttggtgactgtggactgcggtatttcctctgccaaagaagtagctttggcgaaaaaattaggtatggaggtcatcgtgaccgaccatcaccagctgcctgaggaattgccaaaatgtatcattgtcaatccggcgatggcgctcgataaaaaagccaaatggagcaatttatgcggcgcaggcgtgagttttaaattagtgcaggcgctttatgagtggaaatacggacaggaaaacgtctggaaaaataccaagaagcttttggatttggcggcgttggcgacaattgccgatattgtgccgcttcgcggggacaatcgcatcatcgttaaattcgggttggaggttttggcgcaaggaggacgaattggcttgcgcgaattagccaaagtagcggcaggcaataacaatatcgagatgacgacgatgctggcgagctttggtttagcccccagattaaacgcttgcgggcgtatcggcgacgtacatacggggttggagcttcttttgaccaaggataaagataaagcgtgggcgatcgccaaaagattggacgaagaaaaccgcgacaggcagaatattgagcggcagatattcgaagaggctcttttgaacgtggcagacggcacaaccgacgctcaccgcggcatcgtagtctgcggcgataattggcacccgggagtaatcggtatcgtcgcttcccgtatcgctgagagattttatacgccggttatcgtttttacgcgtaataacagcttgtacaaaggttccggccgcagtatcgaaggctttcatctgcagcaggcgctggcgaaatgcgccgatattttagaaagtttcggcgggcacgcgcaggcggcgggactaagtatcaaagcggaaaatatggacgaatttattcgtcgtttcggcgatttggtggcatcaagcgacgagcagatatttttaccgagggtcaaaatcgactgcgtgctgaatcagggctcgattaattataatttttacaacgaattggcgaaactgcagcccttcgggatgcataatccaccgccgatttttgctctgcgcggactgaaagcaggcgaaagccgtactgtcgggacaaattccgatcatttaaagattaaatttgtcacttctaaaggcgatattaatgcgatcggctttaaaaaagcttacttggaggatactgttaagcatgatttggtggacgtggcgtttaatttagaaaaaaacgtctttaacggtcgcaccaatttgcagctcaatatctgcgatatcaaatcaaagcgccgcagcgatgatttggatatgctggataaattgtttttttattgggaggactatctgagcgacgatccctatcgtaatattgcggcgaaagatgaattttataccaaaattgtcggcgttacttttgaaaacagacaggaattgatcggctgtttgagtgtggggcaggagctggtgctcaaacgcgaaaaggaaaacgcatacgataataacgcaatcgccgtctatgcagacggtaagcatttaggctatttaaagagagaattagcgcatcatctggcgccgtgctttgatcgtaatgtagcctatacggcgaatatcagccagatcacaggcttggataaaaatacgctcggagtcaatatctttatccgccgcgaaaaagaattttcctgcgtggacgagcgcagtttattggcgaaaagaaaagcggaaatcagcgctttaaatataaacgagcagaaaaagctgatcaagcaggaaattttaggcgagtatgattacagagataagcagaaagaggcattagccgctttgcaaaaaggcgaaaacgtcttttgcatcatgggtacagggcgcgggaaatcggctattttccaaagctacagcgcttatctggcgctctcgcagaaaaaacgcacggttatcgtctatccgttgcgctcgctggttaatgaccaatacaatcgcatggcggagcgtttaagtcatttgggcttggatgtggtgaaagcgaccggcgagataaataccgaggagcgcgccgaattataccgcagactcaaaaataatgaggcagatgtcattttaactacgccggagtttttttgctgcaatcaaaagacggtttttgccgaggcgcaaatcggttttgtcgttttggacgaagcgcatcatttggcagacagacgaagcggctacaaaagaatc

SEQ ID NO: 1952 - DNA, 1146 bp, Unknown
  Unknown gut bacteria
atgaaattcatccatctggccgatctgcacttaggccgcagtatcggtggattttcccttttagaagatcaagaatatattttaaagcaaattttagatattatccgcgccgaaaaaatcgagggtgtcttaatttgcggcgatatatatgataaaacctcgcctttagctgaagctgtggggttatttgacgattttgtcacgtctttagccgcgctcgatttgcccgtttttgtcatcagcggcaatcacgactcggcaaaaaaactttcgtttgcctatcgtttggtcgaaaaatgcggcctgtatctcgcaccagtctttaccggcgcaataagcaccgtaaccttgactgacgagtatggtccgataaatatccacatgctgccctttctcaagcccgcccccgccaaggaatttttccccgaggaggaaatccgcacccaccacgacgccgtgcgctgtgcgttagcggccttagaaacagatccgcacgagcgccatatcctgctcgcgcatcaatttatcaccggtgctttatccaccgacgaggagtcctccgtaggcggcgccgataatatcgggatcgaaatctttactgatttcgactatgtcgccttggggcatctgcacgccccgcagaagctcaagtacgactacatccgctacagcggcagtccgctcaaatattccccggcagaaatcaagcaggaaaaatccgtcacgatcgtggatttaaaggaaaaaggcaatatcgacattaaaataatcccgcttatgccgttgcgcgatatgcgcgaaatcaagggcagctacgatgaattgtgccaaagagagaattatcaaagcaccaacaccgatgattacttaaaagtaatcttaaccgacgaaaacgacgtgatcaatgctctggcgaaactgcgcactatttatccgcacattttggaattaaactatgccaataaacgcacgctcatgcaggaaaattcctttgcccaaagcgagcaaatgctcgaaaaaacgcctttggagcattttaacgatttatatttcaagcaaaacaaccgtgagttggacagcgcgcaaaggcaatatctaaccgagcttatcaataaattatgggaggcagagcaatgcggccgttaa

SEQ ID NO: 1953 - DNA, 1794 bp, Unknown
  Unknown gut bacteria
atgagagaaaaaattcataaagttaataaaataacggcattattgttagttttgatttttaccttgggcttagccgtccctgcttgggcagagggcgagtcggtttcgacggacagcaacaacgagcagatcacctataaaacaggcgctaatcctttgtggacgattgataatattgaaattttaaacgagcctgcagtcggcgagcagtttgatatcgccattaccgcgcgcaatatgggctcgggagacgcgatgatgccaatcatccagtttaccgaggatgaaaaagcgctgaaaaacttctccgttttaggcggcggagacacttatgatcccaaagtggataaggttaaagccggcgagagctatgtttttaatgtgactttagtagtcgatgccaatgcccgtgaaatcggcggcgacggatataaattgaatgctattttaagaagctataactgggatatcggtcaggcgacgcgcccatttaccacttccaaacaattttatgtctcgccgaaatatgctttgagcacgccgagctttgtcgtgcgtgatgttaaattttcgcctgaggttaccgacagcacgaccaaaactaccgcgactttctatgtggaaaatgtcagcgactccaaagcgcgcaatgtcaaagtatctttattgggcaaagaattaaacgataaaggcgatcgaaatatcaaagtcgctgatttgtccaataataaattaatcggcgatatccgcggcggtgacttgttccaggtaagctatgatttggagttaaatgcgggacgcaaggataacgaaatgacgatgacggttgactataccggctcggaaaaggcgcaggaaatggttgtcaatctccccttgccgttaaccagcgcgggcggcaaagtaccgcgcgtcattatcaataagtataccgtctcgccgagcaaagcttatgcaggcagtcatgtgacgttaaatctgtatgtcgagaatactaatgccaaggaagtccgcaatgtgcagatctctttaaaagtaccgaccaacgaaagctccaactccactgtcgtttcctccggcaccgttttttcgccggtagacagcagtaatactttctatatcgaccatatcgcgggaaaatccgtcgcgaaaaaggaaatcacgatgtatgtagacagcaatgccgcggcaaaaacctatgtcgtgcccgtcagcattacttacgaaagcttggacggcgatgcatatgaggccgaggataatgtgaatattcctgtaggtcaggaaagtcagatcgacatcatcgctcactcggtagcgaaagaggcgacggtaggctcacctgctgattacagtatcgagtttgtcaatgccggtaaagtcgccgtgactaatttaaaagcggaaatccagggcgagtctccggtgtttgaaaatcaagtttattatatcggcaatttcgatgtcggtgcgaccgatactttttccggctcctttgtgcctgaggaagtgggcgagttaagcggtaatatcgttttaagctatacgactactgataatgaggatgtcgtcatggagtatccctttacagtgaatgtctctgaaatgattacccccgatattgatccaaacgacccgggtatggagccgatggatgatggaaataattttctggataccttaaaaggtcatatcaaagatattatctttatcgtgattattgcggtattggcaggtattatcatccgtgacaagcgcaaaaagaaagcagatgaggagcttttagatgaataa

SEQ ID NO: 1954 - DNA, 1389 bp, Unknown
  Unknown gut bacteria
gccgattttggcgcacgttattgcgctgggcacactttaagcaattatttgcctgcacttgataatactactgtcgcgcgctatcttgacgcagaaaatattttgccgcttgcctttaagcagttaaataccgcaaatattacgtccgttttttcggctgttttgccctcaattctcaccaaagcaggctcgctctctttgcgcgctttgaagcaagaagaaacgcttgctgcatttaatgactctctcgcgcaaaaagccgcgcaaattgatttaatgcgtctttccgagcacgccgccgcaggcttttcgtgcttctccgagcacacattattagaaatagcgcccgctgccgaaaaagcgctgcaacctttcatagcaaagctaattcccgcgcttttgaacagtttgtgcagctatctggctgagcatttagctgaacttacaacatttgtccaaaagatgatcaaaaaccgcctcaatatgctccaagccttcggctacgccgcaatgaacggcgatcaactggtagagaaagtcctttctatctttattatgagcaaactgccggctttctgcggcctaaaagccaccgaactggaagctgtcgccaaagaccgcctgcatgatttctgcgcggcgtcttttcaagataacggcatctgtttagacaaggatatattttatttactcctatcctctgccgcctttcaaaccgcgctcaaacgcaccgccgacaactgcacgcaaaatatcttggatacaccgcttagtaaactcattcccgcgtctcttgtaaacgagcgcgagcacctaattcaggatgatatgcagaagcttctcgcgccgcttgccgccatatgtgcgcacgcgcttgcgaaaattgattatgcaccgctttgccgcacaatcaaaatagatgaacgttttaaagcaagcgtagctgatgagcttagtccgatactttccgcatttttaaaaaaacttaactctacttctatagccgcccttttgcccacgctccaaaaccctgataatatcgaaatactcctcactgattttatctcgtccgagggaatgcaagatattattgcggctgaaaaaactgctttcaaaaattatctgccggaatatctgccgcttttaagcgcgccgctaagccatattttaacgcagttactccttgataatgtccaaatttacggacaagttttggacaaaatgcaactatccgactttatcgcagcgcaaactgccgccttaaaacccgaggaactggaaaaaatggtgcgcggtttcgggcagggctatctgagccacatccaaaacatgggctggtggggcgcagtatttgctatcccggggatattgttagactttttcatttag

SEQ ID NO: 1955 - DNA, 1110 bp, Unknown
  Unknown gut bacteria
gtgaaattttccgcaccgaaagaaaatctactgtacggcatcaacgccgtgcaaaaagctatttccgcgaaaaacaccgtgccgattttatccggtatttatttaaaagctcaaggcggccgcctgaccttcgccgctaccgatttagaaatatctatcgagtgcaccgtcccggcattaatcatttctgagggagatatcgttttacccggcagatatttcgccgaattaaccagacgcttacctgagggcgaggttatatttgaatatcagcccgattccgtttcaatgaaaattacctatgaaaacgccgaaagctccatcaaaggctggaaaggcgaagagttcccgactatcagccagattaacggcgacaaaagcattgccatcatccccagcgagtttaaaaatttagtcaaacagactactttctgcgctaataaagacgatgtccgtccggtatttaccggggcgctgcttgaagtggaaaataatcaattaaaaatggtttccactgacagctaccgtttaagctttaaagccggagctatccaaaatccagactcttgctcttttcaaaaagtcgtcccggttaaagccttggaggaattgagccgtattttaaaggacgatgacgaggatttgctccatattacctacaatcaaaatcagatgtccttttccaacagcgaaattcattttaacacccgcttgatcgacagcaattatcctgattatcgccgcgtcatcccctccgagcatcagactttgatcaaatttaaaaagcgcagtctgcaaaacaccatcgaccgcgctactcttttcagctcagaaaaagacggtacaaatgtcattaaaattaaaattgaagacgaaaatatcaatattacttcccaatccgattacggtaaaatcgacgaaaacctgccgatttatcaagatggtgaaaatttgagcatcgcttttaatgctaaatatttaacagatgcttttaaaacaatggattacgaggatttgcaggcgacattttgcggatcattgggcgcggcagtctttacaggattaaacgacgacagctatttatatctgattttgccgttgcggagttaa

SEQ ID NO: 1956 - DNA, 1167 bp, Unknown
  Unknown gut bacteria
atgcatgtagatatggatgctttttttgcggcgatcgagcagcgcgatcacgccgaataccgcaataaacccgtaattgtcggcggcagcagcgccaagcgcggcgtcgtctcgactgcgtcatatgaggcgcgcaaatacggcgtacattcggcgatggcgatggccgaggccgagaaaaaatgccctgacggcatttttctcgcggtcgatatggcgaaatatcaccgtgaatcacaaaaaatcatggaaatattcagccgttttacccccgcagtagagcaggtatcggtagacgaagcgtttttggatatcagcggcacggaaagattattcggcatgccggaggagatcgggtgtaaaatcaaagccgctatcaagacggagatggatttaaccgcctcggtaggcattgccaacagcaaatttatcgcgaaaatcgcctccgagcttaataaaccggacggtctcacttatctgccggatggaaaaataccggatatgctttggcctttgccgataaaaaatatgttcggcgttggcaatcgcaccgcagaaaagatgaaagactacggcatctcgaccatagggcagttagccaaatgcgaccgtgctttcatggaaagaatattcggcaaaaacggcgcgcagatgcatgatttagcaaacggcatcgatccgcgcccggtagaaacggtgcatcaggctaaatccagcggtcgagaaattacctttgccgaagatattacggatcgggaaatcttggcagatacattaagcatactggcagaggacgtcgcccataccttgcgccgttataatttaaaatgccacggcgtcagtttaaaattccgctatgcggatttacgccgcgcaagccgcgctatgcagcttgcggagtatacgtctaattatcacgatatttacggagcattgatacaattgttggctaaatattatcatggcgaaccagtcaggctcatcggtcttgccgcaacacatttaaaggaaaatccgccgttagcacaaagtatgtttgacggcgataatcgtttgaagcgcgaaaagctcgaccgcacacaagatttattaactgcccgtttcggcaaagacgccctaaaacgagcgcggcacataaatacgaaaaaagcggacaaagaactataa

SEQ ID NO: 1957 - DNA, 837 bp, Unknown
  Unknown gut bacteria
tttgcacacaaaattgtgcctactttacaaaatgaaatttttgtgtacaataataagcagagagttattaaaggaggaattaatatgctgcaaactaatggagaagaaaaactgcgtgcatacgcggaaagggagtttcctaagcagttattaaaagtgtcggagagagtttatcatgctttaagctatggtcacagcaacgcgacaattattatcgcggcaaactctgtaattttagtggacacgcttaattcgcgcgaaagcggcgcaagactgaaagctgagattgaaaatttgacggataagccggtgaaaacgattatttatacgcactcgcatcccgatcacaggggaggcagcggagtatttcgtgatacggtagaggaaataattgcttttgctcctgtgaataagccgctaaaatataatgaaaaaattatgcgcggacttggcgcgagaacaatgcggcagtttggctataatttgtctgatgaagagctaatcactcagggtatcggtgttcgtgaggacaaaagcggctatgaaatgctgcctgcgacgacaatttatgacgaagatatcgttgagcgcgagatcgacggcgtaaaattgaaattagtccgtgctccgggtgaaacagacgatcagatatttgtctggctggaggaggaaaaggcgctgtgctcaggggataattattacgcctgctggcctaatctttatgcaatccgcggcagcagctaccgcgatgtggcggcgtgggtggactcattgggaaagatgttggagtataatgcggagtatttattaccggggcatacgcgcccgatagtaggc

SEQ ID NO: 1958 - DNA, 1365 bp, Unknown
  Unknown gut bacteria
atgtccgtcaatactgcgaaaaaagatctgaatttgctgtatttagctatatatgtagttattgtggctttatttttcttcgttttgccgccgtttgagccgattaccaaagcaggtatgcgtttactcggcatctttttagctgcaatcatcggctggtctattaccagcgaaatatggccgagcttattaacatttttacttttaccctttaccggcttagttaatttaagcggtgttttgagtatctcctacggcagcgacatgggcttaatggtaattgtcatgatggtctttgtcgcctatttggaggcatccagtactactaactatgttgcttcttatttaatgacgcgcaaaatgctggtcggtcatccgtggcgcttgattttcatgattttcttgattgcttacctcatcagctctttctgcggtaacttcccgggaatgttgatcacctggagcttcgtttacagtatttctcgcgaattaggctacaaaccgtacgataaattcccgagcttattagttttcggtatcgccgtcatgggtgcattgagcttatccgccgtaccgtgggcaaataacgcacttgtcatcttaaactcctatgcagcttccagcggtactccaataaactacgcccattacttgttctacagcgtaccttacggtattttctcgattttggcttttatgctgctttgcaaattcattttccgcttagatgtcagtaaattaaaaaacttcaagcctgattttatcaaacctgaggacttggtcttgacaaccgaaagaaaaattgctttagtaagcttactcactgtcatccttttatatttggttccgagtattctacctgccggtaatgctatccgtgctgtattcgaccaaatgggcttgagcctgcgtttagtcatcgtcatgatcgtcttatcgctaatcaaagtaaacggcaagcacattttccatttcagctccttagccgccaaaggcgtaccctgggatatggttatgatgcttatcggtatcctttctttcgttggtttattaagcagtcctgatgccggtatcagtgctttcttagccaagaccttgaccccgctgttccagaataacggcgtagcgttcttgttcttcatcacggtagtagtcacggtaattttgaccaactttatgatcaatatggttgtcgcggttatcatgatttcggcagtcgtaccgatcgctgcctctttaggcgtagatccgctgcaaatcgtttatctgatcacgattacctgcacgatcgctttcgcactaccggcagcctccgccgcctcctgcgtcctctttgccaacaaagaatggatcaagcctgccgat

SEQ ID NO: 1959 - DNA, 1260 bp, Unknown
  Unknown gut bacteria
acagtagagtatagagcaagcggaacagacgaaagttacaccaccaccaaccccacatttgtaggctcttacgatgtgcgtttgacctatgctggcggaaacaatgtttacgcctacgaaaaagaaattccgaacggacttaccatcaagcaagcagacaatgaaattaattggttttacttctcgagttcttggacatacggcgaggctgcaaaagctcccacagcgggagctcaattcggcgaggtagagtttgtgtattctgcagacggacagaattggacagccgagcaaccaacaaatgcaggcagctatcaaatcaaagcctatgtgacggagacgaataattataaaggcgcggaagaaatcaaacatttcaccatcaaccaagcaacccctaccattagcgagaaccccacctcgagtaagataagcagaaacaaaacattatctcagtccaagcttacgggcggcaaagttttgggcttaaacaatagcgaattaagcggcgtttgggcgtggagagacggtacggaaaaaatgagcaaactcggtaaatttgccaaaacggtcgtctttacgcctgaggataaaaattacacggagatagaaacggatattgaagtgacggtctatgattcctctatcgcaggcggcagcaatgataactgcacagtgagctttgacacagggttggtgcagacggtggcgaaaaacggctttgccgcgaagcctgccgatcctcaaaaagagggatatactttcaatggttggtataccgaccaaaagtacaccaaaaagtttaactttaacacgccgatcagctatgatttgacgctttacgcgaaatggacgaaaacggaagcgagcgcggataagcaaattattatgactatcggcgaaaagagtgctgcagttttcggcaagacggtgcataatgatgtcgctcctgtgatcgtaaacggtcgcacgatgcttccggcgagatttgtcgcggaggcattaggcgctaaagtttactggaatgaagaaactaaaggcgtgacgattatcggtgaaatagacggtaaagcggtcaatatgcttattacaattgacagcactacagcctatctgaacggtgaaaagatcgagctggacagcgcagcctttatcactgacagtaggacatatctgcctttgcgctttatttgtgagagtttgagcgcagaggtcgagtggcttaaagatacgcaaaaaataatcattacggcaaaataa

SEQ ID NO: 1960 - DNA, 1281 bp, Unknown
  Unknown gut bacteria
gtgagtaacagtgagaaaaaagcacatgagctttgcggcgaggagctcaaacgatatatcgcgcagtatcttttgccgcaggtggaaaagcccttgcgctatcagggcgaggagcttaatgcgatacataaagattgggataaaaccaaactgcatttggcgtttgcctttcctgatatttatgaaatagggatgagccatttgggcttaaatattttgtatcagcaggccaacagccatcctgattatctgatggagagagtttttgccccatgggatgattttgaggaattactgcgcgcggaagatatcgcgcttttttcgctggaatcctatcaaccgctcaaaaaatttcacatgctgggctttactttgcagtacgagatgagctatagcaatgttatcaatatgctggatctggcgaaaattgcgccgcgccgcaaagatcgcacgtcagaggacccactaatttttatgggcgggccgtgcgcctatacgccggagcctttggcggatattgccgactttttcatcatcggcgagggcgaagaagtcaatatggagatttacgctttattgtgcgcacatttggagaaacatgatggcaaaataaaccgcgcggaatttttggaacagttactggaaatcgagggagtctatatcccggaatattacgaggccacttattacgaggacggacggcttaaatcattcgagcctattcatgaaaaggcaccgcgcgtgataaaaaaacggatgctgccctctatggagcacgcttattttcctgaaaagccaatcgtgccgtatttggaggtcgtgcatgaccgcgcggtgctggaggttttgcgcggctgtacgcgcggctgtcgtttttgccaagctggagtattgtaccgccctgtccgcgaaaagtcgatcgaggaattaaaggagcaggcgatcaaaattatccaaaataccggctatgacgatgtttctttaagctctttaagcaccagcgaccatacttgcatttacgggcttttgacttcgcttatagaggagtttgaaaagcgcaatatttccgtatccttgccgagcctgcgcgtcgacaatttttcggttaatttagcgcaggtcgtgcagaaatttaagcgctccagcattacctttgcccctgaggcagggacgcagcgactcagagatgtcatcaataaaggtgtcaccgagaaaaatttagtcgacgtaagctatagcattttcgaaaacggctggaacaaggtcaagctttatttcatg

SEQ ID NO: 1961 - DNA, 1395 bp, Unknown
  Unknown gut bacteria
atgtcagctgctttaaaaaactacagcaaggttgatattatcaaggcaatagttaccttggcactgccattatcgttattgttaatcccgacaggcgatgtctttaccgcccagatgcgtcttttttgcgtgatcacgctgatgggtattttgtgctatgcttttgaaaatgtcaatcaaacggtagtttcgattttgatgccgatttcttatattttcttagccaaagttgatgccagtgtggtattctccccgtgggcgggatatgtgccgtgggcaaccttggcaggcttagtcatggcgactgttttgcaaagctgcggtttattagccagaatttcgtatttctttatcctgcgcaccggcggcagctataaaggcgtcgtctggggcatcagcattgtcgcctttttattgacgatgacgatcggcgacgtagccattccgatggcggctttggctttcggtatttgtatggcgatggatttaggtacgagtcgcgcttcgggcggtattatgctggcgacggcgatggcgtgtttgatgccaagctttatccgtatgttggcgccgattttcttaatgggtttagctgagccggttaccggtccgatgcaatttttaggattctttgaggtttggtgggtgcatttgccgtctattctctttatctttttaatggtctttatcattaccaagatccaaaaaccggagaaagagatcaacggcaaggattatttccgccagaaatacgctgaatgcggcaaaatgtcggtcagagaaattaaatctgcaattattttgattttctatttgacttttattattttccatgaccaattatttgcaaattggaatatgagctggggtttggcgtttatcccgatgcttttcgcggtccctgggatcggtgctgcaacggcagaggatttgaaaggcattaactacggctttacgatctttattaccgcttgcatggcgatcggctcggttgcgacttcgttaggtatcggcaatattatcgccgatgttatggggccgatgctcgagggcaaaggcgcaacgggtttcttcatgattacttgggttatgttagttgcgttaaactttgtcatgacgcctttggcgatgcaggctgcatttaccctgcctttgaccaatttggcgatgactttgggaatcaatccgatggcgttgttctacttcatgtggcatgcgtgcgaccaggttattttcccgtatgagtatgcgatgtacatgatcttctttgctttcggcgctatccgtatgaaggatttcatgaaagtaagcgcgatcaaaatgggtttagactttgtcgtagtttttgcgattttgattccgtggtggaagatgatcggtttcttgtatgtgtaa

SEQ ID NO: 1962 - DNA, 1722 bp, Unknown
  Unknown gut bacteria
atgcttttgcgcaaagtaatcggcgagcacagcgacgaactgccgcattttcgtttggcgcttaaacaattcggctatctgaaaacaatcagcgatactttggacgagttaaaccgcagtgcaagcgacgcgtcaattatcgccgcaagtctcgctaaagagcatccggcgcgattgcttacagccaaagctgcggaaattgcgcttattcaaactgtttataatcaaagtctgcttcaagcggcacggctggacaaaagcaatcttttaagcgaattaacggagtttttacagcaaaatactattttagctgacgatattatcatcgtagacggctttgaatatttcactaaacagcagctactgctgttagaggaaattattaagcaagccaaagaaacgtatatcagcatttgctgtgagggaaaaaaagacaatgcgttatttcaaaagcagctgcgcaatttaaaaacactgcaagaaatctgcgccgcggtatcctccgagtgtaaaatcgtacagacggattatcagggatactatcaagcggaggcgttaaaatttttagcgcaaaactatactcaaggagcatatgctgttttttcaggtgctgatcttccgcttgaaatcatcgagtgccaaaatcccaaaacagaaaccgagctggttgcggttattattcgttacttgttgcgtgaaaaaaatctgcgctataaagatattgccgtcatggcagctgatttggagatttatcaaaaatatctggcgaaaagcttcgcactttatgatatcccgtattttttggatgaaaacagtcgtattttttcacatccgctgttggaacttttggacgcagtatttgcgattaacgacagtaactggagctatcagagcgtgttcggctatctgcgcagctcactggtttgcttggaagcggaagaaatcgacatgctggataattattgcctgagcgccgggattcatggggcgaaaaactggctttcgcccaaaccatggctgtggcagggaaaacgcagtgattgggagaaagaggttttgtgggacgaagaagccctttttcatctaaacgacattcgcaagcgtgcggctgcgcctatcgccgcgcttttaaaaaatttaagacgtaagcaaaacgttcgcgcgagcctgtctgtaatcgtcgagtttttagtgagcttgcaagtaccccagcagttggaaaagtggcaaaatgaagctttggcaaataacgatttcaccttagcccagattcacgggcagatctgggagacgacgtgctccatatttgatcaattagcagaaatctgcggcgaggaaataatggatatcagcgagctggggcagcttttaagcgccgctttaaaaaatattaccttaggcaaaattccgctggggttagatcaaatttttgtcggcacgccgaagcgttctcgtttggataatgtgaaagccgttattttattaggagcaaacgaggacctgatcccaggcaaggtaaacggtaccagcgtttttaccttagcggaattaaacatcctcaagcgctggggcttggctgatactttggaaaaaatatatgatgaggagttcagtatctacaaaactctgaccgcggccgagggatatttatatctgaccgtttctttagcggatattaagggcaaagcccagcgtcgctccgcagtaataaacaaaatggaa

SEQ ID NO: 1963 - DNA, 1992 bp, Unknown
  Unknown gut bacteria
atgaactcttgtgcctacgaagaaaagatgaagcgtgttgaaatctatcagagctggcttcaagaaaagcaaggcatggatattaccgcctgtcaaaagagagttaagcttttgagacgtttgtgcgcattgcaggatgaatgcggcgcaaaagataactttttaagtaatgatcatgatttgggcgaatgtcaaaagatgatttttttgtggagcagctgcaaggaaatgaagcagtcctttggtgaggaaagcacgcaagtccaagagatgctcaaagaatatgcaaaatttgccgaggatttggcgaaaggctggcaagggaaaagcaaaaaacaagcttgcgcgaatgtgatgttagaaagtgaaacattggcatatttacgggaaaaattagcaaaagaatttccgctggtttattatataggcgatatttcgattaatgatgcggaatatgatttgttgttagaatataccaaagatactttaaaaaatttagcgaaaagcaaggaaaaatatcgcaacgatcttttaatcgtgacatttatggtgaaaacggcgcagaaatattataaaggtaagttttggggcgcgttttttgagcaggtaaaattaaaggctgatcaggaatacaaaaatttcttggaaaaaacgcttattttcactttgcagaaaaataataaatatatcgtcggcaaaaatgagcggttgaatacgattttcttccatgcgtttatttgcgattattacgctaatgcgtggtttgaactgctgctggattattacgccgaggatttaaacgaaaatttagctaatcataacgccgagagatatcattgctttttgatgggacttagccaaaaatgcgccgagaatgtcgattatctcacgaaaagtgaggcagaggataaatatatcctgcgcgaggcggcgattacggcgatgtgtgccaatgagcgagcaagctttatcaaagcaaagcaggcgcttatcctgatcgatgaagcgcttaaaacgaaaagtctttccaattgtactgctgaacgcatcaaatgtctctttaaaatttgggcggaggattcggggcggtttagcgcgatgtttctatgtccgacgaaagaggcctacgataatgttttactgaaagtaaatagtgaggaacacagcttttatctggatttaggtgcttacagcatcttaggacacaagggcgcagctctcacttggcagatcaaaactatcaaacgcaaagaaacgcttgaaatcgcctcaagcgagacttattccggaattaaaagcgaaggtgcgcagtttttgctcaattcagatgagttatttgggcgtatccgcgccgagctttacgcaggcgaggaaaaattaggggaggttttgtttaagggcgaaaagcttcgcacctttacgcctgagggcgtttacagcgctaaactcattttgggcaaaatgtatgcttacgccaataaagaaatcagcgtccaatcctttgcgattaccaaaagaagtgatataggtaaattggcgcgctatgatttggactgcgccgcgggcgaaatagtcgtgattgataattacgaaatgcgttccttagccgctaatttgaccgagggattgaacgagcgcggtaaaatagcaaatctgactgcctttgacgaaaaccgccgtgcgcttcctgtttatgggagtctgcctgtgctggcgatcaccgtgcaggtcaataaaatcaatgcttcttcgattattattaattcgagccgctacaatctgcgctcttgccgaatcatggagtttgaaaagccggactccaagggcgtaaaaatcgtgctggttgacttgcgcgagatgccatcctttaaagacggcagagtcaatcgcgtcagtgtggatattatcaacagcagtagcttaaaaagctacagtttcgtttattgtcaaaatttagacgtttcctatcctgacggggcgccgcttagcgcg

SEQ ID NO: 1964 - DNA, 1002 bp, Unknown
  Unknown gut bacteria
cgggagaaattagttacgctttataaagagttggagctgaataatttattaaaagccttgcaagcggaggaaagccagcagaaaaaagagataagcggcgaatatttgtttgacagcaaggcattggcagatattttagagaaaacggaaattaataaattaggtattgcgcttaccgaaaatagtaaggagcggacggccaaaatcgggttatatctaaacggcaaggcgtatgctatggatatagcggctttggatgaagttatggagcttttaagcggctatttggaggatgaagcgacagcgattttctgcgatgacgcgaaaaaactttataacgtatgctataaatacgggatcgaggttaataatctgctttacgacagcgagctggcgggctatttattagagccggaaaaggagcatacggcgcttaagcaggcagaggattatctaaatatcgaaatagcggagaatgacgagggctatatttttgcgctgatggaggcattggcgcttttaagcgagatagtgccgcaaaaactagccgagcaggagttagataagctttattatgaattagagctgccgttagccaaagtattagtaaggatggagcataacggagtcaaaatcaaccgcgaatatttaaacaatttaaacgccgaattaaccgagcgcattgcgcaaattacggataaaatttatacggaagcaggagaggagtttaatctgaactcaccgaaacagctcggagtgattttgtttgaaaaattggggatgccggtgattaaaaagacgaaaaccggctattccacttcggcggaggtgctggagcagttaaaagattacgcgatcgttgaaaatattttggcgtatcgccaactggctaagctgaaatcgacctatgtcgagggcttgcttaatctggcagatgaaaacgacgcgattcatacttcgtttaaccagacgatcaccgcgacgggcagactatccagcacc

SEQ ID NO: 1965 - DNA, 1905 bp, Unknown
  Unknown gut bacteria
atgaaaaaatggcggaaatggctggcaggaacggtgcttttggcttttagcgcagggcttttggggtgtgcggcggagcctacagctaatgcggcgaataagcgtttggatttagcgagctttacaagttatgatgaactatatgattatttggataaaaattttgctaaaagagattttcaggtgtttgcgactaatggggcggcaaacgatacgctgaaaagcacgcctatggaaaacgcggcggatagtgctgtgaatgaaagcgattattccaagactaacgtgcagacagtgggtattgacgagggtgatgtcgtaaaaaccgacggcaagtatatttatgttttgaaggatgacgaaatagtcatcgttgcggcttgcggtgccaaaagcgaggaagcagcgcgagtgcaagtcgcacaggaaaaagaaaatatttgggagtatgtgcaggagttttatgtaacggatgataaattagtcgtaatcaaggtggagagtgaatatcgtaataatttggacagcgacacatttggctatgcaaagtgccgtctgccggaggaggtgcggacgattgccgcgatttacgatgtgagcgatataaataatattacgcttgtatcagaggtggggcaggacggcagttttgtctcatcccgtgaaaaggacggcacgctttatttgttgaccaattattataattatcgcacgcgtgacaaaaacgacgtgataagctttgcaccgcggatttatcaagacggcgcggaaaatgtgatagcgatcaaagatattgctgctttaaaagaagcggaaagcgacggctatacgattgtgagcgcgattgatttaaaaaacggcgcggtaagcgcgaatgaagcgattttgggcggctactgcacgacgtatatgagcgcggataatctgtatttggcgtatgaggtgtacgaggtgtacgagcagactgaggagaagcaagtaagcgaaacagaaaaagtgcaggaatatactgattcgtcagtgactaaaatcgtgcggatcggcttaaaaagtatggatgccgaggcggcaggggaggtagatggctatctcctcaaccaatttgcgctggacgaatacgataatcatttgcgcgtggtgacgacggtagatatttaccgctatcggacgagtgagaatgctaaaggctacagcagctatgagacattagaggacagttcgagcaattttttgtatgtgctggatgaggatttgcaggttgtaggtgggatccgcgatctggcgcaagatgaaagggtttattctgtacgctttgacggggcggtaggatatgtcgtgacttttaagcaggtggacccgttattcagcgtagatttaagcgatccttcagcacccaaagttatgggcgaattaaaaatccccggattttcagattatctgcatgtttacggcgagggcagattgtttgggttagggatgagcgccgatgaaaacacgggagaaacgggttcgttaaaactcagtatgtttgatgtgagcgatccgtataatgtcacggaaaagcacaagcttttcttgaaggatacttactcggcggcgctgtataatcacaaagcgattttagccgcaccggaaaaagacctcatcgcttttccggtggaaagaggctacgaggtctataattacagtgacagcaacggctttgtaaagaaagccgatattgatttggattcttggagcggggactgccgcggagtatatatcgacggatatttctatgttttgagcagtgataaattttacgtattggatatggatagttttaaggcggtggaggagtggacatttgctccgagcgaaaatgacggcaaaatgcacatcatgaataaagtaatagttgattaa

SEQ ID NO: 1966 - DNA, 1614 bp, Unknown
  Unknown gut bacteria
tatgaattgctcgagtttactgtggagcagaaagatatttcctctgtggcgatcatatacggcgagcaaaacatttatgacggcaatattcacgaggcagctgtttctgtaagtgacggcgacgtgcttttgcaggaaaacactgactatactttaagcgataataccgcggcagaagtaacgaaaaagtatgtaaaaataagcggtatcggcaattataaagggactgctgcggcctccgaggcgtggagcttgcagcagcgtgaggtaacactggagtggcagaatatagcggagcgcaaatataacgacggcaaaatcgttacggcgatagtggctaacaaagtaggcacggacgatgttaacgttaccgtgacaggtggcgctgaaacttctgtagacacgcatacagctgtggcagcggctttgagcggtgcaaaaagcggaaactataaactgccgccgaatccgactatagagtatacgattgccaaggccgatatcgtaaataccgcacctaccgcaaaaagaggcttagtttacaatactgaggcgcaggatttaattaacgcaggcactgtcgtcgagacagagggctttatttggcagtataaaataggcgaaaacggtacttacagtgcagcattgcccaaagcaatcaatgcaggcacttatcaagtatatgccaaaattgacggaaacgataactataacagcgttgctgaaactttgattggtaatgttgaaattgccaaagcaaatcctgagtacatcgtaccgactgatttgaaaggctaccaaggcagagcattatccactgtcaacctgcctggtggctggagctggaaagacggcagtgaaaggatgagcaaaacgggcaatcaaacctttaaagctacctttaagcctaatgataccgataattataatattatcgagaatattgatgttaccgtaaacgtccgctcgactgcgcttcccggcggtgcagctcaaaccgagtttggcattaccgcaccgaaagccgataacggctcgatcggcattagccaaaaagaggcttcagcaggtacgaccattatcgtatcgctcactcccgctgagggctacaaagcaggtagcttaaccgtgactgataagaacggcaacaaattaaccctcaaatccgctggtgaaaataaatacaccttcaccatgccgaacagcgcagttgatatcaaggctaactttgtcaaagccgacggcagctcaactgttgatccgaagactgcgattatcatgcagatcggcaacaagagcgtgaacgcttacggcaaaactatcgcaagcgatgtcgctccgttaatcattaatagccgcaccatggtgccgatccgcattgtcaccgaaaccttgggcggcagcgctgattggaacggcaaagcgcaagtagttaccttaaacatcaacggcaagacgattacgatgaagataggtgtagtattggagaaatacggcgtagcgccgcttatcatcgacaatcgtacttatgtgccgattcgctttgtagcggaggagttaggcgctgcggtggattggaacgctgatacgcaggagattgttatacgcaagtaa

SEQ ID NO: 1967 - DNA, 1572 bp, Unknown
  Unknown gut bacteria
gtggcttccttgaaaatactttttttaaacgatccgccgcaggcggtccgcgaggagttttacacgcaaaattggcaaatcgacattttaaaaaatatcgacgatctgcctgaaataattgccgattatgacgctttggtgatcaaagaagaaaccaatttggacagcgaacttttagcaaaagcgcgcaatctcaaagtcatcggcattttaaacaacgatattttaaatttcgataccttagcggctacctctttaggtattactatcgttaatatttctaaaagcgtcgcttcctcggttgcggaatacactatcgggcaaatgctttatctcgccagattgcgccgcaaaaaggactcgtgggaattggcgggcaaaaatttgggtattataggctttaaccgtgtaggtgccgctttggcgaaaaaagcgctggcgctggatatgcacgtcatggtgtacgatccgactttaagcaccgccaaaatcaaggcgcacaaaatcgaaagcgtttctttgattgacattttaatttccgcggattttttgagcataaacatttccttaaacgagacggcttttgcgcccttaagcgctgagcagctgtctttatgtaaggaaaactgtgttttaatcaataattccacgccggaaatcatctccaaagacgctttagaggcttttttaaacgcttcaaaaatgcatttctgcgcctttgactgcaataaaagcgcctatgaatattacagcgatttcaaaaataaccaagttatcattaccgaaaataaagctaccgaaactatcgagtccatcagacgaggcgcagcagaactatccgcggaaatgctatccgtcatccaaaccggcatgagcgaaaacgcgatcaatatcccgacgattgcctccgataaaatgccgctatatgcgccgtttttaaaaatgtcggcagcgctcggctattttttggggcagtttctgcacggtgaattaaaagaaatagttttatatgactacgagcagagtttaaacgacgacgcgccgcttttacagcatttgctcaaatatttattgcaagcgatgggctatgaaaatgtcaactacgtcaattctttggctcaagccggcaagctcaaaatcgaagtctatacgaacaccgattttaaaggcaaaggcttaggcttaaaagtcaaactcaaagacaaccgcgagcactatctgcacttgattttaagcgaaaataccattaaaatcaacaatctggatcgccaccagctcaatttcgaattaaaagagcacatgattttgctctaccatgcggataagcccggcgtagtcggtttagtcggcagtatgctcggtgcctgcagcatcaacatcatcgatatgaatttggataattcgctttcgcccaaagaaagcgcgctgatgcttattactttagactccaaagtagatgacgattttctcaaagttttgagcaaatacgacaatatttacgaagtatattatatcaatcttccctcctctgtttatacggattttacttatgagcagaaaagtttgatatga

SEQ ID NO: 1968 - DNA, 1188 bp, Unknown
  Unknown gut bacteria
atggttgttgtaatcatgctgatgtttggtatggtgtctttgagtatgatgtcggtagatttgttgcctgatatggatttaccgatcatgctggtgtatacgacatatgacggcgcgggcgccgaggaggtcgagaccaaggttactaaggtaattgagcagcagtgtgcctcggtttcagggattgactctatatcatcgcagagtgcctcaggggtgtcgatagttattttgcagtttaattacggcactgatttgaatgaggcgaccaactcggtgcgcgatgctttgagcatggcgggaatgctgatgcccgatggggtcggcgacagcaatattatgaaaatgagcatggactcgatgccgattatgtatatcggtatcgcttcggatacggggcgtgatatcgatgaaatccgcaaaattgtcgatgatacgattgcaccaagaatcgagcgtatcgatggcgtcgctgcggcgacggtcgtgggcggtaatacgcaggaagtgcatattactttagatcctgacagattggcgaattacggtttgagcgtaggctctatcagccagattattcaaatggaaaataacacggcagccggcggctatgtagcgcagggctcgcgcgatatcttagtcagaatcgacggagaatacggctctttggcagaaatcggcaagacaccgataactctttcgaccggcggcgtgattcatttgtccgacatagcggagatctcctttgccgagagcgatacgaccagctatgttcatgtcgacggtcaagatgtcgtagctatcgccgtgcagaaagaaagcgacggcaatacggtaagtatcgataaagacgtgcataaagcattggcagaattagaggggcagatttacgacgaccttgtacttactgtgccttatagcggtgcggagatgatccagcagtcgatcgataatgtcaagagcaatttgtttttggcggcgggcatttcgacgtttattatctttatgtttttaggcaatatccgcagtatgctgattatcggtttagcgattccgttatcgttaatcacgacgtttaatctgctttatttcggcggatacacgcttaatatgattactttgggagcgctggcgctgtcggtaggtatgattgtcgacaactcgacggttgtcttggagaatatctac

SEQ ID NO: 1969 - DNA, 1146 bp, Unknown
  Unknown gut bacteria
atgtttaaagtaatgttggttgatgattacgaaatgaatctggaaattttggaggcttatttaagacgcagtgagcttccgttagaaatttatacggcaatggatgggcagggagcgatgcgtattttgcatgagcgcagtatagatattgcgcttttggacgtgatgctgcctgatataagcggaatagagctgtgccgtgtgataaagagtatggatccgaatattcctgtggttttggtgacggcgctcaaagaaaggcaaagtttgcatgacggattaaaggctgaggcagacgagtatctaactaagcctgttgattcgggggaattggtgctgagggtgaaaaacctgctgacgattcgccgtctgcatttggagcaaaaagagcgctatcagaaattgcaggaggaaatgtgcatggcgcagaaactgcagcggagttttttgccgaaaagtgtgcccaattatcaaaatttagaggtggagtgcctttataagccctgcggctatatcggcggtgatttttatgattatctgccgacggaaaagggattaggcgtttttatcgctgacgtaaaaggtaaaggtgtcgcatcggcgatgattacggcggctttaaaggataaccttttgcgagcgcgtgaggtctgggataggcctgcggttttgttaaaaacgcttaatcaggcgttatatgatttctttcaaaatgggatggatgattattttgtgacggcgttttacgggatagtcaatgcagcgaaagaaacgattgtttacagcagtgcggggcattgcccgccgttactttttagcgccgagccaaaggagctggacacggagagcggttttccgttgggaatgttcggattgggcgaatatgaggaaataagcgccgaattcggtgcaggaagtaggttattttgctatactgacgggatttttacattaaaattgtttgataaggcgcgggacgatttaatcagcgtgcgtgaacttttgactgaggtttccccagacggtgtgaaaacagagcagctggaaacgcttaaaatggaaattaacgaaaatgcgagcacggatttggcagacgatataaattatgtaatattgacgaataaaggaggcagaaaaaatggctga

SEQ ID NO: 1970 - DNA, 996 bp, Unknown
  Unknown gut bacteria
gtgaataaattgccttacactacccaggtattggaacacaataaacgtttttcggcagaaaaaggctatgctccgaaatatattatccagacttacggctgtcagatgaatgagcacgactccgaaacattatcgggaatgctcgaggccatgggttataaaaaaaccaatgcggaaaatgacgctgatttgatattgcttaatacctgctgtatccgcgaaaaagccgagagcaaggttttgagtcatttaggcgagctgaaaaagctcaaaaaagagaaaccgtggctcatagtcggcgtctgcggttgtatgacccagcaaaaggggatcgtcgagacaataaaaagcgcggcgccccatgtgcagttaattttcggcacctataatatgagccatttgcccgagtatctggctgatattttatccggcgaaaccaactgctacaatatttacgccaaagaagaagcgatcgtcgagggactgccgagtaaacgcgaatatccatttaaagcgcttgtcaatattatctacggctgcaacaatttctgtacttactgtatcgtgccgtatgtgcgcgggcgcgagcgcagtcgcagtatcgcaaatattgccgcggaaatccgcgatttggcggctgatggggtgacagaggtcgttttattagggcagaatgttaactcctacggcaaggatttaaaagacggtactaactttgccaagcttatcgctgaaatcgagaaaatcgatgagatcaaacgcgtgcgctatatgacctcgcatccgaaagatttttctgacgagttgatcgagattttaaaagactcgaaaaaagtgccgcattatctgcatttaccggtacaatccggcagcagccgcattttaaaaaagatgaaccgcggatacactaaagaggaatatctgacgttaatcaaaaaaattaaagcagcaattcccgatatggcgattacgaccgatattatcgtcggctttccc

SEQ ID NO: 1971 - DNA, 699 bp, Unknown
  Unknown gut bacteria
atggtcgatatcattgtgctgataatttttctcgttcttgccgctttaggctggcagaaaggattcgtcagcagtttgatcggttttttcggcaatatcgccgctttaattttagcatggtttttaaaaggctctgtcgccgctatcctcgatacgcagttcaatcttacctcgaaatggggcgaaactttgagccgtattatccccatgccggaggatctcgccggcaaaatggctaatttcgatgccttaggctccttttacacatggcttgaatccacaccgctacccgaaagcgtgcgcacccagctcatagccagtatgcaggataatattaacgctatggcgcaggcgcagtttgccacgctcctcgatactttctcccaagtagtcgcaaactatcttttgatcggacttactttcttaggactatggctcattttgagcatcgtaattaccttaatcagcaaattcatggtgacattcgtccatcatacgccgctcataggcacgatcgaccgcgcaggcggcgtcgtgatcaatctcgctttggcggctatcgttttagccgttttatacggagcattggaagtcgcggtcgaagttacggctttaggcaagcaaggctggtttgaagctttcagctcctccaaaatcctgccctttctgcacgatctgatcctatctgccaaaatatga

SEQ ID NO: 1972 - DNA, 1080 bp, Unknown
  Unknown gut bacteria
atgcaaatttctgatattgtagcatttgtctgcataaatgtatacaagtatccgaaaaagaaaacgcaaacttatttaaaaggagagatttttgtgaagaaaaaatcatttgctttgttggcagtattgctcatcatgtccttgatgctggctgcttgcggcggtggcggtactgctactaacggagacaccgaattaaccggtgattatattttcgcttccggcggtacctccggtacctattatccgtactgcggcgctgtagcccaggcttggatggatcagtttaacggcttaaccattactgttcaagctaccggcgcatctgcggaaaacttgaacttaatcaacaaaggcgaggctgacatcgctatcgtccaaaacgacaccatgacctatgcttacgaaggtactgaaggcttctctaatgcagatcctatcaaaaacttctctgttatggctaccgtttatccggaagtagttcagatcatcgctcgtgctgacagcggcatcacctctgtagctgacttagcaggcaaaaccgtttccgtcggcgacttaggcagcggcgttgaagcaaacgctaaacaaatcttaggcgctgtaggcttaacctttgatgatttgaaagctcagcatttaggcttcggtgcttccgctgacgcgatgaaagacggcaaatgcgacgctgcatttatccctgccggtattcctaccactgctgtcatggagtacgctaacaccaacgacatggttttagttccgatcgatcaggaaaccatcgacaaattaaccgagcagtatgcatactacaccgagtataccattcctgccgacacttacaaaaatgctgaagatgtaaacactgttgccgttaaagctactttagttgtaagaagcgatatggatgacgataccgtttataccttaaccaaagctttattcgacaatcaggaagttatcgcttccgctcacgccaaaggcgctgagttaaacctcgaaaccgctgttgaaggtgtttccactcctttacatcccggtgctgagaaatactacaaagaagtaggcattttgaaataa

SEQ ID NO: 1973 - DNA, 780 bp, Unknown
  Unknown gut bacteria
atgagcaagaagtatgtttacttattcaaagagggcaacaaagacatgcgcagcctgttgggcggtaaaggcgctaacttggccgagatgaccaatatcgggttgccggtaccgcagggcttgaccattactactgaggcctgcaacaaatatttcgctgacggcaataaattatccgacgaagtgctggagcaagtttgggaaaaattcgccatcgttgaagagcagatcggcaaaaaattcggtgatcccgccaatccgttaatggtttccgttcgttccggtgcagctatttccatgcccggtatgatggatactattttgaacttgggtatgaatgatgttactgtccaagcagtagcgaaattaaccaataatccgcgctttgcttacgactgctaccgtcgtttcattcagatgttcagcgatgttgttatggagatcgaacattataaatttgacaatattttagagaaatataaagaaaaagagggcgtccaacacgaccatcaggtcagcgccgaggctttgaaagatgtcatcgaggattacaaaaagttagttaaacgtgaaaaaggtgtagatttcccgcaggatcctaaagatcagttgttaatggctatcgaggctgttttccgctcttggggtaatccgcgtgcgattgtataccgtcagttgaacaaaattcccgacgatttaggcactgctgtcaatgtccagtctatggtttacggtaatatgggcaatacttccggtacaggagttgctttcacccgtaac

SEQ ID NO: 1974 - DNA, 1026 bp, Unknown
  Unknown gut bacteria
atggctaattcacctactgacaaaacaccgcgccgtgccctgatcgtatcgctaatcgtcatcggtttgatcttaatgacgttttggtatatgctcaatatcgtccttctgacgtttcttttcacctttattttttaccagcttttaaatctaatcgaacacaacagtcaaaaatacctgcattttcacctgccttataagctcaatatttttatcgtttatgcgcttttcatcttacttttggtctacagcgtctaccgcctctcgccggtcgtcgcccgccagctgtcggatttaatttacgcgttcaatcatttcgatttgaccaatatcgccatggaaatgacgcccgattatgccaatgtttttattgagcgtctgcatttaaacgattatctcagtaaaatcgggcagcttttggcttcctgtgctactactttgaccagtttaagcttggatgtctttttggcgcttttattgagcctgcttattttactggaaaaggatcaactgcgagctttcggccgtgctttagaaaagagccgtatcgctaatatttatagttatatgctgggctttgccgcaagtttcgccaaaacatttgccgatgtgatgaaagttcaggtcttaatcgccaccattaactgcgttatttcgaccttgcttttaaaaattatggggttcggctcggtcatcggtcttggaattatgatttttcttttaggcttaattcctgtggccggcgttttcatctcgcttgtgccgcttacgatcattgcctacaatttaggcgggatatccaaagttttgggcgtctggctgatgattttgattattcacaccgtggaaagctatgtcctcaatcctaagctcatgagcaaccgcaccaaactccccgtctgcatcgtgttcatcattttattgatcggacaccgctatttaggcgtctggggattattgatcggcgtgccactctttatctttttgctcgaggtcttgcatgtcgattaccaaaaccgcaattag

SEQ ID NO: 1975 - DNA, 1170 bp, Unknown
  Unknown gut bacteria
atggcaggcaacaaaaaggctaaactttggacgagagaatatatcatttcattaggcatcgttttcggggttaatctgacgatggagatgttgcattcgactttggcgatttacggcaaaggtctgacgcactcggatgtctatgcagggatgctggtcactgcctttacggtcgcggcactggtgagccgcggctttatgggtgaaatgtttaagcatctgtcgatcaaagccgtgcttttgatcgggacggtgctgtcggtcgcggcgtcattcggctatttaatctttcaggaacctatgctttttattgcttgccgcgtcttgcacggcgtgggatttggggtcgcttcgaccgcggcggcgacggcgatcagcgtctctctgccgaaatcgagaatgctcgagggtataggctactctggtatggtgagtaccgtatcgatggcgataggcccgagtatcagtctatcaatcagccacagcgattatctgctgtttgaccgtgtgttttggctgacggcagttttgatggtgatttccctcattgcggcaatactggtgaaattaactcctccgtcagaagaggaggaaagcgctgacaatgcgctttccgagggcaaacttttgtgcccgaccgttatcgtcaattctatcatgcagtttgtgatcgcctttgcacagacggcggtgaccgcctttttgggactgtatgtcttggaaaaaggcttgggcggcgcagggatgtttttcgcaatttatgcgatagcctcctttttaatcagaattgtcatgccgcatctggtcgatatgtttggcgaaaaggcagtcatgctgggctcgatgcttacggcgacagtgtgctttgtggcaattccttttgcggcaaatatatggattgtttatctgatcgccattccctacggctgtgcctgcgggatgatcagccccatatttaacgtgcggattttgggtgtagtgccgcttaaaaagcacggcgccgctaatgctgtttggtatgcggcgatcgatgcaggtatcggcgtgggcgcgtttgtctggagtgcgatagctacggtaacgggctatgatatggtgtatattatcgcggcgatactttgtgcggcgtgctttattgcggcgtttttcgtcaaaagtgaagcgaaataa

SEQ ID NO: 1976 - DNA, 1266 bp, Unknown
  Unknown gut bacteria
aaaagccgcgtgaaaccggaaaccgagggcagtgagaagcctgagtatgaggattacagcgagtgggaaaccttaaacagcatggtgcctctttggaaaaagccgaaaaacgaggtcaccgatgaggattaccaccgtttctatcatgaaaaattccatgattacaatgatccgttaaaagtcatccgcacctcgaccgagggtgctgcgacctacactgctttattattcatcccgtcaaaaccggaatacgattattacaccaaagactacgaaaaaggcttgcagctttattctaacggcgtcttaatcatggataaatgcgctgatcttttgcctgatcatttcagtttcgtgaaaggtgtcgtcgattcgcaggatttgtcgctaaatatttcccgtgaaatgctccagcacgaccgtcagctgaaaatcatcgccggcaatttggagaaaaaaatcaaatccgaattagccttaatgatgaaaaacgaccgtgaaaattacgaaaaattctacgacgcattcggtttacagctcaaatacggcatttataactcctacggcatgaagaaagatttattaagcgatttactgttgttctactcctctaccgaaaagaaaatggtgtccttggcagagtatgtcgagcgcatgggcgaggagcaaaaagatatctactacatcgtcggctcctcaatcgagcaaatcgaccgcctgccgcagatggagttactgaaagacaaaaaatacgaagtgctctatctgttgaatgccgttgacgagttcgtcctcaaagtaatgcaaaattacaatgagaaaaacttcaaatccgtcaccgacggcgatttggatttggagagcgtcgaggaaaaagaagctatccaaaagaaaatcgatgataacaaagaaatgcttgatttcttaggcgaggctttaaaagaccgcgtcagcaaagtcgtcatttccaaccgcttgaaaactcatcctgtctgcctctcagcggagggtaatatttccttagaaatggagaaattgttaaactccatgcctaacgaagaaggccgtcaaatcaaagctcatcaggttttggagattaacggcgaccatccgattttcgaaactttgtgcaaggcttacaaagaagatcaggagaaagccaaagactacatcaatatcctttacgtccaggctttgctaatcgagggctttgctgttgaggatccgatcacttattgcaacgctgtctgcgaattgatgaaataa

SEQ ID NO: 1977 - DNA, 1233 bp, Unknown
  Unknown gut bacteria
cgtatcgtcatcgaactcaaacgcgatgccaatccgcagatcgtcctcaatcatctgtataaaaatacgcagatgcaggataatttcggcgtgattaatttggcactcgttaacggtatgccgcagattttgacattgaagcagatgctcacacactatatcaagcatcaggaagaggtcatcgtcagacgtaccagatttgatttgcataaagctgaagagcgcgagcatatcgttgagggcttgaaaatcgccgttgacaatattgatttggtcgtgcagatcgtccgctctacccgtaccgatgaggagtccaagcagaaattgcatgatgcgctgggacttactgataagcaggcgcaggcggtcatcgacatgcagctcaaacgcttaaacggtttggctgtcgaaaaattggtcgatgagttggaagaattgaaaaggaaaatcgcttattataagcaggttttgagtgacgagggtatggttttaagcattatcaaagacgaaatcggcgtcattcgccagaaatacgccgatgagcgccgcacggaaatcaccgccgatgagaacgatttagaggtcgaggatttgattgccgatgaggacgtcgtcattacgataagccacaccggttatatcaagcgtgtgccgatggatacctataagagccagaagcgcggcggcaaaggcatcaccggtatgacgactaaagaagaagatttcgtcgagcagctcttcatcacctcgacgcataattatctcatgttctttactaataacggtaaatgctaccgcgtcaaggtttacgatattcctgaaaccagccgcacctccaaaggtaccgctgtggttaatctcattaatatcggtaacgatgaaaaaattaccgcagttatttcggtgaaaaattttgccgaagaaaaatatcttttggcagtgacgcgtcacggctatgtcaagaaaactattttaaatgaatatgattcatcccgtaaagacggcctaatcgctatcaatctggaggaaggcgacgaattggtcaaagtagctttgaccgatggcaagcaggagttacttttggtgacagcgtacggtatggcgattcgcttcagcgaagaggaagtgcgtccgatcggccgtaccggtcagggcgtccacggcatcaagctcgaaaaaggcgattacgtccaagccatggatatcgttcgcgccgacagtcaggttttggtt

SEQ ID NO: 1978 - DNA, 1014 bp, Unknown
  Unknown gut bacteria
ttctttggcttttgcggctgtgcgagcgatgtggatcgctatcaggggatggagtttgatgtgatttttttggatgaggctacgcagtttgcggaggagatatttgacgcgctcaaggtctgcgtgcgcggggtgaatgattttccgaagcgtttttatttgacgtgtaatcccggcggagtgggacacggctgggtgaagcggctttttgtggatagaaattatcgtgcgggcgagcaagcggaggattatttatttatcaaagcgacggtgtatgataatgaggcgctgatgagccaggatcctgagtatgtgaagcagctggaagctctgccgccgcaacggagaagggcgtggctggacggtgactgggaggtgttcagcgggcagtttttcggggagtttgactggaaggtgcatgtagtcaaggatatggttgtaggtaaggattggacgaagatcagggtgtttgactatgggctggatcgtttggcgtgtctgtggatagcggttgacggcgatgggcgggcgtatgtgtatgatgagttgtgcgagagtaatttgatagtgtcggaggcggcgcgcaagatactggcgcataatgcggacgaggtgttttgcacgctggcgcctgctgatttgtggggacgcagtcaggagtccggacggagtcgggcagagatatttgcctcgtgcgggttaaatttgacgatggtgcgcagtgagcgcattggcgggtggtttaatgtgcgcgagtggcttaaagtagagcgtgacagtaatgatcgggcggtaagtcgtttaaagataagcgccaaatgtgaggaattgatccgctgtctgcctgcggtgcagtttgcaaaaggcggcgtggaggatgtggcgaatgagccgcatgaattgactcatgtggtggacgcgctaaggtatttttgcgtgtggcggcctgtggcagcggattttggctgtcttttggggcagaagcctgtgattattgacgacgaggatgaggat

SEQ ID NO: 1979 - DNA, 1371 bp, Unknown
  Unknown gut bacteria
atgtattcggagtgtgagaaaatggggaaaaacagtaagttgctcactattgttttagtgcttagtattttaggcaatatagtgctggggtatgggctttaccgcgagagcaaggatcatcaagcagtcaaaatagcggtagagaataattatcagcgcgactttttaaaattaaacgataatgtggagcaaatcaagctgcaattagcccaaagtttggtgagcgccagcgatgagcagttgcttttaggggtgagcaatttatggcgggcggtgtacggcgcgcttaacagcttgaatgctttgcctttaaatgccgaggaattagcggaaacggggagttttttgcgggatacggcagagtacagctattatctgcttcgccagataattatttcgtccgagggtatgagcgacgggcagtgggataaattagaggagttttataagcgcgcacaggcggtgcaaagcgaattggataaaatccaagcgcaggcattaaaggaaaattggcgtttcagcgagattgatttggctgaggataacacgatcgcggcggcttttcgcgggatagaggaaaaggtcgcggcatttcctttgctggaattagaggagggtgtgcgcaagatagaacccgagctgcagccgatagagggcgtgcaaattagcgcggaggaggctttagaaacggcagcggagttcggcaatgcattttttgacggagattatgaagctaagctggaatatacggctgatagcagtgagatttcgacctatggtgcgcggctagagggaaaaaatacggagcctatttatattgaaattagtcaaaagggcgggcatattttgcagatgtaccgttatcagactcaaggcagagaaagactaagcacagccgaggcagaggatgccgccgaaagctttttagagaaaatgggctttcgcaatttagcgaaagtggacgctttaaagtatgacgatagtctggatttgacgtatgtgccgtgccaagacggggtttatttgtacgctgatatgctcaaagtaatggtttctttggaaaacggtgaaattttgagttttgaccaaagcagctatattacccatcattacgagcgggaaattaagccgcctaagctttctaaagaggaggtcgtgcgcaagatgaatcctcattttcagatttctgagctgaggctggctttgattggggatgattatacccgaggagaatttttaacctatgaggtgcgcggagtgataaacgatgaagaatttgccgtttttgtcgatgcggataccgctcgcgagcggcggatagtgaaattggagcaaaatgcggaatatgagtttcctgtggaggaaagataa

SEQ ID NO: 1980 - DNA, 1347 bp, Unknown
  Unknown gut bacteria
atgctgatgaaaaaactgataagtattgtcttggcttgttttttggcattaaatatcctcccgcagcctgtttgggcggaaaatccgaaagttatggttttggaggtcaaagacgaaattaacgatggcttgcttgagtatctggcgcgtaattttgccgaggctgaaaaaatgggcgtaagcacgataattttggatatggatacgccgggcgggcaggtggcaagcgctacggaaatcaagaaagaaatttatgcggtagatatcccggtgatttgcttagtggaaaatcaagcactttctgccggagcttatttggcgttagcctgtgataaaattgcgatgcttccggggacgacgataggagacgctgaggtgcgcatcggcagccaaaaggcggacgaaaaatatatttccgcttggcgcgaggagtttgcggcgatggcggagcttagaggacgagatgaggagatcgcccgtgctttcgtcgacagcgatatcgagatcccgggcattattgccaaagataaacttttggttttaaccgcgaatcgcgcctatgaattgggctactgcgattatcgggtgaataatttagaggaattgctggaggttatggatttaggcgaagctgaaatcgtttacggagactataccggcggagaaaaattggtaaaattcttctcttccagcacggtagcaccgcttttgctggcaggcggagtgatatttttagcgttggaatttatgacgccgggggtgggaatattcctgcttttaggcgtgatatgcttgggattatatttcggagggagtgtgctggcagggatggcgacatggatagcggttttgctttttattatcggcgtaattttgtgcttgatcgagatgatcatgccgggctttggcatattcggcatcggaggattgggtgcaatcatcgcaagtatctttttaagcacgcccgatatttataccgcggtgaaatatacggcgatcatgcttgtagcgttggtcgtgatgctgccgatatttttcaaactggcgaagaaaagcaaatttttagataaactgatggtcaaaaaagaactgacgaccgaggacggttatgtttcccgcaatcccgagttagaaaaatttgtgggctctgagggcaaggccttaacggttttgcgtcctgcgggcacgatgatgacggatagcggcgataggttagatgtcgtcaccaaaggggatttcatcgagcagggagaattgatccgtgtggtagggatcgagggtacttggttgattgtccaaaaaatagatgaaattaaagttaaagaaaacaaggaggaaaaagaatga

SEQ ID NO: 1981 - DNA, 1812 bp, Unknown
  Unknown gut bacteria
aatcaggcgaaagttttgcgcgacggcgtggagtacaccatcgatgcgaaagatttgcagaaagacgacattttcctcgttcgcgcaggagagaaaatccccgctgacggtatcgtcatcgagggcgcggcgagcttggacaaatcggcattaacaggtgaaagcctgcctgtcgaggttaaagtaaacgacgaggtattgaccgcctcgatctgcacgggcggatatttaaaatgccgcgccgtcaaagttgccgacgaaacagttttggcgaaaatcgtgcagatggtcgagcaggcctcggcatctaaagcaccgatagcccgtctggcagacaaaatcgccgccgttttcgtaccgacagttatcatgatagctctgatagcggcagtggtatggcttttattgggcaaaggtgtttcctttgctttatcgacggcgattgccgtcttggttatttcctgcccgtgtgcattaggtttggctactcctgtggcaattatggtagcaacaggtgttggcgcgaaacgcgggatattgtttaaagacgcgcctgctttggaaaatctgcaaaaaatcgacacgattgtctttgataaaacaggtacactgaccaaaggcgagccgagtgtgcgtgaggtcatcgccgctacgggtgcaagcgaagcagagcttttagagacggcgtatgctttggagaaattatccgagcatccgttggcgaaagcgattgttgcttacggcgaggataaaggcttaaatgcgcacgcggtaaatgattatcagactttgtcgggcatggggatcgcgggggcgatcgacggagaaaatgctttggcaggtaatgagaaattgatgcgcgagcagggatttattgacgacagcttgttccaaaaaggagaggaattggcgcagaaaggcgcaacgccgctttattttgccaaaggtggcaaaattttaggcttgattactttggcagatacattgaaagatgagtctgttgaggcggtgaaagctttgcgcgcgaaagggatcaaggtcgtcatgctcacgggcgataatcaaaagactgccgattatatagcctccgagctcgggatcgaccaagtcatcgcccaagtcctgccgcacgaaaaagcaggacagatcatcgctttgcaaaacgagggctgcaaagtcgccatggtgggcgacgggattaacgatgcgccggctttggtgcaggcagatatcggtatcagtatcgcccacggcagtgatattgcggtcgactcctccgatgtaattttgatgaataataatttgctcgatattttaaatgcgatcgcgctttcccatgcggcgcttaaaaatatcaaagaaaacctcttctgggcgtttttctacaactccatcgggattccggtggcggcgggagtatttttcctctcgtttggcttaaaattaaatccgatgttagctgcggcggcgatgagtttgagctcgttttgcgtagtgactaatgctttacggctttatcgtttcaaaagcccctatcgggcagaggtaagcgaagcgaaaacatctgccgcgcctgctcctatttcgccgaagggagggaatgagatgacgaaaactatgcatattgagggcatgatgtgcaatcattgcaaaaaggctgtcgaggacgctttaaatgcgatcgacggcgtccaagcggtcgtagatttagaggcgaaaaccgcgacggtgactttgagcaaggacgtaaatgatcagactttgactgacgcggtcactgccaaagattacaaagtagtgagtgttgattaa

SEQ ID NO: 1982 - DNA, 1212 bp, Unknown
  Unknown gut bacteria
atgtcctcttttcatgaaatgccgctaaatgaaaatttaatccgtactttgatggaagaatataaatttacctctcccaccgctgtgcaagagaaagtttgcgcgccttttttagcgggggaaaatattttggtgcagtccgagacgggcagcggcaagacttttgcttaccttttgcccttggatacgatgattaatcgggaaaaacgggaattgcaggcgatcgtcctttcgcccagtcacgagctggcggtgcagatcacccatgtcaatgaggatttgtgcaaaaaatcctcgttggagatcaaaacgcagtgtctgatcggcgaggcgaatattaataagcaaatcgagcgcttgaaagaaaagccgcagataatcgcaggcactcccgggcgtatattggatttgtttaaaaagcgcaaattaaacggtcaaactgtgcgtacgatagttttggacgaggcagacgagcttttggacaatactaactgtcaaaatgtcctcgacattttgaaatccgtgcgccgcgatacgcaaatctgcgcttttagcgcttcggtgagcgaatcaagcaaaaaaatgctccaagaactcaaagtagatatcgaaacgattgctctaagcggtgaaacgtatctaaacggggatattacccactactatctcgtgactgaacaaagagccaaagccgatactttgcgcagtttgatccatgctctaagtggtgaaaaaatcctcgttttcacccaaaacggtcgtaatatcgagttagtcgccgataagcttcgctatcacaaaattaacgcccgcgctttgcacagcgcccttgccaaagaagaacgcaaagaagctctggagggcttccgtaaaggtacggtgcaggttttgattgcctccgatttggcggcgcgcggcttggatatcgccgatgtaggctatgtggtgaatttggatttcccgcgttcggcattggagtatgtccatcgcgccggacgtaccggacgcatgggcaaaaaaggcgcttgtgtgagcttggtgacttcggaggaagtcgctcccttgcgcatttataaacgcgatttcgatttaaaattaagcgaaattcacctttacggcggcaaaatttatccgggtcccgccaaaggcgcgaaaaagatgcagcctaaagttaaaactgccccaaaaagcactaaaaaagttaaaaaataa

SEQ ID NO: 1983 - DNA, 1287 bp, Unknown
  Unknown gut bacteria
ggtgtacatatcgccgatgtgagcgaatatgtcaaagaggacagcgcgctggatctggaggcgagagcgcgggcgacgagtgtgtatttggtagatcaagtgctgccgatgctgccgaaaaaactttcgaacggtctgtgcagcttgaacccgcgcgaggacagactggctttaagcatcattatggacgtggattataacggtgtggtgcagaatcaggaggttttcccgtcggtaatcaaaacgcgtcatcgtttgacctacgatgaggtcaacgaaatgtatgcgggcgatgaagatgtgcgcgccaaatatgccgacgcttggcctatgctgagcgagatgagcgtgctgcaggatattttattccgcaaaaggctctaccgcggggcgctggattttgaattccccgagagcaaggttattttggacgaaatgggtaagcctgtggaaatcaaatgcttcatgcgcggtaaagccgagcgggtaatcgaggaatttatgctttgcgccaatgaaacaatcgctgagcgctattattggctggaagtgccgtttttgtaccgtattcacgaggagccgaaagcggagagcgcggcagaggtcaagcagtttttgcaggctttcggatataagctcaaaggaagcggtgagcagctgcgggcgaaagactatcaaaagattttaaataagattaagggtaagcctgaggagcgcgcgatttccagtgtgatgctccgctcgatgaatcacgcgcgctatgaggcggagcaaagcgggcatttcggactggcgtgcgaatattatacgcattttacttcgccgattaggcgctatcctgatttggcggtgcatcggatgatcaaggaattattggcgcacgacggaaatttaaccgataaaagacgcgccgatttggaaaaacgtatgaaagactatgccgagcagtcctcaatgcgtgaaaagattgccgaggaagccgaacgcgacagcgtggatatgaaaatggcagaatatatgcagagttttatcggcgaaaattttaccgctacgataagcggtgtgacgtctttcggattttttgtcgaattggataattcggtagagggtttggtgcatatttcgactttgacagatgatttttatcattttaatcaggcactctatagccttgtgggagagcatactaagcgcgttttcaagctgggcgaaaaggttgcggtcaagctggtgcgggtagatttgctggaaagacagatcgattttgaatggattaaggaagtttaa

SEQ ID NO: 1984 - DNA, 1356 bp, Unknown
  Unknown gut bacteria
atcatcgagtggggcggcgagggtgtaaaaaccttgagcgtgccggagagagcgacgatcaccaatatgggcacagaattaggggctacgacctcgatattcccctcagatgaaatcacccgcgaatttttgaaagcgcaggggcgtgaggcggactatatcgagctaaaaagcgacgaggacgcgatatatgataaaattatcgagattaatttaagtgagttagagccgatgttggcggcaccccactcgcctgataatatcgtgaaagccaaagatttagcagaggtcaaagtcgatcaggtatgtatcggctcctgcaccaattcttccttgcaggatatgctcaaagtagcggcaattttgaagggaaaaactatcgccccctcggtcagtttgtcgatttcctgcggctcaaagcaggtgatgacgatgttagctgagtgcggagcattgagcgatattttagcctcaggtgcgcgcgtgctggagtgcgcttgcggaccatgtatcggcatgggcttttcgcctaattctgccggagtgtccttacgcacctttaaccgtaattttttaggccgcagcggcacgaaagatgcccaagtttacttagtttcgccggaattggcggcagccagcgcacttacaggctatatcaccgatccgagaactttgggagattatcccgagattactttgccagctaaatttaaaattgacgacagcgcggtcatcatgcctttagagggtgaggcggcggaaaaagcggaagtcctctatgggccgaatattaagccattcccgcaaaccgtgcctttaaaagatgaaattaatgcgaaattaaccttaaaagttggggataatattaccgccgaccacatcatgccggcaggtgccaaaatcctgccatatcgctccaatatcccgaaaatgtcggaattttgctttaccgtttgcgatgaaaaatttcctgaaagagcgaaagaaaataaagcgacaattattatcggcggcagcaattacgggcagggatcctcgcgcgagcatgcggcattagtgcctatgtatctgggtgttaaggcagtcatcgccaaaagtttcgcccgtatccatacggcaaacctgattaacgcaggaattttacccttgacatttgtgcaagaaagcgattatgatgaattaaatcaagatgacgagttagtattaagcgatatttttgcaggtttggcaagcggcacttttacgctttatgacaagacgaacggcaaaaaatatgtcgtaaacggcaaatttaccgcgcgtcagcagaatattttaaaagccggcagtatgctggcctttaccaagggggtgtaa

SEQ ID NO: 1985 - DNA, 873 bp, Unknown
  Unknown gut bacteria
atgaatctgaatatcggcgacttggtcggccgcaaaagccacgggctggatatattatttaaaatagaaagtttttccgcggacgggaaaaccgtctatctgaaaggtacggatctgcgcctcatagccgacgcgccgtacgaggatttggaacttttaaatgccggggaaataaaccgccatcgtcaaaaatatattcgcaaaagcagcgaaatattaaccaaactgcaaaagcaccgcctgcgaaatgtcgacaattttttatcgcgcgccaaaatcaattacaaaaaggatctgcgcgagccggaaatatttgagctgccgggcagtgtgctgcatatcgatggggacaaagaatacctcaatttgtgcatgaatacttaccgtcagctcaatatcaaggcggtcggtttttgcgtaaacgagtgcgagcaggcgaatgttatcaaggattatttattggaatatatgccggatatattgattttgaccggtcatgacggtatcctaaaagggcgcaaaaacttttctaatcttgaaaactaccgcaattcggcaaattttgtccgcgcggtcaaaaaagcgcgcgagcttatcccggggagagatgatttgatcatctttgccggagcgtgtcagtcgcactatgagtcattgatcaatgcgggggctaattttgcctcctctccccgtcgggtgctgattcacgcttatgatccggtatttatcgccgaaaaagtagcctatacccccttttatcagctgataaatattaaagaggcgattaacgacactatcaccggtaccgacgggttgggcgggatagaaactcatggaagactgcgcttaggctatcccaaatcaccgtattaa

SEQ ID NO: 1986 - DNA, 1386 bp, Unknown
  Unknown gut bacteria
atgcaggagtttagcattgtaaacggttgtttgaaacgttacgcgggcgatgatgatgtggttacgattccccgaggagttacagaaatagcctaccgcgctttttatggcaataaaacgctaaagaaagtaattttgccggagggcttgaccaaaatcgattttcaggcgtttttggactgtagggagctggcggaaatagtgttctccgattcattagcaagcgtgagccgcgaaagctttaaaaatacggcatggcttgataactacagcgagagcgcggtttatgcaggaccgatacttttgtttgtcaaagataatcctgcggaaatcaccgtccgcgaagggacgaaaatcatcgcatctgacgcttttcgcaattgcacaagtttaaaaaaagttatcctgtcgcagactctggaaacgatcgagcatcgcgcctttcaaaactgcacagcgctaaaaagtttgtggattcctgccgcagtaaaatctctgggcgatagggtatttcttgactgcaaaaatatcgaaattacacttgagagcgtaaaactcgctatcgggcgcaaatgcttccctgatgatgcggttattcatttacggcatattatgccgcaggagctggacgtgaacttgcaaatgcgcgcggtagcggcttttgcggcggatatggcgcaggaggtggcttttagcgaggcatttttgatcaaaatgaagcgctatctctcatctaaacggcgtttgctttataaaatagcagcgcaggataaaaatttgctcagactaatgcttgagtgggaagtgatccctgcggacgaagcggatattattttagaggaaatattaaattctggcgacggagagctggtggcggcgcttctgcgctataaagaagaacacaatcaggcggaatcggcgcttgatgagtgggacgacgatttatccttggactgggagatagcagaggaaaaaagcgaggaggagttaaagagggagtggggtttcaaagaaaactccgacggtacgctgagtatcctgcgctattacggctcggaggaaaaagtcgaagtgccgagtaaaatcggcgaaagggtggtaaatgacattgctgctgaggcttttagtccgaaacgctacggattgggattaaaaagtatcgctaagctaaaaaatatccgtcaaatcacgattgcagacgggataacgcagattggcagatatgcgtttgcttattgtgaaaacttgacggaggttattttgcctgaaagtgtgttggcaatagatgattatgccttttatggctgcaaaaaacttaaacgaatacaaatggcgcagctaatcgagcaaatcggcagaaatgcttttgcaggctgcagtgaattg

SEQ ID NO: 1987 - DNA, 1395 bp, Unknown
  Unknown gut bacteria
cagcatatcggtgcttatcaggtcgaaatcgatggacaaaagattactttcttagacactccgggacacgaagcgttcactgcgatgcgtgccagaggggcgcaaattaccgatattgcgatcttggtcgtagcggccgacgacggtgtcatgccgcagactatcgaggctatcgaccatgctaaagctgcgggcgtgccgatcattgtcgcgatcaataaaatagataaacccggtgccgatccggagagaattaaacaagagctgaccaattacggcttgatcgccgaggattggggcggcgaggatatcatggtacccgtctcggctaaaagtggtgcaggtattaatgatttactggaaatgatccttttggtagccgaggtgcaggaattaaaggcgaacccgaaacgcaacgctaaaggtaaagttgttgagagcaagctggatcgcggtcgcggacctgtagcgaccttgctggtgcagacgggcacgctccatatcggagattttctgattgtcggtacgactcaaggccgtatcagagcgatgtttgactataaaggcaaagccgtcaaggcggctgtcccgagtatgccggtcgagattttaggtttatcggaagttcctgaggcaggcgatgatttcatcgctgttgacaatgaaaaattggcgaaacaagttgccgagaagcgtcaaaaagacaaacatcagcaggaaatcgcccgcaatatgaaagtttccttggaggatatttttgcccagatcaaagacggcgaaatcaaagatttgaacattatcttgaaagccgatgtccagggttctatcgaggctatccgccagtcgttggagaaattgagcaacgatgaggtgcgcgtgagcattattcgcaccgcagtcggcggtatcaaagaagccgacgtcatgttagcggcagcaagtaacgctattatcatcgggtttaacgttcggccggatgctaatgcgaaaaaattaagcgaaaaagaaaatgtagaaattaaaacttaccgcgtcatttacgatgctatcgaggatgtcaaggctgccttaagcggtatgctcgctccggagatcaaggaagtcgagctcggtcaggcagaagtccgcagcgtctttaaagtgccgaaagtcggcgccgtagccggctgctatgtcaccgagggcaaaattacccgtaatgcgaaaatccgcttggtgcgcgacggcgtggttatcttggacggagagatcgcttctttgagacgtttcaaagacgacgtcaaggaagtagcttccggtttcgagtgcggcgttggcatcgataaatttaacgatattaaagagggcgacgtcttggaggcatacacctttgaggaaatcaagcgtgagctgtaa

SEQ ID NO: 1988 - DNA, 1272 bp, Unknown
  Unknown gut bacteria
atggagcgcatttataagtatatagagaagtatgggctgttaaatatgaatgatacggtgcttgcggcagtgtcaggcggtgctgactccatgcttttgcttagagcgctggttgatttgcgtagccaatacaaacttaatctcgccgttatacatattaatcacagcttgcgcggagaggatgcagttgctgacgctgattttgtcgcccaaatgtgcgcggcatggcaggtgccttgccgtgtagttacaaaagatgtagctgagtacgcaaaagagcagcatttgagtgaggaggccgccgggcatgaggtacgctaccaagcatttcaggaagaaatggcgtgcctaaatgccgacaaattggcgctggggcatcatttaaacgaccgcgccgagtcggtaatgatgcatattttaaagggctgctctccggctgggctggcagttttggcggctaagcagggaaaaatcatccgcccgcttcttggtttgtctaaggaggaaattttgcaaatttgcactgcggaaaatattccgtattgtaccgacagcactaattttgagacgatttgcctgcgcaataagctgcggatggaattactgccgattttgagaaatgagtataatcctcatcttgaccgcgctttgtgccaattagccgaaatggcggctgaagatgaaaattattttaatgagcaaacgaaggcttgcttaatagcttgcgccgtaaaaaatgagcaatcggcggaaattgatttagcgctttggcgctgctatcatgcgacgatcaagcgccgcacattgcaaagtctttggcagagcttgagcggcaggcagaaattgagttttgcgcagattgagcaaattttaaaattagcgagggaagattgcggcgagaaaaagctttctctgccttatgactggcagatcgtcaaacgctacgacaaattattcttgcaaaaggagcaaatgtctaacggtgaggattatgttcagctttggcggtggcaggagggcgagttggctttgcttgcgggcgtgctgaaatgctctcttgcagatgagatggaaactgagacaaacgcttatcaagaatttgtcgacgctgataaattagacgtcacattagaggtgcgcaaacgtcgcgcaggcgataggatgcgtcctttagggacaggcgaaaaaaaggtgaaagatattttgatcgataaaaaaatcccgcgtgatttgcgggataatttgccgcttgttgtttgtaacggcaaaatt

SEQ ID NO: 1989 - DNA, 1662 bp, Unknown
  Unknown gut bacteria
atggataatatgagcgcactgggatttttgcagatattttttgcaattatcatcggagtgtattttttaaatcttttgcagtctcagcagggcagcaaggtggcggtggcgaaaaattcgcgtagggaaaatgaaaaattggcaaaaatgcgtaagatttctttaagcgagccgttgacggcgaaaattcgcccgcagaaattttccgacatcatcgggcaggaggaggggatcaaggcgctcaaggcggcgctatgcgggcctaatccgcagcatgtcataatttacggtcctcccggtgtgggtaaaaccacagcggcgcgattggtgatggatgaagcaaagaaaagcccgtattcgccttttttggcagatgcaaaatttattgaggtggacggcgcgacctcgcgctttgacgaacgagggatcgctgatccgttgatcggcagtgtgcatgacccgatatatcagggagcaggcgcgatgggaccggcaggcatcccccagcccaagcctggagcggtgagcaaggcgcacggcggcattttatacatcgacgagatcggcgagctgcacccgatgcagatcaataaactattgaaagttttggaggatcgcttggttatgcttgagagtgcctattacaatcccgacgacgctaatgtcccgaactatatcaaggatatttttgataatggtttgccggcggattttcgcttggtcggggcaacgacgcgccagccggaggaaatcccggcggcgatccgctcacgctgcttggaaatatattttcgggcactcttgccgccagaggtggaaaaaattgctgccgacgctgcggaaaatgccgggtttccggcagaaaaggaagctgttagattggtaggtggctatgcttccaatgggcgcgacgcggtcaatatgatccagatcgccgcaggactggcgctggtggaggcgcggcatgagatcacgagagcggatatcgagtgggtgattaacagcggtaaatatacgccgcgtctccagaaaaaaccgctcgctgcgcctgaaataggagtggtaaacggtttggcagtagcacaaagccgcatcgggattgtgaccgaggttgaggcgcaggcgcttaaaacagctaaaggacgcgggagtttaacgattacagggattgtggaggaggaagaactgaaaggacaaactcagtctctttaccgcaaaagcatggcgaaaagctcggcggaaaatgtcctcacggttttggaaaagttttacgatgtcagacctgatgaatatgaaatccacctcaatttcccgggagggatgcctatcgacggtccctcggcaggggtgacgatggcggtggcgctttattcggcgattaataatctgccggtggataattatctggcgatgaccggggagatcgctatcaccggcaaagtgaaacccgtgggcggcgtgagcgataaaatccaggcggctattcagatgggcttaaagagagtaattattccgctggataattaccagagcaattttaacaatttgccgatcgaaattatcgcggtgagccatgtgcaggaggtatttgatatcgcttttatagaggcggaaaatgagaatcccaaaagctgcgaaagtctgcagagagcggccagataa

SEQ ID NO: 1990 - DNA, 831 bp, Unknown
  Unknown gut bacteria
atgagtaagatggttcctgtgccgagtcagtgcatggtgccggagagggatgccgataaggctccggttttggaggcgactcatttaggcatcgagtttggcggtctgaaagcggtggatgattttaatattacggtaggacggacggaaatcagcgctttgatcggaccaaacggtgccggcaaaacgacggttttcaatttgctgaccaaggtttatcagccgacgcacggcacgattttgcttgacggcaaggatacacacgggatgaatgcgatccaggtcaataaagcgggtatcgcccgtactttccaaaatatccgtttgtttaatgaattgacagttgaggataatgtcaaaatcggtatgcacaatcatatcaactacagcacgccgagcggcattttacgtctgccttcttattggaaggaagagaaaaaagcgcacgaaaaagctttggagcttttgaaaattttcgatatggataatatggcgcagcacaaagcgggcagtctgccctatggcgcgcagagacgactggagatcgcccgtgcattggcgaccgagccgaaattattgctgctcgatgagccggctgccgggatgaacccgtcagaaacgacggaattgatggataagatccgcaaaatccgcgatacgttcagcattgcgattttgttgattgagcatgatatgaacttggttatgggtatttgcgagtatatcggtgttttgaattacggtaaaattattgctaaaggcacgccggaggaaatccagcagaaccccaaagttatcgaagcatatttagggaagaaaaaggagggctga

SEQ ID NO: 1991 - DNA, 1017 bp, Unknown
  Unknown gut bacteria
aaggaaaagatattggaagcggtagttttggactatatccagacggcagaaccggtaggctctcgtaccatttcaaaaaaatatgatttaggtgtaagccctgcgacaattcgcaatgaaatggcagatctggaggagatggggctcatcgagcagccgcatacttcggcaggacgcatcccttcggataaaggctatcgttattatgtggactatttaatgcagcacgacgaggtcaaatccgaggcgcgagaattgatcaaagaatcgatcagcaagaaaaccacgcaggtcgaggagacagtcagcaatattttaaatacgctaagccagacttcgggctatacgtcgctcatgcttttaaacgagccggcgacggagaataaattaaagcttttgcagttgatgcctttagagacgggcagagcgttaatggtgattgtgacggacgatgataagatcgaaaatcgttttattcagatcccgccgcaattgggcaaggaggatttggagttagttagccagatgctcaatatgcatctgaaaggcttatcaaccgacggctggcagcagaatattttggagaatattttctcccagcttaatcgccagaagcaagtggtcgacacggcgctggaaatgctcggcgagatattgcataaaaacgacattgccaaggaaaagatattttacaaaggcgggctcaatatgctgacgcagccggagtttaaggatgtcaataaagtgcataatatcctgatgagcttggaaaataaagatacgatgaataaaatcctgcacgaaaatacggtgaacgaaatcagcgtaaaaatcggcacggagcatgatatccccgatttaaaggattgcagcattatcgtcgcttcctataaaaataacggcaaggaaatcggcaaggtcggacttttggggccgaagcgcatggattattccaactcgatggcagttttggatgtacttttgaaggatttgaacggaggtgagggtcgtgagtga

SEQ ID NO: 1992 - DNA, 1398 bp, Unknown
  Unknown gut bacteria
atgtcggttttaaagaaattaggtttaacaaagaaacaactggtgatgattacggttttcacctttgcggcatttgtcggtattttaaatcagacgctgctttcgccggctttgccgagtattatgaaagaattaggtattgacgcagcgactgcgcagtggttaacgacggcgtttacgatggttaatgcgatcatgatcccggtgacggcgtttttgatcgaccgctatacgacgagagccttatttactttttcgtcggtagtgtttgctttaggttcgttaatggcggcggtatcaactaattttccgcttttattgggcgggcgtattttgcaggcgatgggcgcaggtattatgatgccgatgctgcaggtagttatgctgattatgattaagcgcgaatatcgcggcatggtgatgggtgtcttcggcttgattatctgctttgcgccgatgattgggccgacggtcgcgggaataattgtcgatcagtataattggcatattttgttttggattattgcaccgttaatgcttttaatttgcttgctcggcttggcgacgctggaaaatgtcggtgaacgcaaggatgtgagcttggataaattgtcggtgattttatcaacgatgggctttggcggtttattgtacggattcagcgcgataggctcttatggtattcatgcgatagcattattagtgattgctgtgggtgcggtgagcttggtgtttttctttagacgtcagctcgcgattgctaatccgatgttacaggttagggtgttaaaaaacagacaatttttaaccggtacgattattacgatgatcgtgcaggcggcgatgatggtagcatcggttatcgtgccgatttatattcagacagtgcgcggatattcggcgacggtgagcggaatgatgatgctgccgggtgctattgtgagcggtatcgctggtttggtagccggaaaaatatttgatgaaaaaggtccgagaggactggcgatcagcggtgcggctttattatgtatcggcagtacggcgtttgtttttttgacggacagcacgccgatatggtatttgtgcgtgatgtttatggtgcgttcgctcggcatgtcgtttttgaatatgccgcttaacacatgggctttaaatgcgctggataataatattattgcgcacgggacggctttgggcaatacgttccgtcaggtgtcgggatcgttgggcacggcggtgttaattacggtaatgtctatcgtgagcagtgccaatgccgatgagttgggtgctaatgaggcgatgcttttcggtatcgatgtgacctttggcgtggcggcggtgttatcatttatctgcttggtattgtcgatttggaaagttaaggataaaaaataa

SEQ ID NO: 1993 - DNA, 1266 bp, Unknown
  Unknown gut bacteria
cagcgtatttacggcacctgcttcccgaaaaaagctgatttggacgagtatttgttcttattggaggaggctaaacgccgcgaccatcgtaaattgggtcaggaattgcagttgtttacctttgttgatgaggcaccgggatttccgttattctacccgaaaggcatgattttgcgtaacgagctggagaattactggaaagaagtccaccgcaaagccggctatcaagagatcaaaacgccgatgatcatgagccgcgtgctctgggagcgctcgggtcactgggatcattatcatgataatatgtattttactgagattgacgacgagccgtatgcaatcaaaccgatgaactgcccgggcggtatcttgctctataacagcaccttgcacagctatcgcgatctgccgttacgctggggagagctgggattggtgcaccgtcacgaattatccggtgcgctccacggcttaatgcgcgtcagagccttcacccaagacgatgcgcacatctttatgctgccggaacagattacctccgaggtcaagggcgttattaccttgatcgacagtatctataaattgttcggtttcgaataccatgtcgaattgtccacccgtcctgaggattcgatgggcgatgatgctttgtgggaaaaggcgactgacgctttgcgcgagtcgttaaaagagatgaatatgaactatatcgtcaacgagggtgacggtgctttctacggtccgaaaattgacttccatttgaaagactcgctgggaagaacttggcagtgcggtacgattcagttagacttccagatgccggagaaatttgacatgtgctatatcggcgaggacggcgaaaaacatcgtccggtcatggtgcatcgcacctgctttggcagtattgagcgcttcatcggtattttgaccgagcatttcgccggagcattcccgacgtggctggctccggtgcaggctgtagttttgccgattaccgataaatttaaagattacgctgatgaggttgcggcgaagttgtctgctgaaggcgtgcgtgtcgaggtcgatggccgtaatgaaaaaatcggctacaaaatccgcgaggcacaaatgcagaaagtgccgcatatgttaatcgtcggcgaaaaagaagcgactacgggtaccgtcggtcatcgcgaccgcgcgaaaggcgatatgggtgcggtagcagttgatgaatttgtcgcacaaattgtcgaagaaatcaaatcgaaaaaatgctaa

SEQ ID NO: 1994 - DNA, 1893 bp, Unknown
  Unknown gut bacteria
ggcagagtggacgatggcaccaccgtgacggattatctgccggaggaaattaagcgcaaagttaccatttcgaccgcgatggctccggttgtgtggcaggattacaagatcaatcttttggatacgccgggatattcggattttatcggcgatgtgatcagcacgatcgcggcggtagacagtctggtcatggttgtctgcggcgtttcaggacctgaggtgcagacggatgtcgtctgggattacgcccaagaaaaaggtatgccccgtatgtttgtcgtgaataaattggatcgtgaacatgcctcctttgaaaaggtttgggtggaactgcaggagcactacggtccggaggtcatccaactgcatatcccgatcggcgaggaggaaaatttccgcggctttatcgatgtaatctcgcataaggcttacgaatttgacggagataaattaaaagaaatcccggtgccggaggatctgaagattttactggtagagaaatgctcgactttgattgaagcggtggccgaagtcgatgattatgtgatggagaaatatttggagggtgaggagatctgcgagcaggatatagcgcgcggattccgccaaggaatcaagctcggcaaaatatttccggtattgtgcgccagcgcgatcaataataaaggcgcggtgccgattttagacgcgatcatcaaatatttcccggagcccaaggtcgaggacggagcgaataaagcctttgtctttaaaacagtagccgatccttttgtcggcaaaatgagtttcctgcgtattttgagcggtaaattcaaatcaggcgaaactttgtataatgtcaatttaggcaaagaagaaaaaatcggcaatcttttaactttatccggcaaaacgcaggatactttgaccgaggccaatgccggtgatatcgtcgtgatcgccaaattgcaggaaacgaaaacggggcataccttgacgacgaagggcagtacggtcgagcctgtatctgaaatagctttccctgtgcctaatctcacgatggcagtttctccgaagagccgcggtgatgaggataaaatgggcaatgcgttagctcgccttttggaagaagatccgaccttgcgctcgggaaaaaataacgaaacgaaagagcagcttttaagcgggatcggcgatatgcatttggatatagttgccgagagatttaaaaataaattcggggtggatattgttttaaaagagccgaagatcccttatcgcgaaacgattaagaaaaaagtcgaggtgcaggggcgtcacaaaaaacaatccggcggcgcaggacagtttggcgatgtatggctcaggatagaaccgtataaggacggcgatttcctttttggtgaggaggtattcggcggagcggtgccgaaaaactatttccccgcagtcgaaaaaggtgtagtagaggcgatgcgcgagggtatcttggcagggtatccggcgactaatatcaaggttaccttatacgatggttcctatcatccggtagactctaacgaaatgagttttaaaatcgcagggtcgttagcattcaaaaaaggcgcggaaatggctaatcccgtgattttggagcctattatgaatttaaccataaaaattcccgagcagtatttaggtgatatcatgggcgatatcaacagccgccgcggtcgtattatgggtatggatcatgagggcaaaatgcagatcatcgaggcacaggcacctatggcggaattagtgaaatatgcgattgatctgaaagcgatgacccaaggacgcggcagttatttgagcgagtttgaccattacgaagaagtaccggcgaaaatagccgaaagtatcatcgcggctcataaaaataaagcttga

SEQ ID NO: 1995 - DNA, 1758 bp, Unknown
  Unknown gut bacteria
atggtaaatgttattatagatggtaaatctgtagaagttgaaaaaggttctacagttctcttggcagcacaaaaagccggcgtgcatattccgactttgtgctatttaaaagatgttaatgctatcggcgcttgccgtgtttgcttggtagaagtaaaaggtgccaaagctttacagccggcttgcgtttatccggtcagcgatggtttggaagttcacaccaatactccgaaagtacgcgaggctcgtaaagctgttgttgagttgttgttatccaaccacccggcagactgcttgacctgcgtgcgcagcggcaactgcgaattgcagactatggctcagcagatgggtatcagagaaattcgctttgaaggcgaaaagagcactttcccgattgacgaccgcagcgtggctatcgtcagagatcctaataaatgtatcctttgccgtcgctgtgtagctacctgccaaaaggtacagggcgtcagcattttaggtttggttaaccgcggtttcaattcgacggttggtacagcgttcaatcatccgttagatgatatcaactgcgcattgtgcggtcagtgcattaacgcctgcccggtcggcgcgttaagcgaaaaagacgatactgctaaagtttgggctgctttggctgatgaaaacaaacattgcatcgttcaattctctccggctgttcgtatcgcgatcagcgaggaattcggtattccgatgggcgagatttccaccggtaaaaccgttgcagctttgagaagattaggctttgacaaagtattcgataccaactggtctgctgacttgaccattatggaggaaggcaacgaattgttgcagagaattcaaaacggcggtgttctgccgcagatcacctcttgcagcccgggctggattaaatattgcgaacatcactatccggatcaattagatcatttgtccagtgcgaaatctccgcagcagatgtttggcgctatcgctaaaacctactacgctgaaaaagccggcattgatcccgctactattttcagctgctcggtaatgccgtgtactgcgaaaaaatatgagtgcgctcgtccggagatgaactccagcggatatagagatgttgactgtgttatcactgtccgcgaagttgcccgcatgattaaacaaaccggtttgaacttggctgagctgcctgaggaagagtgcgacagcccgttgggtgtaggtaccggcgcaggtacgatctttggtgcgaccggcggtgttatggaggcagctctgcgtaccgtttatgaagtagttaccggcaaaactttggaaaatgttgaatttactgctgtccgcggtatggaaggcatcaaagaagcgtctgtagacttaaacggcactgaagttaaggttgctgttgttcataccttggctaacgctaagaaaatgatggataaagtaagagccggtcaggctgattatgcattcatcgagatcatggcttgccccggcggctgcgtaggcggcggcggtactccgatcgtcaatgctttgaccagaagcattctgcctgaggattatcgtgctatccgtggtaaaggcttgtacaacgatgataagaatttgccgttgcgcaaatctcacgagaatccgttcatcaaagctgtctatgctgagtacttaggcgagcctttgagccacaaatctcatgagttattgcacaccacttacactccgcgtgtaaaatacagaactgattttgacaaataa

SEQ ID NO: 1996 - DNA, 1629 bp, Unknown
  Unknown gut bacteria
atgattgacggcagaaaaataggcccacgtgacattgacaagttaccgggcgaacaattaacttttattgatacaaaaaatctgatgcctttaccggctccgtttgacaatccggatacctggccgaaatggcaggaggctaaaccggaatggaaagaaaaatatgctgcgaatttggacggcattattggtatcgactgctttgaaactccgaaaaccaaagaggagcaagatgaattagtcagaaaattcctctccggtgtggaaaaaatgctttccgctgagtctaacaaaggtattatccaatgtttgaatttgagcatggaatactgcgctaaatgtaatacctgcgccaatgcctgccatgttttcgaggcttcggggtataatgaaatttatcgtccgacatatcgtgcggaagtattgcgcatgatcgtgaaaaaatatttcaccaaaagcggtaaattgatggctaaatttgtcggtgcggatattgatttgacgtgggaagtagtagctcgcttgggcgagagcgcttaccgctgcaatctgtgccgtcgctgcaaccagacctgcccgttagctctggataacagcttgttcgctaaagaaatccgcaaaatcttcagccaggagatggggatcgctccgaaaccgattttcgaaaaaggcgatatgctgcaattaaaaaccggttcttcgaccggtgtcaccaaggctgctttcttggatacggtagaatttttggacgaggattgtgctgatttgacgggatatgagtatactaccccgatcgataaaaaaggcgcggacattttgttaattcataacgccggtgagtttatggcttggccggaaaacccgatggcattcaccattttgtttgaagaagccggcttagattggactttgagcagtgatttgatgggctatgataacgtaaactacggtatctggcatgacgatatgcttgcaaagaaaatcgctgtggcgcaaaatgaggctgcgaaaaaattaggtgtgcagcgtatcgttatcgcagagtgcggtcatgcgcacaaagctgccgctgttgttgctgaccgtttctatcccggtaaagacagagtgccggtacagagcttcctgcctttattgcgtgacttggtgatgaaaggcacctatgatttagacccgagccgcaacaacttcttaactaccctgcatgacccctgcaactatgtacgccagatgggtattgttaaaccgcagcgtgatatcttaaatgctgttatgccgaaaggcaatttccacgaaatggagcctcatggcgtcaataactactgctgcggcggcggttccggtttcgctattatgaacagcatgaacttctcttacttcagaaacaatgtttccgcacgtaagaaattatcgcagatcttaaatgctttcggcgaagcttcggctgatccgagcgtcatcaaatacatcactgctccttgctcgaactgcaaaggtacgatgcgtgatttgttggaagcatggcatatggctgattataatttctattacggtggattggttgagttagtagttaacgcgatgaccaaattcgacgagcctttcttagagtttttgcgtgacgaataa

SEQ ID NO: 1997 - DNA, 948 bp, Unknown
  Unknown gut bacteria
atgtttactctgacaggctgcggtaagtctgaggaaaaagaccaaaagcagataacggtgcggatcgccaccgatttaaacgaaaatgatgccgcctacaggcagctgaaacgctttgccgcgaaagccgaggaggcctccgagggcgagatcaaagttaagctttatcctgaggctaaatgggacagcaacgactcattattggcttacttagatacgggcgctttggaaatggtgtgtctgcgcaccgaccgcttgacggcggaggtgccggagtatgcgctttacagctatccgtcactttttagcgacgcgggcgcggtgagcagctatgctttgtccgacagcggcagacaggctctcgccatgagtaaaaattatcatctgttgggctttacggctaacggctacagttattttttgcacaggttttgggcggaaaattacgctaattaccgcggcaggagtttttatgccgagctggcagatacgacggcaagtgctttggacggattgggtatccgagtgatcaatgaagaaaacagcacacccgggatgaaccatattttgaccgaaggcgagcttgactatttactgcaggtcaatgtgattaacgaaagcgactatatcaccgatccgaatgtgtattacaatttagaaataacagcggtcagtccgcttttttggcagaaattaagcgatgatgagcaaaatatattgactgaagcgtttaataacgctttaaaagaggaatgtgcttatcaaaaggatcgctctttaaaagaaatcctgcccgagggcggggccggctttatcccgtggagtacggaaaataagcagacggcttatcaggctttacggtatttgagcgaaaattatatcatgagcagtcaaaatgcgttaggcagttattttatgccgactgcagcaacagaggagggcgtgtaa

SEQ ID NO: 1998 - DNA, 1116 bp, Unknown
  Unknown gut bacteria
gtgcaaatcgagatcaatattcccgcaccgtgcgaaaaagcgctggaaattttggagcgtcacggttatgaggcgtatttggtgggcggctgtgtgcgtgacagtatcttgggacgcgagcccggcgactgggatatttgcactaatgctctgcccgaggagatgatcgccgcttttgccgactatcgcttggttttaaacgggctgaagcacggcacggtgacggtcattatcatgcatacggcgatcgaaatcacaacctatcgaatagacggggagtatgaggacaaccgtcaccccaaggaagtcacctttacttccgacttagcattagatttgagccgccgcgatttcacgatcaatgctttggcgtataatcagggaaaaggcgtggttgactgctttggcggcttggaggatttggcaaacggtgtaatcaaagcggtcggcgatccctacaagcgttttcacgaggacgggctgcggattttgcgcgcggtgcgcttcgcctgcgtgctgggatttacctacgatgagcggacaaaggatgcagtgcgcgactgcaattatttattgcgcaatatcgcgaccgagcgtatccaagtcgaactcaataaaatcctcctttcgcctaatgtccgccaagggctggaggatatgtatcaattgggattatacagctattttttgccggagatgtgccatacctacggttttgcgcagcataatccctttaattgctacgatgtgttcgggcatatcgtgcgctcggtagaactaatcgagcctgatttgactttgcggctgacgatgtttctgcatgatatcggtaagccattcgtctgggaggagtgctttgatggcaacgactgctttccgctgcacgagatcccgtcggcagaaatcgccgaaaaatttttggagcagatgcactatgataaaaagacctccaaagaggtcgtgaaacttattttagcgcacaatgaccatattttagacgatgattacagtattcgcatggaactaaacaagatgggtgctgaaagcttggggagattgcttcaggtcaaaatagccgatatgggtgctaaaaatgaggagatgaaaagcatgacg

SEQ ID NO: 1999 - DNA, 1050 bp, Unknown
  Unknown gut bacteria
atgctggcagaactggagaaagccgagcactttatctttttggaatattttattatcgccgaggggacgatgtgggggcaggttttggagattttggcgcgcaaagcccaagagggtgtcgatgtgcgcctgatgtatgacggcaactgcgagtttttcactctgccgcataattatcccgagaaaattcgcgcgctcggtatcaaatgcaaagtattcgcgccgttagcgcctgttttgtcgacgcattataattatcgcgatcaccgcaaaatactggtaatcgatggacacactgcttttaacggcggggtaaatttagccgacgaatatatcaatcatatcgagcgtttcggccactggaaagatacggcggtcatgctcaaaggagatgcagtgccgagctttacgctgatgtttttacagatgtggaatgtcagcgaaaaaagttccgaatttgccgagtttttgcagtatcctctgcctatgccgcctaaaacaaagggcttcgttatgccatatggagattgtccgctggatagtgataaagtcggcgagcgggtttacatggatatcttaaatcgagcgcagaaatatgtgcatatcatgacgccgtacttgattttagacggcgaattggaggcggcgctcaaatttgccgcggagcgcggagtcgaggtctgcttgatattgccggggatcccggataagacgattccctatgctttggccaagggcgagtacaagacacttttggagtcaggtgttcatatttatgaatatactcccggctttgttcacgctaaaacatttataagcgatgattgcgaggcggtggtcgggacgattaatttggattaccgcagtttatatcatcattttgagtgcgcgacgtatatgtacaacacggagtgcatcgctgaaatcgagcaagatttccaggatacgttgcaaatgtgctacatggtggataaaaaaactatttggcagcatcatggtattttacgcgtgataaatgcggtgatgaaagcgatagggccgcttttatag

SEQ ID NO: 2000 - DNA, 750 bp, Unknown
  Unknown gut bacteria
ggatatttagccaagcttgagacactgatgatgcaaggacaggcgttttatcaaaggatggacttgccacaggaagcagatgaatttttggcaaactggctatgcggtgccgaaagcaaggcgtggagctatatagctgtagttttaaatgggattataccgacgatcgcggggagttttgtatggcttttggtgccgattgtgagtttttattttttgaaagataaaaagatctggcagagctatatttggcgcgttttgccgatccgcagacaaaaggaggagcgggcgttttttcgggaattggatttggtggttatgagttttttgcgtgggagtatcgtggtaggcgggattgtaggggcgcttacggcgctgggactctggatagcaggggtgaattttgcgctgattttcgggtttatcgccggagtttgcaatatcatcccgtatttcggaccgtttatcggcgcggctcctgcggtaatcgcggcttttttacaggagcctgccaaagcgctgtgggcggcaatagttatggtcattgtgcagcagtgcgaaagtcattttatcacgccgcagattatgtcgggaaaattgggcttaaatccgattgcaattatgtttgcgcttttggcgtttgggagggtgttcggattttggggcttggttttagcggtgccgttagccgggatgctaaaggtggtcgtgaaatatctcatttccagagcaatttatacccgagtctga

SEQ ID NO: 2001 - DNA, 3165 bp, Unknown
  Unknown gut bacteria
gagagctgctacacgcaggtcacaacaactgaaaaggaaattcttgcctgccccgtgtcagcggagagcgggcttgttgtcgtgcaccggcacgattcgcgctgctatgacgaagacggcatgcttgcatgtcctttgccggagcttgcggcgcatgtacataccgaggcctgctacgactaccccgaagcgcatgtccacacagatgcgtgctattcggaggaaagaggcgagctgatctgcggtttggaagaaggagaggagcatacccacacggacgattgctacgcgtgggagacggttttgtcctgcggccagacggaggaggagcctgccgagccggtgctcgtctgcggcaaaaaagagatcgttctgcaccggcacgacgaggattgctacgccgcggacggaacgcttacctgcgcgcttccggaagtgatcgaacaccagcacacgggaaaatgtttcaagaccgttcaggtccctgtggacacgcaggcgctcacctgcacgaatacggaccctgaccatgtgcacaccgcgctgtgctacggcacgtgggtcctgacctgcgatcagggaaccgacgacacgaccccggacacacctgcggacgaagacccggcggacgatcccggctccgaagacccggcagaggatgaagatccggacgatgcggattctgaagaccccggcgcggaagactccgaaaatcccgaagacccggagaaccccgaagacccggaaaatccggaggacgagcagccggaagacggcgcggacacctacgcgtccgagcagatgacgctgcggtactacgtttatctcgacggctcgctggatcctgttttggaggagtccagaacgctcgagcgggagaacggacgctattacatcacggcgcagcagctgcagaccgtgtacggcgattttggtttcgaggcggacagctatcaaggagaacgcttcttcccgcatactgatctgcacgacacatcgcttatctgggcggacgcgccggcgtatccggccgaaaacgcggacggaacgcaggaatggcgcattccgctcagccgcaccacaacaagctatatctactatctgccccacaacacgcaggactacggcagctactttgaaggcagtgcctccaacaccaatgcggcgctcatcagcgacaacacgttctacaccgtgaacatttccgcgccgcccgatgccgcgtcggagagcaagatctatcacgtactgaacggagcgacgttcagcgtcgagctgtctgtgttcgacgactacacctggagctacaccaacctcgccgatggcagcgagatcacgccgagcgatgtgcaggagctggaaggcggcaagcttttcatcaagttccggaacgtctcgcatcccatcaaggtcactgcgcgcaaaacgatcgccgacgaacagatctataccatccgctaccatgcagatacgctcgccgactgtctggaacgaatcagcagtgcggttagcgccaacgcgcagagcgttatcaccgacggcaaggtcggcggcatggcgacgcttaccgaacaggtaacggtcacggcggatacgatctatccgctccgttcgccggattcgctgcgcgtggtgtcgcaggcagacccgaccagacaggccaagcactatttctacaccttccgcggctggcgcgtcaaggcgaccaacaccgttctcgaccccgcgcagccgctgacggcggtgcagctggcgggctatgaaaacggcggcgtgatcgagctggaggcggtctggagtgtaaaagacgcaaatggcagagccacatccgtcaacttctttattcaccttttctgtgagatcaaggacttccacagcaacggcttcaccaacaacccggtcggtgactataccaagtccctgttcaccacgacgctgctcggaactgatgcactctcctcgtccgataaccttctggttcttgcgcctccgacgactgacgcaacggcctacgaaacggatgacatcctgcgcaccatgacggatacgccctacgatggcctgacgatggaagcatttccctctgaccgcgagatgttcgccctgctccgcgagaacaactacaccatcaaaatcggcaatagcacgatcccgcaaagcaagctgacttcagactattttcaggttcgctggaccaacctcaaatacgatatcagcgacggctggcatgtcgacggtgtgcttgtagcgaaggaagcaaagctccgcgtaacgaagacattcctcggaagcgccgcagccattgcaagcgttaaggcgcagaccggcgggatggaatacggaatccggattcaaaacacgacgacgaatgccgaagagctcctcctcacgctcaaccctgccgggcaggagcagcgcacggattgcgtgggatatgacgactacgatgccgccagcaatacctatacctggatcgtcagcgggcgcgtcgacagtatctatgcgctttccgagcagaactatcttttgcaggatgtgccgtcgacctcctattaccgcatatctgacatggcaaaaccgggtgactggcagaactatgacgctgacagtcagcccaccacggctatggtctcctacgcgacggataccccgaaaaacaggtaccgcacggtatccttccgcaacaagtatgtcgatgccggtacgttgacgctgcgaaagttcgactccttcacacacaatggcatcgcaaatgtggaatttctgcttaccgcagatgacggcgttagcggccagcatctgcaccgcaagccgggaacgagcatgtataccaacgccagcacctccggttcggaatataccgaagcgacggggaacaggatcgtgacggacgtgaacggtgacgcataccttcgcctgacacccggcgcatacacactgcaagagacattgccgaccggatacagcggagctgcggagatccggctcactgtcgacgaggagggcagcctgaccgcgctgacctttgacggcgcgccggccgcctcttcgcccggcggcgtggcatccggtgtgggaaccacgcttctggccattatgaatgattcgcaagttctgacgacagttaccgctgtgaaggattggggcgaggtgccggacgagtgg

SEQ ID NO: 2002 - DNA, 1602 bp, Unknown
  Unknown gut bacteria
ctcaacaggcttgcgggtgacctgattttcagggacgagagcgggaacgatgtgacgcaggacgtccagggcaagttcacagtcacggaagcaagcttcaacgcacccggcttctttcaggcctattgcatcaccggcaagatcgcgatcaaggacgagtacgcgtcggaacttcagctgaacaaggagagcttcacgatcaatggcaaaatcgagaaggccaagcctgtcttgacgggtctggagttcaagcccaaaaaacagctttacgccggcgactcgcttggctggaactttgacaacaacaacctttcgggcggcacggccacgatcaccgcttacaacggaagcaccgtaacggttcccggcacgttctcctttgatgagggcgagcttcatcggggaagcccgctgaagggcggggagaaccgtcttccggtgcgatttgacccaaaggacgttgcaaacgtcgaagaggcagcctgcaaagtggttgtcaatgtgccctaccgcaattatgactgcgtcagcgcgtcgtatctctatcccgcatatggcacggcctttaaagatctgaacctgccggattccgtgaccgtcaacgcccggtatgacgcaagcgacggcggcgtgggcttcaactattacgcagacatcacgtgggatgcttccaaatacgacccgacaaatctcgacgaacagatcatgtacggcacatttgataggtcgtattgggaggactatatcgcgttcccggagggcgcggatgttcgggtcaagcttgtgatcaaggtgcagcctcccgtacaggctgagacggaaatcacaaagcttcctaccttccagtggacaaaaagactggacaatggcggcacgttcaagcttccggtaaacaccattttcctgtttaccaagtttaaagttggaacctactccgggcaaaccggcgcgctgaccggcggcaaggccagaattaagggcacggataccgagctttccggtacattcgccctcgagttcccctacgggcagacggaaacgttctacagcgaagcgggcacgaaggaagtaaccgtggtcttcaagccggaaaatagcctgttctatgccgaagcaagagcgacgctttccgttgaggcaatcaagctcacgctggcgaagatgtacaacacagtctccatcacggacaaggacgtgggaacgcagttcgcagatctggggcttccgacatctgtaggcttcgagacggaggacggcacggtgaagttcatctctgtggaatggaatgcggagggatatgacaggaattcttctgcggagcagaccattacgggaacgctgaaatacgactcgtttgacgaacgcgaactcaatcccactacgctcaccgcgacggcaacggtcaagctcattccgccggcgcatgtgcacgcctacacgcagaaggttcagaaggcggagaccctgaaaacgcccgcaagctgtacggaagacgaggtgtactacctgtcgtgcgaatgcggcgagatcagcccgaacgaggccgatgtgttcatcgccgaaaataccgccctagaccatgactttggcgactggacgtcg

SEQ ID NO: 2003 - DNA, 708 bp, Unknown
  Unknown gut bacteria
acatgccaagcacgaagaaatccggggaaggggagtgatcctatcgcaatcacaagcgcgagcctgccatcgaaaaagcgcatcctgacggtctgcgtcaagctctttttggagcaggggtacaagaagacgacggtcgcacagatcgtccacgaggcgggcgtttccaacagcacgtttcagaatattttccgcgccaaggacggcgttctgacagagctcgtcgagttcatgttcggcaaccagtttgccatggcgcgccagacggcggggcagacgctgccgcccatctatgtctacgcggtcgagacagccattcagatgacgctcacagagctcaacgagaatttgcgggaaatttatcttgaggcctatacgcagaaggaagcgtccgagtatatcttccgcgagacggccaaggagatccagcagattttcggcgcgtaccagccggggttcacggcggccgatttttacgcgatggagctcggctcggcgggcatcatgcgcgcgtatatggcgcagccgtgcgatgaagcgctgacgctcgagcggaagatccagctgtttctgacgatgagcctgcgcgcctaccgcgtgccggaggaggagattgagaagacgctggcgtatatcgcggggcgggatatccgcgcggtctcggagcgggtcatgcacatcctgtttcagacgctcgccatgcgctac

SEQ ID NO: 2004 - DNA, 810 bp, Unknown
  Unknown gut bacteria
aagctttcgggttacgtgcagttttatgcattctgtacggtgtggctcgaacaggacgggagctttgaagcgcactacgcgggcgctttggagcattttaaccgccagctggacgagaacaaagaccagatcgtccgctgcaaaaacgaagcggatgcgcgcgcggccatcgggagcggaaaatgcggtgcgttcttgtcgatcgagggcgcggaggccatttcctgtgaccccggaaaattagagcttgcctgcgcgcagggcgtgcgcatgatcgcaccggcgtggaacgcgcagaatgcgctgaccggaagctgcatgacaggcggaggtctgacggcacagggcaaagaattcgtgcgccgggcgcagaagcttggcatgatcctagacgtcagccatatctcggagaaagcgttctgggatctttgcgacatcacagaaaagccgtttgtggcgagccattccaattcgcgcgccatctgcaagcatgtccgcaatctcaccgacgagcagtttaaagcgttgtgcgaggcgggcggtacggcggggctgaatctctacggcgcatttttacgcgatgagggcaggccgacactggaagacgtctggcgtcatatcgagcattttttggagctcgggggagacggacatatcgcgctcggcggcgatctggacggatgcagcgtgctgccggagggctttgccggtgtggacagctatgcaatgcttgcgcagtggctggaagacaggaagctgccaagcagtacaatagaaaatatattcagtgagtctttattaaaggttgtg

(The sequence listing continues in the following parts.)
